United States Patent Application Publication US 2009/0018031 A1 - sequence listing, part 11

SEQ ID NO: 5492 - DNA, 6000 bp, Homo sapiens
ggctcactgcaagctctgcctcccgggttcatgccattctcctgcctcagcctcccgagtagctgggactacaggcgcccgccaccacgccgggctaattttttgtatttttagtagagatggggtttcacagtgttagccaggatggccttgatctcctgacctcgtgatccccttggcctcccaaagtgctgggattacaggcgtgagccaccgcgcccatgagccacctcgcccggccaagtctttcttgctgtagcttggtctcctgtatagggaaacctcctacccactacagagaacactgggtgtccctggaaatggagctgctgtgtggcctccttgagccttggtttccccactgggacatgggaatgcgtcaagggcacccggcaacctgagccacattcatcctcagatcagccccagccacacctcaatattccagagatggggcagccccaggatctgggaccacaggcacctggcaagatgctgccgggctctatgaccaggctaagagtgagctgggaggcagccagtgtcctgcacggaaatgcgccccggccagctccctcggctcttctcactgcctccatggccgccagcgaggtaaggtacgataatggcaggggaggggggcatctcccactccgtggagggccaagccaggagctgagggcagctcaggttggggaagctgaccagggcaccaggagtgacctgcacaccccccaaatggagacaaagagtcccccagtgtcactgtggggcccgggagccacttgcctctctgagcagctgggtgagccagcatgggacaggccccatgcacacaccttgcaggccggggggcatcagaggccttgaaataggcaggtggggctttagccgggcaggtgaattctctttctgcacctggccttcctccctctcccagcccactggaaggggcaataagggagggcttctcagaggtggaggcccagtctaggcagagagaatggcaacctgtgcagatcccagaggagagaggagaacccaacctgcagggatggatggaactcaggagagaggccggtgcggaggcagagaaacagcggccagggtggctgggacacccccaggctctggtgatggaggctcccgacagcaggcgggtggctgtctctcccagtaggccccagcatggtggactggtgcctgtggaactctgaacacggcagggatgccttgggcccagcagggacctcaggccagcaggtgcctgggccatgccctggggaagagggcccaagaccccctaggctctatggctctgagggactgcccagcactttgagggcagggcaggtggatcccatcccagacactcccctttgatccacagggcaaacagctgccccaccctcaagtcccatgggtcccttgaggtcatgaaacctttccagctgagtccagaactgacacttagagatagtctctgcgtggccatatcagggaacagccaagaagagcaaagagggctcaggtgagtgacggcccctggagttgtgcaatgacacggccaggagagtacaaaggtcctggtcggagggtgggggagtccctgcactcacatcacacagggtcaggattccccccagacaagacctggtggcccagagcgcagcacagcatcatggctttctcctcgggagctctctcctccaaggaccgctcttcccagtgagcaggccggggcttgagcagcctccttcctgagccgccaactctccatcctcccaagatccctgctccagggtccactgccttcccagagccagagctcctaaagccccatcatctgctccccaagaccctgggccaggaaaaccctctgctgacacagcaaggatctcgccaaggggacagaccgccctggggagcaggacacgccaactcccacggctaggggtgcctcctcagtggggttgtttacctgaactccaggcgggcagacaggcaggcgcccccagcctccatgaccagtggtggccctgaggcatcccctgtaacagcaggctggaccagagagtgtggccccagacacccagggacctagcccagctcagcctcaggcccaaggcacggacatccctgctcagagagcaagaggcggccagagggcctcagggcagggctgcacatccccggaagccactgcgggacacttcaactcacaccctgctggccccatgcggtcatggccacacttgtcttgagggaagactgggaggggttgtcatcccaggtggccgtgtgtcccattgcaaatctgggtgtgtgggggcaaggatgagggggaaatggggattcagagagggaggtaggcatattgggataggagacagacagttctcctggctgcccatctcgggggcatcccttttctgccaatcccagtggccccaggcatcgacggggaggatgcagaggcaggggcagcctgcggccctctcccgccccggctccagcacccgtagggccctgagtccagggaaggctgagcatgtgcggttctcattgtcaccggctgggcaggccaagtgctcagcgagcttatggcccaggttttgtgcaaatcttgttcgactgagtgtgtatggcccatgggaagccctggcatttgggaggcacctaaccctgggatgagacacaaatcttgcacgccgagcccgacagcgcagcccctgatgtctctgccctccaggaagcagccccatttcctttctccagctggcccgagacaaatgctcacgcttcctctgcactgcttcctcatgccctgtccatgcccgctctgacctgtgccctccaccagggaaaaccgcgggtttttccctgcacagggggctgcaggccaggccgggctccacagggcagattgaggggcccgcatgtggccaagcaccccctcccctgggctcctgcatggaggttcccagctcccagagaaccttccgggccacaattccactaggcctggctttcaccaaatccaggagtcactcatgggcctggagggaggaagtggctaattttgcaacaggcctggcatggggcattgaattattcaacaacagatgcatttagcagttttatttctgtctcggtatcctcagtcccgcccaacaggagcccagctctggcaggaggggcaggttggcacctctacacagcggctgggagcatggagaccactcacccgtcacctgccacaaaccactagtcatggagggtggactcccaggccacagactgaccaggactcaggtaagccatattaccacccatgcagagactgaccctgaagggctgctgggcctgacgaggtggttctggttccatgggggtgggggagagtgagagggcattcagaaacaggaatcaggcggtgccagctgcctccccaggaagccctccagtggcaacctctggctctcaattctggccctgctgccaggaacagtaggggctgcccccttccccaccccacgtctcctccttttccgtgacagtcacacccaaggtgcatcccacaagagccacatcccatgcctggcttttgtccctgctgcccccaacccaggaggcacgtagtgtgtgcctggcaccacgctgggctccaggggtgcagagacagataacagacacagggagagagaaaataaaccgtaaatgaacacataaaaccaccaccaatggggaaaagagaaagggtgacgtctcggggagaggcagggcaagagggctgccccaggagctggtgtgggatctgaatcgggtagagagctagggacagaccctgcaggcagagaaaactgcacgtgcagaagccctgaggcatggcctggtctgggccaggggagcagagtgatgggcagggagattcgctcacactgtgatcggaggaaggccacgcccaggagtgcatctgagcgtgccagccttcccaggacctggaggcaggctctggcctagaatctgctgctaaccagagaagcatctggcctgggcctcagagaccagctggaaggaagggtggaacaacaccagtgcggcttcaatttcacggacattgcccagaagcagagaaagcccaacatgttagccttgtttgttcctttgagaaagggcctggttctgacacccagactggagtgcagtggcacaatctgagctcactgcaacctctactcctgggctcaagtgatcctcccacctcagcctccagggtagctgggactacagatgtgagccaccacacccagctaatttttgtatttttagtagagacggggtttcaccatgttgcccaggcaggtcaggctggtctcaaactcctggcctcaagcaatccacttgcctcagcctccccaaatgctgagattgcaggcgtgagctaacatgtccaacaaacctttatttatttatttaaaaattttttttttttagacacagggtctcgttctgtcactcaggctggagtgcagtggcaagatcatagcttgctgcaaccttgaactcctgggctcaagtgatgctcctacctcagcctcccgagtagttgggaccacaggtatgtgccagcacacccagctagtattaatattttaatttttttttttagagatggggtcttgctatgttgcccaggctggtctcgaactcctaggctcaagcaatcctcccactttggcctcccagtgtactggattgacaggcctgaggcaccacgaccgatcccaattagcctttaaacaccaggaaaccaaagtcagatgccaggacatatctaaagagagaggcagccctggcagtgggtctgttcccggctgtcacttgtcacctccatgggcatttcccaagccaggctgcatcacgccaccattggccggccccgccagggttccctgtccacacctcccagtccacttggctcagccagcagccgcccagccccgctccccacccccggaagcccctcttttctttccctatcccaggactgtctcctggcccagtcccagacagttcacagctgaggaggaacaaagcagaggaaagggacgtggcgtgacgtgctgggagtgaaacgctgacacctccgtggccatctgggaccacgacctgcactactgccctcacacccggacctggagctgccacttcctgcctgcttcccagaatagctgggctcatcctctgagcaggctgccctgccttcctctgtctctgctcaggacagagactcctcctaggacaccaaacaccccccacacagcacagacccagcctcccagccaacggccactcactggagcaaagggagccaagtctggctttggacaggaagatggggtttgccaggcaaggggtgcagagatgctgaacttgaacatggaggggaaacaatgatgatgccaagggaaggggccctgggatcctaccagaccctaccccaaagtccgaagccactcttcatgaaataatatgtgatattaaaaacttaaattttcagtttcatgaaacagcaaataaaagccttgagatagttgctctcccaacctgtgctgtgtgcttttggtaacagagtccttcccccagggacccccaaattccccagtatggggcatgtgttgtactaatttcaagacctctatttcaccctgagcaatagctcctcctccaggaagccttccagattgctcagtcaaatcccatgcagactctgcacacccttgcccagggctgtgccccttccccacggccctcatccagctggagctctacattcttcgtttgcctctgtgactgtagggtgccctccagtgcccacaagggccaggctgtgtgcatcaggcacatgggtgtggagggagcatgcattcaactgtgactttccttagccctcctcaagcctgtatgagagcaggggaattgatggctttcttccta

SEQ ID NO: 5493 - DNA, 6000 bp, Homo sapiens
ctcacagagcatccctggtgctgaccggtgaatggacatcactcacagctggcccacggctgtgcagcctttccagcacagatgagacaccatgggggccgatgccccacggcctcgcagggccacagcagggaggagacagtccctctgcctccctgtcctccacaggacagctgggcccagcaccccggcatgagacgtgtgctcttgaggcagctcctgttcctacttactgtggaaactgaggtgaagagccctgtcccatcacatttcagggtggatttcagctgcatcggtcccgggccaccccgccagacatcgccaaaggaggcaacgacagcaatctaagtggcctagaagccacgtccacacagggtctcctctcccagtcaaatcggacatgcccccagggccttggtgccaatcacacctgaggacggccagcccttggtgtctgggtggctttggagacagcaggcctgtgggctcggccgtgtggagcaggtgaggtggtgccctgtgttggttcatggccagctccctagggctggcattggctgcccaggtgccaggagttgtgggcggggaagaggaggaggagaggcttgagagttgggcccacaggcacaccctgcaaggtaggcagacggctccacccgcgccttggccagcagccgcgtgtcagggtgctggggagaaggcagacaggtagggaccctcacaccgctgacagcccaggtggggagaaggagcaggattgtacctcctcctcccaggtgggaagggcaggtgggcatgagaggagtggggaccaggacagtgcggctttggccacacccctgcctcttgcctcagtttccttatctttagcagggaggatccccgcttccctgggctgtgaagggccggccccactggggtgaggtggggcattctggaaggggctgcccagtgctggaagagggtctgggcaggagggccagccccacgggctctggatctgagacttcaggggcagtgtctggccagcagcctgcaaaggcaggtgcggctcagaagctgagggcgaagggagtggggcagtgggaggggtctggggtcaccaggtcactactgtgtcctcttgccaccacttccctgagccgtgtcctccactgcagcccagggagatggggcatcctcatagggaggacacaaggacacacagctgacttccagcctgctgcacgcagggacctttctggcaccctccccttgtgactggccgttcccccaaatctcacaaatgaggcaggcccagggaggctgagggacctgcccaaagttacacagcctggtggggatgagcggggctgggaccccagggcctggtcatccagctctgccctgagctggtcttggggagcccaggaagccacatttggctcttggctgcggctacaggtgccccgctgccctgggagccccagcgccttcaccgtctggggggctgcctcagttttgcctcttgggagttctggggtggacttctggccaggggtcacgatggcccctggctgtcccgggctccctgccccaccctgggatgcacagggaggggtgcagaagacctgggcacctgctcatgcaaatcccagctgtttgcatcacctccctctgggcccatttgcctggtgcctagcacctggccaaatgcctccttagtccctgggctggccggcgggggcggggggcaccgagcctgggcatggggcaaggggtggttgcggccaccaggaaggtgaggctgccccacgctgctactcggcttccctgacctcagctgctgggtgcccagctctgtcccgtcctcgggaggaaggaggtgctgtgggccctgggaagggccagagctttggttgtggctgcttccacctctgatggctgctggtcgtcccgggggtcttgcatagagtcagggaggcactgccgagctccaggctgaagggtactcccggatgtcctatcccagaacttccaagaggcaaagctgaggctcactggaaagcaattcaagggccagggagccctgtaggacccctcccaaggcccaggccctccattagcttccccaccagggacgaagggaagagaagaaggagtcccccatctatggcctaagagtcatggggaaggcgaggataacagtgttgtccagcccagtcccgtcccccaggctgagggtcatggccaaaccccaagccccctacaccctgtgctggggacacgcctggccatgcatccccagctgcagggcacatgtccacacgtagccaggattgaccccagcgggtgaccaggtgtggcagggcctggtgggagtgaaggccagcctgaggacccccgcccagggtgaggactcccgcccagggctacaagcacacatcccacctccctgcctgttctgcattaagtggtgtcctcccagatggggcgacactaatggttggatactgtccactgggaaccttagaatatgacctcgtttggaagtggggtccttgcagatggcgcaccatgaagatgaagccacgctggggtagggcgggcctgggcaatcaatgattgcagaggacacagacaggcgaggcagaccatgcggcaaccaaggcagaagctggagccacgcggccacagccaggaacacctggcgcctcaggaacctggaaagggtgggaaggacccgctctgagagcttccagggggagcacggccctgccgatgcctggatttgggacgtctgggctctagaactatgagatcatccatttgttgttttgagcccccgagagtgtggccctttgttttggcagccccgggacacaacagcaatgccaagccttgtcccagcctccagcccccacctggggcctggccacagacaccagctcccaacacagaaaaccaccaggcgtctccaccagcgcgggaggccgtattcaaatcctgcctctctgcggtccgcgggctggttcctgctctggaggcagaagtgcgggaggatttgcatcaccctgcagggacagctgaggcccacgtggtgctgagggcatcagggcgcctccacaggcctggccggaggagggggctgaggcccgtgggtgggtcctgcctggggctggcagtcaccagaagtcgtgccggggttgacttgggcctcacaggggggccctgggcagccaagacaaccagcctgagctgggcatcttaaaacaatggcaattgattctctcatggttctggaggccaccagtgctgagtcctaagtcaaactgtcggcaaggccaagccctcgagggggatccttcctgcctcttccagcttcggggctccaggtgtcccttggcttgtggccacatcacccaaccactgccttcacccctcccctgtgtcttaaagggtgtttttccctgcgcgtctgtctctacgtccaaatgtcccctttctctatcagaacctgggaatcagggctccccctgctccagcatggcctcatctttacttacatcttaatacatctgcaaagggcctgtttccaaaggtcacattcccaggtcctggggtttgggacttggacatacctgtttggggatgcagtaactgtgctggctccagaggcctaatggggagggccttggccttagcctctgccccaaagccagccccaggggtcccaggacacactccctctcatctctgaagttccccccaactcctgtatcccctcctggggtcacaggtgggcccctctctaggaaatgaaggtttttacagaacggtccattgtcttctcacaaagggcttctgtggtggacacagcccagagcgcctgggtacaaggtgggcacaggagaaccaagggacagccctgtgggatcaggagctgccaggtagccccaggtcggacagggtagggtggctgggggcccacggagacctctgcccagcggcctgtgacccgacgcgtggttccaggagggcagacagaggagcaggtgccctcggcctgccagggcttgtcctcaagcaccagcttccaatattgagttttcagaggagcaatcggagggaggtgggaccaagccagaccgaggtcagccaggctggggctgggcagctgacagatgaggctgtgggcaggggcggagccagggcgctgaggggccagtgccgatccttggatccctgccacatagagaggggctgagatgcccgacctcaccgggcagctgggagacatgagccccatgagggttgagggaatagggctgaggcgcacgcggcctcttctacccccgcttgctgatgtgggagcgccacgggaatagctctgctgctgatgctgtgtgggccggggcaaggcctcctctctctgtgtgtcctgggcctcctggacctcctgggcaaggaaggtggtctctcgtccacaccgcctcctgcacttgagctgagggcacctgtctcaccttttcacctctacccaggtgcacccagggtctccacatccctgtcctgggagcgggtgggctgtgtggccaggggactgcaaggcctctgctgagtctttcggagtttccaggtcatccccacaaaaggcctctggagaaatgtctgcaggtgtggccaacctgaggtgccctgagtggggtgagtagaggaaccaggcgctgacagcggagccccacacatcccatcctcacctgggaaggagcttggttggggcggtgctacagcgagtgtcggagctgcagggggtcgctgggcagggcctggctggagagaaggtccctggggcagagatgcctgggggcagtccccaggtctccttgtgcatgttggctggagaggggcttcccaggggaaagcagagccagccccctgaggggagggaggtggggatgggccttctcagccctcaagggccagggtatccctgcagctctagaggccaccatgcaggatgtccaaggcccccgtcccggaagccccggggatgctgaagaccggcgggagctgggcttgcacaggggcgaggtcaactttggagggtctgggaagaagcgaggcaaggtaagggcaggccccaggcctcaggtgatgtccgccttgacctggaacccatgaggccccatttccttccctggaagctgagtgccagggtcctcctcacccctggggtctgctcccctggggccatattcagagcccccagacaggcagagttccagagctggaaggagtggctctggccggcctcctacctccctgcaataaccgggacccctgaagtccccccgagagatttggaggtgcaaggtcaagtgcatccagggccccacctctgtccagcgccctcggctcactgagggggatgccagcccagagaggggtcaggactgcccaggtcacacagcaggtcaagggaggactggccctgtcccagaagggatattgggggccactctcctcctgctacctgcccccaatgcccagcacctccccggtaccccctgtgtccagcccccttgatgcccagcacctcccagtgcccagtgtccccccatgctcagcacctccccagtgcccccttgtgtccagccccccccaatgcccagcagctcccatgccccgtgccccgaaagccctgagctgcagacctgccttgcagtttgtacgggtgccgagcggagtggccccgtctgtgctctttgacctgctgcttgctgagtggcacctgccggcccccaacctggtggtgtccctggtgggtgaggagcagcctttcgccatgaagtcctggctgcgggatgtgctgcgcaaggggctggtgaaggcggctcagagcacaggtgaggccccacccggcacaggcagcgctcccaccccacagggcagcccgaccccctgactgtccccgcaacccggcacaggcagtgctcccaccccacagggcagccagac

SEQ ID NO: 5494 - DNA, 6000 bp, Homo sapiens
aacctgctgcgcgtggtgctgagtctgcatcatcctcctgatagaacctccgactcaacaccagaccctcagcgagtccctttgcgcctcttggctccccacattggccggcttcccatgcctgaggactatgccatggacgaactgcgcagccttacccagtcctatctgcgagaactggctgttgggagcctgtgagccccaggcactttgcatcacagtcacatgcccattcacaccacacagaggttccctgccttgtttggattggcactgtttgccattctctgggttggctgtggcatctaccctccctccctgctgccagaagcagcatcctccacttgttcagggcttttcttaatactgaacgtagcataagggcttctggaacccagaagaggagacagtttaccatcctcaagatcattcagtgtttttcctttaaaaaaatggtcaataaagctcctttggcagaatcccccaaagaaccagggtattctttttccatccctagccattctggatcttgtgaccctccatgccaaccagcttccctactcctaccctggcccttttatactaggactccttaggaggagtgagacaggtgataatggatccttaacagatgaactatccacagaaggaagagggatccgtctcttaagtaattggttagttaacactgaattttggaggcaaaggagggttggcctgagttaggaaacaaaatgggatctttctgacacacttagggcagaagtgaatgcctgtcacggagggattgatcttcagggctgtttttgttcctgcctttagagttccatgaacaccatacctttgctactactatgtgcaggaacccttggtcacatgtgacatgtctgtgggaagctcccagagtttggtttggtccctggttttcagtcttgctgagactctgtctggatttgcctgcagagtttggataaaaaatggcaggttgggtaaccctccctgttcatcccatgttagctccaaagcatttcccaccctccatctaccccttccagaagcaaaaacaaaccatgactgaggcaggcatggagttgggcgttaggggcaggcagagggcctttgctacactgctgacagctatagggagccccaggtaatggcatgagatagctggtgttagggctatctcaggcaatatggccacacctgggtctttatgcatgaagataatgtaaaggtttttattaaaaaatatatatatgtataaataaatgatctagatattttcctctttttctgaagctactttcttaaaaaataaataaaatgtttatagcattcctggtattggctttccctttgtatttttgagccttcttaccctgaggatctttatggtggccttgtttgatttagcctgtttttgaatttgccttctaaatggagacaggccatgggctaaagagaacaattgggtgctaaactgaaagatagattagcccaaaggctagatttataaggggaaatttaggggcaagggagttgattattgattaatactgattgctgtacatatatttatgcacatagattcccgggtctcaaattgcccaatagaatataccattcaaagcctcctcgctcttctactatagtggttttgtttttaaaccctgagtgacgcttcacctttctaaatcagattcccttttgtaaaggggataatgattgctgatgttacttcacacagggctattttcaagaggaatcaattgagtagcatgagtactattccagatcttattttgatctgtcaagctgaagatgtgagcaaattccaattaagattagaccaaagacttctgagactttcaggaattcagggatgagaaagcagagtgggtcagctctgttgtctggaacttccatttaacttagatgcctcaggataggggttactcagctggaatcccctccactactgactcactatgtgaacctgagtgagtcacaaaacatagttggacttccagcaaagaacacctgacctggtttccttaccagaggaatgtttcagaaagtgagtatgctatagaaatggttagctcttagcagtgttcggaattgtgggccaggagtggtggctcacacctgtaatcccagcactttgggagaccaaggtgggaggatcgtttgaggccaggagttcaagaccaccccaggctacatgacaagactctgtctctaaaaaaaaataaaattagttgggcatggtggtgtgtgtgcatagtcccagctactcaagaggcctaagcaagaggatcgcttgagcctaggagctgaaggctgcagcgagccatgattgtgccactgcactccagcctgggcaacagagcaagaaaaaaaaggttctcaatcaaaggtttatcatagaagccatgttgtgcataaaagagaatatcaacttccagttcaagataagggtgatgaacaatctcttcttttttttttttttttttgagacagagtctcgctctgtcccccaggctggagtgcagtggggcacgatctgcaagctccacctcccgggttcatgccattctccttcctcagcctcccaagtagctaggaccacaggcacccgccaccatgcccgactaatttttttttgtattttcagtagagacggggtttcaccgtgttagccaggatggtctcgatctcctgacctcgtgataagcctgccttggcctcccaaagtgctgggattacagacgtgagccaccgcgccaggcctgaacaatctcttccacatcccaaaatcccgttgaaatagtaaaaaatgttttaatttcaaaaaaaattctcaaaaacataaaacaggaaccagttacctcaacattcgatagatctgtggaatctacaacattcaaataacttattttctcaacagaacccaaagttaacagaggtctggagaattaaatattggaataattaagcaaaggcctgcagagtatctgctctttttagatgtttcatctttagctcagttttgttaatttgtatttccagaaaattgttccagattttttgttattcaaataaccagtccttagacgtattaatcaattttactggagttctgtataatcttaatttctgctttaaatgttcatttcttaggctttcctaaggatttgttaaaccttgtattggttgggcacgatggctcacgcctgtaatcccagcacctcgggaggctgaggagggagaatcccttgagcccaggagtttaagaccagcctaggcaacatagggagaccttgtctcttaaaaaatgaacaaaaattagctgggtggtgtgcacctttagttccagctattcaggaggctgaggtggcaggatggctgtagggtattttggtagttgttctttaacaagttaaggacagttcccctctactagcttgaataagtgaatgttggatttcaatttgaaatgatgtgaaacgcttgtgtgttaggaaggtggttggagataagcagagtacctgggagaggggacgggtggagaaagtgcagggaatcactggcatatccacgatgcccaaagtcatggctatggatgtgattgccagggaagtatgtgctgctgttggtcaggcaactggtcagcttgaacaaaaataatcaaaactctgtgcatgataaatacctgtgacctgaggatagcctggctaccttactgggaccacagtgtaaatattgttgatgacctgctgtaccttaggcaccgtgctagacagtgccttgcactatcaggttatctcatttaaatccttgcagttttcaagatgagtactgttaatcccattaccagattgagagaacagaaacccagagagtttaaatatcttacccaagtgagagcgctcataagacagggccgaaagtgactgaatgcttgccctcttctcccacactgcccacagtgtttgggcaaggtgaaaaaacaggctcagatgggaatgactgcagggagtctgaggagaggatgtgggctccatcttctgctccactgggtcatctggagtggcctgaggctcagcactactcccaccaggagggaagggcttgcttgacccaaagtgcctagcctggagtgtctagtcccgcactgcaaggagagctgcaggtctaaggcaaacctccacctccagaattcaggcaatggtggctaagatgagaggacagttatccatccactgaccctggcccctcacactcttaagccctggtcttccacataccctgacccagcatacctgtactctccaacacccgaggatgggcctgagctgagtctgtgtgctgctttacagagtttgaataattcaagccccagaggcccgaggtatcagtttccgttgctctgttgtcataggcacggtgtaattaagctaatgaaagggcagagagggaggggctgtggtcctgtgcctcggacgactctgggctgatcaagggaggagtccctggtccctgttctgctgagagagcagcaggcccatctagagtccaggtgtggggaatggaagaaggaaggaatgagggatgaaacagaagtaggagaaagggagagagagtggaaagaggcaggcaggggatgatcagagtcagggaggcagagagaccaagaaagttacagacggaaagagaaggaagcagaaacagagtgaaagacaaagcaggtggggagcataggaaagggcagaggcagaggccagaagaggcaaggaccagcagagaagaagaaagaccaagtactaaaatccaggggcaggcacaaattggagggtcagaagactggaggggctgcagggctcgctggagggtggctggacccaccagagatctgtcttacttctgacttctaggtactgtccacaccatccttgccagctgggcctaattttgccctaggtctggccaggaggcctcacatccagagacctgcccccgctcttgcagtgccagggccatggggctccggagccaccacctcagcctgggccttctgcttctgtttctactccctgcaggtatgaagctcagtacaccagccctggcctctcctggtggtgctactattcctgttctcccaaaatccctttccatgtagtctctcttgtgtttctcctcagtacctgttctgagaacaagctctctatttggggagtgtggaggagaggggtgctgaagtgcgtgagaggagacttgcctggctagggtggaaacagtgagcggggagcttccagagacagggctgggaaaatcagaggggccagatgttgaagggcctgccggccaggccaggtctttctcctgcagatgacggggagcactgaaaggtttcagcagcatactagcctggtcagatgtgcatgcttaaaagcgtggtcctggggcatgggaggggtagaagaaggtgagcctttggggaaagggagacagtgaagggagggccctgacctggaggggagagggtagactcaagacgatgtttcgcaaaatctggaggatttgaatgatctgacaggatctggagattaactggattccccgaggaggaggcagcagagggagaagggagggataattcccagatttccaactaaggtcactgttgaagctgagggcatgctatttgctgagatagggaacatgggataggaagcaggtttcagagcatggagggaggaagcgagttcatattttggaccctcagagttgaaggtgcctgtgggaaactcaggagtggactgtactctattggggtctggagctcaggagaaaaatctgggatgaagaaaaagatgggagccaaggacaggattcatgggaacaatgtttaggtcagggattgaggaaaatttgtgtcagtaaagcctggggaagtgtgttttcagagtgagggagtgttccatcgcatcagaa

SEQ ID NO: 5495 - DNA, 6000 bp, Homo sapiens
aaaatgctgggattataagcataagtcatataagcataagcttataatggccatgctatgcctggccatttctgtgatatttttgatgtttgatttgtcttggagccaaagctctgagggctggctgttgggcttccctgaagccttgaacacatcttactgtgagcttatatctttggtttgagcctttagattctgggatctagacaagtggccctggtgaagcctgaagacatacatatgtccacagtgtctaggctgtcaggtgtagggcaaacccaacgtatcctccctggccaagctatgcctcctggttatgttgggtagggtcggaccctccaggcatcctcttcatagctctgccctctctcctaagctctagacctggtatgtaaattcaggacccagatgagctccaccctttacagccatcctcgttgccatgtgggtacttgggacccaggatgactggggaagacattagagagaattcctgtgttattttaaagttatgctgtattaaattaatagataagcataagatgtcagagtcacttctaagttaaaatactgaaatattatttctaagttaaaatactgaactattaatctctaaacataagtttaagtttgtatattttagcatcttgtttttatgtggtatagaaaaactaattatatttatatgttaattaaaaaatttatctacaactactgatataaaacagtttgaaattactttctaggtttttcactagaaattaaggttactaagagttaaaattgtaattaacaaatgtaattaaaattactagatataagagaaacaattgtgtatacagagtgtataagaaaaataggatgaatttttggtagaaaggattatgaaggaggcatgagaatatgtttttttgttaaaaagaaagtaattttgtccagaggtttttaaaggttgttttaagttgaagagatttaaaaaacgataaaactgaatggatatagaaaattgaggaaagaaagaaaattgaaaaaaattatgagtttataaaatgtttatagaaatgttgtgtggtgaaagctgattgagatgagatgaattagcatttccattgtgtatactaccctcagtcttccagactggtgggatgcacaaatggaaaatacaaaatcaattggcaaagcttacagaaacgtcttaccttccttggcctaagactctttcatttgcttagcttaaattctaccctgcttggaatacatcagctctctcccattgaagtgataatgagaaggcccatgcccctgaaaaaaggagcttacaagctagctctccttaaaggtggtgttcttaaaaaaaaaaaaaaagaaaaagaaaaaataaaaataagtaatcttatgtctgggtgcggtggctcacgcctgtaatcccggcactttgggaggccaaggcaggtggatcacctgaggtcaggagttcgagaccagcctggccagcacagtgaaacccccatctctactaaaaatacaaaaatttaggcgggcgtggtggcacatgcctgtaatcccagctactcgggatgctgaggcaggagaattgcttgaaccagggaggcagaggttgcagtgagccaagattgcactactgcactccagcccgggcaacagagcgagactccatctcaaaaaagaaaaaaaaaaaagagtaatcttcatctctgtcctcccataacacactatttctatctttgacctaacttgttttccttttgttatttaattatacatctcattttgtcagaatatgtataatactatctgtatctcttagtatttttatttttttcagttttgtagagaagtcttgctatgttgcccaggctagtctcgaactcctgtcaagtgatcctcccgcctcccaaagtgctgagattataggcacgtgccacagtgcccagctcttctggtattcttacacaggggcttgattaataaatgtatttgctgaatagggatcgagttatttttgcgtgtatgtgattttcctgttcctgccattagatggcagtgctcaaacttagtagtacaaagaaattccaggttttaaaaattaaataggattctgggtctgtggtcttatctgctttgaaacaatattgccttagcatgctataacacaaactaccaaacgaccttgtttgttcactgctactatatgaaacttctctttctgtatggacctctttggtgtgtggaagaaagactttcattaaagttctgaaccttagcctatgcagtcagctagcatttacaaattatcgtgtagagcagatttgtgattatctaaatctatggcattacctaccaaatgtataactgttaccagtgctactgtgctactaccttaatatttgaaaggttaattatctctttttttttttttgaaacggagtctcgctctgtcgcccaggctggagtgcagtggcacaagctctgctcactgcaagctccgcttcccggattcacaccattctcctgcctcagcctcccaagtagctgggaccacaagcgcctgccaccacccccgggtaattttctgtatttttagtagagacggggtttcaccatgttagccaggatggtctggatctcctgaccccgtgatctgcccgcctcgacctttcaaaatgctgggattacaggcgcgagcctccgaacccggccgattaattttcttttaaagcaaagaacagtagaaactttattcgattttctattttctcccaactcccattctcttttgtttttgaagaacagcagaatgaaatgagctccaggacccatccaagtaggatatgatggtttgaacagattccagcatggaacaaagtttccatattttgcctgaagtctttcattcatatgattcttctaatgcttcctggaaaattccaagaacttgatgtgaaattatgcttaacagaacacccaattggcctatggcaggtgcattagtccattcttgcactgctataaaacaaagaggtttaactggctcacggctccgcaggctgtacaggaagtccgacggcttctgctgggcttctggggaggcctcaggaagcttacaatcatggcagaaagccaaggtacagcaggcacgtcttatatggtgggaggagtggggcgggggtgggggggcgccacacacttttaaagaacagatttcaccagaactcactatcaccagaatggcaaaaacagggaaatctgcccccatgatccaacgacctccaacactggggattacaattccacatgagaggtcaggtggggacatagatccaaaccgtatcagcagggttagaataacttttttgttttcctcctaagtgttgggcttattcgtagggagagtatggtaagccaaataaaactatagtatacatagtatttttcatatagtatacatatttttatatgtaatatgaaaataatgtgtccaaaggaaggtgagtggaaactacagcaaaataccagagtctttctttagaaaaggacagcttctattttgatgtaagagtatggctcctcattagccctaacttggactacagaatgacttcttctgagcagagcttataggagaaaattttgataataaatcaggactgatgacgtttttgttttttgcctgagaattttctcagagtttctctgagaaactgtatcacaaaattcctattagattgctcttatgtagacaacttgaaattattggcaatttccaatttagcaaaatgttggctataataacttagtgaattacgacaataacccgtttctcttaggtttctgatatttaagtgtccttacaggagaaagatgaagttatcttataattgtccagctcaactgctcatcttcttagcataaacactgatttggaaaatactttgcgtatcacacgtaggagcctgggaatgttctcatccgaactaaacagtggttaaaggtttttcaacaaagttcttgctgcaatatctgttttcatacccaattactcaaaccaggtcctcttcctctttgcttcctctccttgcaatgcccttccctctcttccctaaactggagaacttacttatgcttaagattcagcgcaattgtcactcccaggtgaaggctttctcaacaaggcctccccgtctgctcccagagctcatggcaagcagctcggcttttatcagagaataatgggattatctattttcctgtaggtcttgccccgggggtgtaagcttcgaaggcggagactgtgtcttttacattttttcccgtttttattgcccagccagcccatgtaggtgactctcggtgtttcctaggcggccaaactgaaggagtttcagctggcacaggggttcccgccaaccgagcgtttaaaaataagcagcgggggacgttagggaacagagggtgtccctcacgacgaccgactctcatcaggtccacgccggcagaagcgattttgcagtttgctttgatgaggaaaacgctctccctgaagagtccctgcactatttctccaactctgtgaccgagacgctgtccacttttctctaacggtgacaggaagtcaaggggaaaacgtgggattcaaaggtttgaaggtaacagccctcagccactcgggctcgaggcccgcggttgacccgagctgatgtctgtgaggagaggtcgcgcggcgccttcctctccacgcgcctgagatcccacccgtggccgccgcgccctcaactgccttctccttcggtgccccgcccacccctgggcggagagcaccgttctcgcgagaacgctgctggcctcgcctcttcgcattgtgagctctcgcggtaagaggctgaggagccggcctgcaacctgccggggcggctccgctacgcgcagccgcctcagtggcttcctccacagccacctccggagggatctggctgaggaggaagtggaggtgtcactggccccggcctttgccccaatcttgtgtgggcactgaagggggactacaggttcgagagtgagtggactcagctggggaactcggcgggggcggcgcgggaggctgggcttggccggggcgaaagaggaaaggggcggagggcgaatctgggcgtgagagccaggctgctgcggcggtggtctgggcggccggaccctgctcgggtaccgtgggtggcgttttgggctccggccacgagcacccaattaggagaggccgggataagacttgagttttgcggctgctgcttttgggttgggagtccgggggcctttctccggggatgaaggcgataccctcatccctttccagggcagaggaaccccgtgccccgcccctttcctgtcatctcagacgaacgcagcgacatcctgaggaaggcgcatcacaataggggataaggtggtgggcagcctccctctgggtgaagaggagtgagaccccactaacgtgctgcgtggttttatgttgtaaccattttacgtgtggtaaagctttgttttcttaaaacttgcacggaaaaggttctgatgtctttcttcttcagatgcaggtgccctgacacccttatctttgggaatggggcgggggaaggtgagacatcggttagtaatttgttagtgtgggccagtgtgactgtccctgggcctcacagatttcctgcttctcctttctcagtattctgagtccatgatgaaaagtcactagtccagacatgctgaaagatagagcttcacttgcttgtggctttgtgcacttagtaaacaagattattttacgaagatttattatcttgcagagttttcatgctttttatttaaattagcaatctaaatgaaacagcacaggatattaattgtatttggacaactgagttccttcccgcccctatcctcccaaccccccaactacacaaatttgatcaaaatcttttagagaggggg

SEQ ID NO: 5496 - DNA, 6000 bp, Homo sapiens
agagctggggggaccctgactctgtctagtcttagggaatgttacacacacacacgcacacacaaaaacactatgcaaacacacacataagctgcacacacagacccacacagacttcacactgtcacctatcacaacagcacacacacagccacaaccacaacctacatacacacacagagctgagctcccaacaggctgagtccagtccctgagtgccgggaacctgttcagtcctgtggggtgggggtgggactaggatcggggtcagatgggagctgagccacagacctgggctccacatcccccaagccaggccagaccccatccactgggcaggtgagccaacagctgttgcccccacttggcaggaaaacatcctccaaaaggtggtgatgacagccttcgcagaccgcactgtggtcaccatcgcggtaaggggcccattgatggggtgcagagggacacccagggacaggactggcctgttgtggccgtcatcagtgcacagcccctgggcttgcctggtcccagtaatcaagaaagaaccctgaagcaggcagttcagggcaaggggcctggagggcatgcagggagcctgggttgcaggatttggggtggggggttttgcccctgtgcttccctcagacctcccctctccttctccaggttccaaggcctgcccctgtcccaaggccttatatgttaggctggcgttacttctccataggaagtgggggaggggttgtggagggtctctgagccttgaagcctggaggtggggtagagttgggacttggagaggagagaagggtggtattagcagatggagagcttgtagtcacatccaccccaggaaagtgcagtccccacagtgacaggacattctggccacatgcctcatcctcctcctccaagccgcaggagggccaccctcagctgtggcccccaccgcgggtggtattcccaccatcctgacccgccccctcctgccctgcccagcatcgagtgcacaccatcctgagtgcagacctggtgatcgtcctgaagcggggtgccatccttgagttcgataagccagagaagctgctcagccggaaggacagcgtcttcgcctccttcgtccgtgcagacaagtgacctgccagagcccaagtgccatcccacattcggaccctgcccatacccctgcctgggttttctaactgtaaatcacttgtaaataaatagatttgattatttcctactagaggccctaagtctggtgggcaggggctggcggtggatggtgggttcagtagaaccagcctggctctgacatcaggcagaagctgtgtgagcaaaagcctgcttccttacctgtgaaatgaggcctctattagtcagccaggctgccacaacaacatatcacagactgggtggctttaaaacagacttttttctcacagttctggaggctgaagtctgggatcaaggtgttggcaggtttggtttctcctgaggcctctctccttggcttgcagagggctgccttctggctgtgtgctcacatgacctttactctgtgcacatgcatccctgctttctctctgtgtcttaaaaggacaccagtcatattggattagggccccacccctattacctcattaaaccttaattatctcctcacaggccctgtttccaaatacagttacattgtaggattaggcttcaacctgtgaatttggcaggacacaattatgtccatagcaagggtgatagcatttctgcaatgagcttatcagataaggtaacagatctccatacagcttggtctcctttcttctcactttcattcttgaattaaaatctggattaacactatttcaattgcaaatgacaggaacccaattcaaagtaacctaagcagaaactgaatttattgaatatgtgactgacaaggctaagaggtatactacttcaagcatggctggacccaggtgtttgacatccatctgggatgtgtcttcctttctgggttccattttcctcccctttcattatgacagatggccactagcaggtccagcttacatcctgccccaaggcaacccaagaggcaaaacagatactccttcccaatagttccagcaaaagcttgggagcaaatctcaatgcaccaacttggatcacattcccatccccaccccactgtgatcagaggggtggcatacactggctggctaggcctggatcatgtctccatctccatccctcaagcaggggcattcagaagtggaaaggtggtccttcagagggaaagcacagtgcatgagtcacaggtcagccaggtggtgtctgggagacgctggagcccagacaccagggagactaaaacagcagctgtcctgacttcctctgcatcacgaaacaagagtgcacacctgcccttggccaagaaatggcaggtgctcatttacatctcattttatgatcatttgcatatcatctgcagtactggctgcaccaagccctgaggtgcagacctaagagtcttgaacctgcatcctcttggctgcaaggggatcatagaggcacaacataagaaaagcccaccagttatcggaggcaggtccagtgcagacccctgtggatgttccaggagccagagaagctcggaaaggaagagctctgtaaagcctggcagcctgcctggaaaagacaaaatttgagttaaatattgtgggggatagggattggttaggcagaaagtcagagaaagggttggggtggcaggtagggacagcaggagctaaggagtgatggtggaagtgtgttaagagtgttggttgatcagggaggtgggagagagattacagcagtggggagggcatcatatcagagagccctgaatgccagagcaaggagtgtgggctatgcccatggacaaaaagggagaagggttttgagcaagaaagcgacttgacaagttcagtatttggtggagatgactataagcaagtgcaggatggagcaaaaggggaggctgagcctttcaggtgggagactcagcctctcagaagggtgagcagcagggagggaggtaaggcctcaaggctgcaccaggaggcagaacccagcctttccagctctgagatttccccaggggcccagcagcttcctccactgtgagatctcccaagagcagagccggggaactgaaagaggactccacaagcctaccactgctccaaagccaccccacctcaacagattgaagggaagtagcaggggcagggctgggcccacagtgaggtgttgcagggatgcccaaggtcatcctggcccaaaatccctgtataacatccctcatggcccaccgacttgatttgggtaccccacagatgtggctcatctctggttattgttattagaactgactcttgcatatgtgaaaccaaagcctgcctctgttccacttagtgtcctggttctaccctttgggccacaaaaaactactagttcatcctccttcaaggccaggtgtttctgcaatagtgcccaaatccctgggggactttccttttctgatggctggacagttgtagttgcctcagagatttccccatgtaaccctgtctccttgagcttcccactctgctcatctcattttaccctccccttcctagacactgcatctttgttaatatagcccatgatcacacccatcctttgtagcggtgttcgctctgcctgcaggtgggtagggagagaaaggaaaatccaatataaaatgcatatcttgcccccactgtggcccacagccacactgccttttccagaccctgtctcaagcccccactccaacaaaatggccgcagatggtcaggggttcttccataaggatctgagccacagacagcggtaaagccgttactgttccaacaacagagatctagcaggctttccctcccagctgagaacccgggtccatgccacagggcagcctcaggctgatgcctgaacagaaacaccaccatgccgggaccaagagcctgggtcccccagtgcccgaggcagccctaacacactgttcaggcctaaataccacccatgacctaacgtggaagaagtcaggtgacaggtgtgagaaagtgtaaagcaagtggcctcggctcaaaccttctttaaagtagggccggaatggctgagaagatggagccgcccaggctgccccacagcagtagcaggtgttaaactgtgctcctttcctgccgaggccttttttttttttttttttttttttttttttaatgagagggagtctgagcttccatcagattgtcaaaggattcaagactaagattaagagcatcccccaaagagaagcagctgcaggttgagaagtcctcggaccgcctaatttccgccagccctgggattggtggcgccgcctctcagcgcctcctttcccggggaacctgcaaacctggcgcggccgagaggcggattactgacccaaatacggatggggatattgggggaggggagccagggcgacagggcggcggccccagactgggagggcgggtcacagatccctcccagccccccactttcgtagagcgtgggcaggaggaacctctgggttccgcggatcagaaaaactccaaaggccgggttgtgagtcccgggaggggaggtggagggcgggggcggggaggggcgcgggaggggcgggggcttgctccggccccgccccctgcgctccggtgcaggtcgggctccccctggcggtccccggccccgttcctctcctcgtgcgcccccctcccgccgtcctagacccctgcctagcccaggtcggtctccgcggacccacggacggacagacagacgggaggacggccagccgcgagcgcccgggcggcgggagggggcggggaggcgacggccgtggcgtgaggagcaggagcaggtgcagcggcggcggcgggcggggccgggacccggcgcggagcgggagccgcggcgcgggcgggcggcagggaccgggaggccgcgactcggagtcagccccgccgggtcgcgcgcaggtccggggagccgcggttgagccgggtggggtggtgactccagagaacgcaggatcccaaggagacagagaggacgagagctggagggggatccggaaagcggcgggggcgctccgggaggggtggagtaggacatagggggcgcacctggaggagagacggggcgggggtggccaggacctgagctggagcctgggagcccgaaggccagacaggtgaggcgggagacccggaggtgggggtgaggtccggttagtgggagagatccggaggtgttaagttctgagctgggctgggaaggcaggctgggcggggagaagggctcttagcgggaggcccaggggtggtcagctggtgggggaagctgggggaggacgcagggccaggtggagagccggcagggttgggggctccctaggcgccaggcaggtgggctcaagggtgaggctgttttttttgttttgttttttgtttttgagacggagtctcgctctgtcgcccaggctggagtgcagtggcgtgatcttggctcactgcaacctccgcctctcgggttcaagcgattctcctgcctcagcttcctgagtagctgggattacaggtgcgcaccaccatgcccggctaacttttgtatttttagtagagatggggtttcaccatgttggtcaggctggtctcgaactcctgacctagtgatctgccctcctcagcctcccaacgtactgggattacaggcgtgagccaccgcgcccggcctgaggctggtattaagaagtgaagtgggacccaggtggaggtaaggaagagtctggtggggagttatctcagaagtgaggccagcacaggctgagtgcagccccagggtgagaaggtgcccaccgagaggactctgcagtgaggccctaggccacgtccgaggggtgcc

SEQ ID NO: 5497 - DNA, 6000 bp, Homo sapiens
aaaggcagagggacaaggccagggagggcttcagaggaccagccaaggaggccagactttctcctagtgacagtggagagccacagcagtttctagagccaaggagggatctgacaaaatcagggcttgtgagagcccatcctagagtcccttgtccttaatgaggggttccccatccctgcccaagtggtctagaatggagtcaggccaaccctagactggaaggtaggacactagtgtcttgaaatctagggcagagtctggctgggaaatggtggagagcaaaggttctactgcccttgcctggggtgaggccggctccacctttcactggctgtacagctccgcacaagccctcaacctctctgagcctggaacccctggggcatgagaatcagacaacataatgcccctatgccattcagctcaggcctggcacaaatacatactctgtaaattagctgtgaccttgggcaaggtactgacccctctgaacctcattttcctcctttctagaatagagacagggatttatgccctcagggctgccatgtaccttagagttgactgtgtgcatcttataagctacagctggagcgggggtgggtgggcagaaggggcagggctgccaagccaggaagctggtgggcacagagcacagggcgccggtcccagtcagtgggacctgccatgcccctgggcctggaggttgcccctggcaggccacagaggcccactgtgacctggccccagcctgcctccactgggactgcccatccatctttcgggtctggggtcgctggctgccattgggctttgctgccgcttcctccacctgcactgccctcccctcccagtgcccatcttgtgaaaggccagaatgtgggtatgtgatggggaggccatgggacctgtgggaccagggaagatgctagtagagggcagaactcagtccttgttccaagaccacggagaggtcttgggccctcacccggaatatgcaccagccacaccctcacctgtgccgcctctgcccgcaggtaaccccccgcggcctagcctggagcccgaggagcccaagaggcctgtccccgcagagcgcggtagcagctctgggacgcccaagctgatccagcgggcgctgctgcgcggcaccgccctgctcgcctcgctgggccttggccgcgacctgcagccgccgggaggcccaggacgcgagcgcggggagtccccgacaacaccccccacgccaacgcccgcgccctgcccgaccgagccgcccccttccccgctcatctgcttctcgctcaagacgcccgactccccgcccactcctgcacccctgttgctggacctgggtatccctgtgggccagcggtcagccaagagcccccgacgtgaggaggagccccgcggtgagtggcctgaagccggcctgcttcacatatgggagacgggggttcccagggagggaggagtggctggtggggacatgcaaggaggcaaggccgagaccacagtcatcagctggaccctgaaccaggcattcggggtactgaagacgcatgtagggagcagagttctaagttcagctatcaggtggtccaggcaggtgggggcgatgcctgctgtgaaataaaagaagtaatcgggccaggcagtggtgcacgcctgtgatcccagcactctgggaggatcacgtgagccttgaaaggttgaggctgcagtgagcggtgatcatgacactggactccagcctgggcgacacagcatacatgtaatcataatcgtagcaaactcctggctccttacttgtgccaagtactgtttgcaaggctttcccgagatggtctcatttagtcataacaaccagagaactaagcgctcctggatgcccatttttagatgaggaaatttaaggcacagagattaagggacccacagctcccacagctagtaagtggcagggccgggatccacatccaggccagcctgctgcagaggcctcactcctaactattacaaaaaacagaggcaccacggagcaggaagggcggtggaagttgagtcaagtaggtcactgtgcacatggggaaactgaggcccagagcaggacagtgtcttggggacctcagcagttgggggttgcttgaccctgtgcccctcctatatcctcacaggaggcactgtctcacccccaccggggacatcacgctctgctcctggcaccccaggcaccccacgttcaccacccctgggcctcatcagccgacctcggccctcgccccttcgcagccgcattgatccctggagctttgtgtcagctgggccacggccttctcccctgccatcaccacagcctgcaccccgccgagcaccctggaccttgttcccggactcagaccccttctgggactccccacctgccaaccccttccaggggggcccccaggactgcagggcacagaccaaagacatgggtgcccaggccccgtgggtgccggaagcggggccttgagtgggccaggccactcccccgagctccagctgccttaggaggagtcacagcatacactggaacaggagctgggtcagcctctgcagctgcctcagtttccccagggaccccacccccctttgggggtcaggaacactacactgcacaggaagccttcacactggaagggggacctgcgcccccacatctgaaacctgtaggtccccccagctcacctgccctactggggcccaacactgtacccagctggttgggaggaccagagcctgtctcagggaattgcctgctggggtgatgcagggaggaggggaggtgcagggaagaggggccggcctcagctgtcaccagcacttttgaccaagtcctgctactgcggcccctgccctagggcttagagcatggacctcctgccctgggggtcatctggggccagggctctctggatgccttcctgctgccccagccagggttggagtcttagcctcgggatccagtgaagccagaagccaaataaactcaaaagctgtctccccacatgtagcctgtcacctttcttggaggtaaccaggtgacccaacctatcatacaaccctggtgtcctgatgccccaacaataggcagttggatgccttgtactgcatgcctctcctgggaccaaatccaccagccttggtcagtcattcaaggctcttctcggccaggtgcagtggctcactcctgtcatcacagcagtttgggaggccgaggccggcggatcacatgaggtcaggagttcaacctggccacatggtgaaaccccatctctactaaaaatacaaaaattagccaggtgtggtggtgcatgcctgtagtcccagctactctggaggctgaggcaggagaattgcttgaacctggaaggtggaggttgcagtgagccaaaatcacgccactgcactccagcctgggcaacagagcaagactccgtctcaaaaaaaaaaaaaacaaaaaaccataggccgggcatggtggctcacgcctgtaatcccagcactttgggaggccgagacggacagatcacaaggtcaggattttgagaccagcctggccaatatggtgaaaccccgtctctactgaaaaaaatatatatatatacaaaaattaaccaggcgtggtggcaggtgcctgtagccccagctacttgggaggctgaggcaggagaatagcttgaacccgggcggcgaaggttgagtgagccgagattgcaccactgcactccagcctgggcgacagagcgagactccatctcaaaaaaaagagtagtaagttccacccacctcccagtatggtgacttgccatggcatctggcacccctgacagttctcttcacactgccatgggggctctggcactcccacaccataccctagggcagggtccctccctcggcctctgtccattctcttcacactgccatgggggctctggcactcccacaccataccctagggctgggtcccttccttggcctctgtcctcagcccctctgacgttagaggagttggaacccaggctcccccttcccctctcccaggtgccccatggcagcccagactctgtgtctgcagttcaggggcagggagtcaggagggcaggcacaaagcgttctcaggaagaactggcaatcgggcgcaagggtatcatctgcccgggtgctctgggcaccctggagtcctctccccacctcccacccccacctgatccttcccagctgccaccattcctctcccaccacaccacccaggccaaaatcactccatccatgacgcctacagtagcccagcgtaggtctccctggaccacatttatcctcaagggcctgtgtccttatccccccttcacccccaactctcccctgccacagccagccctctgttcctctcacaccccaagctcattcctaccttcactggcctcttactccccagctgaaatatcacctccttagcagagctttcccagtgagataacccccccgctccccgcagagctctcccatcacccagggtgtttccttcatggaactcatgacaatgtgaggttgccatgtttctttgctaagaggtttcttgtgtaaacaccaggaaggaaaggacctgtgcctgtcctcttccctaagcacttgaatgaatgaatgaatgaatgaatgtggtatgggtgcctgagtgagcaggaccttgaataagtgtgaggtcctctctaggcttcagcttcctccgcctcctcccctcaccgcagccgccttcctccacccatccccaccatcccagctgctgtgaaatgggcaaatgtcttgcctccaggacctgggaagggtgatgcagctcacctccctcctgttcacaccccagccaccccagccatcccagccgggtcccagccacccacacagcacctcctcctggccccgccctgcccagcccctcccaggtgcctgaggtggagccgccagttcccacagcaccccagcggcctgccatggggggtctaaggccctggtcccgatacgggctcctggttgtggcccacttgctggccctggggcttggggctgtggtgttccaggccctggaggggcctcctgcatgcaggcttcaggctgagctcagggcagagctggcagccttccaggcagagcatagggcctgcctgccacccggagctctggaagagctgctgggcactgccctggccacccaggcccatggggtctccaccctgggcaacagctcagagggcaggacctgggaccttccctcagccctgctcttcgctgccagcatcctcaccaccacaggtaagagagccaggcagccaagtcggggggtgcggctccaagaggccatggctccctgggggctttggggttcatgcagcccttccttcagccccaaagagccagatggagcccaggccctgtgaggcctgacatcacagctggggctccccaccaacacaccccaactggtgcctccacttcaactgccaggaagggtgtggcctccccagtcccaccccaggcaccctttgagacccaggagagctgcccagatgccacagcctgtggccagataggggatacaatacagtgggatggattcttggatggaagcaaatagaatgaacctgggaaggacagatcaggaccatggcctcgggtgggggagtgagggaagataggggaggaagtcggcatgagatgcttgtggatcaggagggcacagacagggatgagggagtcctgcagagaaatcgcgtgggcacaggcccagggaaaagcagcaatgagacccacagccctgggttttcgtattttttgccccacaaagtgtctcagtattttttgaattggaatttgtatttccaactttttttttttttgaaacggtgtctgaccctgtcacccaggctggggtgcggtggtgcgatcttggctcactgc

SEQ ID NO: 5498 - DNA, 6000 bp, Homo sapiens
agatgggatgactcatgctgtagattgtgtcagcctctttacctggccagacccaggctttctcaatggtcccatacagagtgctccaccaccagatgtctgcgtgtgctagaaaatggctgtgctcaattggccgggcgcggtggctcacacctgtaatcccagcactttgggaggccgaggcagacggatcacttgaggtcaggagatggagaccatcttggctaacacggtgaaatcctgtctctaccaaaaaaatacaaaaaaattagctaggcctagtggcgggcgcctgtagtcccagctactcgggaggctgaggcaggagaatcccttgaacctgggaggtggaggttgaggtgagccgagatcgtgtcactgcactctagcctgggcgacagaacgaaactccgtctcaaaaaaaaaaaaaaagaaagaaagaaaagaaaagaaaatggctgtgctcaggccaggcgcagtagctcatgcctataatcccagctactcgggaggctgaggcaggagaacttgaacctgggaggcagaggttgcagtgagccaagatcgcatcattgcattccagcctgggcaacaaaagtgaaactctatctcaaaaaggaaaaaaaaaaaagaatgccttgtctatgtttttatacagtgcttttaattcatttcagtttttctaagtttttttttttttttttccgagacagagtcttgctctgtcacccaggctggagtgcagtggcacgatcttggcttactataacctccaccttctgggatcaagcagttctcaggtctcagcctcctgaatagctgggactacaggctcccaccatcatgcccagctgcattttgtttttgtttttgtatttttagtagagctagggttttgctatattggccgggctggtctcggattactagcctcaagtgattcacctgcctcggcctcccaaagttctaggattataggcatgagccaccatgccggcttttcttttagtttttaaaattaaaaacaaatatattgccagtcttggtggctcacgcctgtaatcccagcactgttgcccaggctggagtgcagtggcaccatgtcggctcactgcaacctccgcctcccaggatcaagcgattctcccaccttggcctcccaagtagctgggattagaggcacccgccaccacacccagctaatttttgtatttttagtagagacagggtttcaccatgttggccagactggtctcgaactcctgacctcaggtgatcctcctgcctcagcctcccaaagttctgggattacagtcgtgagccaccacgcccagcctgcctggccacattttttaaattttattttatatatttttttgagacggagtctcgctctgttacccaggctggagtgcagtggcgccatctcggctcactgcaagctccgcctcccgggttcacgccattctcctgcctcagcctcccaagtaactgggactacaggcgcccgccaccacgcccggctaattttttgcatttttagtagagatggggtttcactgtgttagccaggatggtcttgatctcctgacctcctgatccacccacctcggcctcccaaagtgctaggattacaggcatgagccactgcgcccagcctgcctggccagtttttaaaacattttcaagtgagtgagtctttgttgaataaaggcaaacgttttgctccatcattacttttcatctccaagagtttctgacaccagtgcctctctgtgaagaaagcagtgtgttgtgacaacatcaagtttttgtttgtggttttgtttctttccaagaacagtaaaaattcttatggagctaaccactgatttgaaccatcagtataaatgccaaggtagttcttccaagacagactttttgatgattcctgatatgaaatgacattaaatctatcttggctttttgtttgtttggaaaagctgaaacattttctcgatgatcatgctgaccatttacagatcttactagtgctatggcgtggtaagcattcaccattttattggtgaaataagttgactcatcagccaggataaagattatgttgtggccgggtgtggtggctcacgcctgtaatcccagcactttgggaggctgaggcgggcggatcacgaggtcaggagatcaagaccatcctggctaacatggtgaaaccccatctctactaaatatacaaaaaattagccgggcgtggtggcgggcttctgtagtcccagctactcgggaggctgaggcaggagaatggcgtgaacccaggaggcggcattgcagtgagccaagatcgcgccactgcactccagcctgggcgacagagggagactctgtctcaaaaaaaaaaaaaaaaaaaagcaagttgtttttcagtttattatcaagaaaacaaaaacgaaaacctgttcagtatcagagatcatgtcatcaacatgtgaggttgttgttctctctcagggtagagtcttctctttttctttctttctttcttttttttttttgagatggagtttcgctcttgttggaatggtgtgatctcagctcactgcaacctccgcctcctgggctcaagcaattctcatgcctcagcctcccaagttcccaagcagctgggactacaggcgcacaccaccacatccagctaattttttgtattttagtagagacagggtttcaccatgttgcccaggctggtctcaaactcctgagctcaggcgatccacccgccttggcctcccaaagtgctgggattacaggtgtgagccaccatgcccagcccacacaaattgtttctttgtctgctgctggcaacagatagtgagctccttaaaacaggagccgtgtctctttcatcactgggaacccagcagccactatggacatggctctgaccaagcactcaagaagctgagacccataagcttccagaagagctgcgctgtgcacatatgaattcagcatacagggcaagctctgcagtggattccaggaggaagacaggacagcatgaaggttacagatacagacttggagtgagatagcactgacggtaagttttcattcatcaagcaactcatttatattctctgagccatagcacctttgtctgtcaaatggggataaacaatatctaccatgtggggctattgtgaggattaaatttaatgtgtatgggccgggcacggtggcgcatgcctgtaatcccagcactttgggttgtcgaggcgggcagatcgtttgagatcaggagttcgagaccagcctgaccaacagggtgaaaccccatctctactaaaatacaaaagaagttagctgggcgtagtggtgcacgcctgtactttcagctacttgggagactgaggcaggagaattgcttgaattcaggaggtggaggttgctgtgagctgagaccatgccactgcactccaccctaggtgacagagcaagactgtgtctcaaaaaaaaaaaaagaaagaaagaaaacaaaatgtgtatgaagcaatcctcaataaatgatggctgatagtttaattttggtaataaccctaaaggggggttccaagatcaagaagagaataataatgccaattaacatgtattggccaggcatggtggctcacacctgaaatcccagcacttagggagtgcgaggtgggtggatcatttgaggtcaggagttcaagagcagcctcgtcaacatggtgaaaccccgtctctactaaaaatacaaaaattagctgggtgtggtgtgcacctgtagtcgcagctactaggaaagctgaggcaggagaattgcctgaacccaggaggcagagattgcagtgagccaagattgcaccccggcactccagcctagtgacagagtaagactctgtctcaaaaaaaaaaaaaaaaaaattagccggggtggggtatggtggtgggtggctgtaatcccagctactcagggggctaaggcaggaggctcacttgaacctgggaggcagagattgccatgagtggagatcatgccgctgcactccagcctgggtgacagtgagactgtctcaaaaaacaaaaacaaaaacaaaaaaacatgggctgggcgcagtggctcacacctgtaatcccaacactttggaagggcaaggcaggcggatcacgaggtcaggagatcaagaccattctggctaacatggtgaaaccccgtctctactaaaaatagaaaaagttagccgggcgtggtggtgggcgcctgtagtcccagctacttgggaggctgaggcaggaaaatggcatgaagctgggaggtggaggttgcagtgagtcaagatcgtgccactgcactccagcctgggcgacagagcgagactccatctcaaaaacaaacaaagaaacaaacaacaacaacaacaacaaaaaccatgtattatgctgttaatataaggcttacatatcttaacttttttgatcctgtgggctaggtattattattcccattttacagaggaagaaactgaggcacgggaaagttcagcaacaagcccaaggtcacacacctacttatgagggagtcaggcagtcttcaccccagagccagctgatctctagatgggactgaagactggaccacttggaccattttctttccaacaacagggctaaagtagctgatgaagccatggcgcccccatggacttctttgtccagctttgccagtgacctgtgaggtcaccttggtctagtccttcccttttcttgacctcggtttcctcatttacaatgaaggagtttgacacaataattcttgattccgaactatagcccaggaagaggcatttgggaatgaggccctggcctgctggtgacatcatagaggggagagttccacgagaatagtcaggcctttctggaagcccagtgccacagtctgcattgagcttggctcaggaaagaagggaaatccaggcggggcctgttgggcccaggtcttgagctcttttggctccagagttcccagcacagtcatggatcaaaactcagtgcctgaaaaggctcagaatgaggcagacaccaataacgcagataggttctttcgctctcactcatcacccccacaccacaggccaggccacagcagagctctccaccattacgagttgcaccatcacggcgtgccccaccaacgtggtgaatctcaccaccctccggagttccaagacttccacgaccaagccttgtcctcccatgtccaccaatctcaccaccacagcgaggcacggaatcacggcagagcccatggccccacaggctttggtctggctccctctcaaggcgccgtcccctcccaccgttcctacggtgaggactaccatgatgagctccaacgtgatggcaggaggcatcatgatgggtcccaatacggtgggttccatcagcagagtgactcccattaccatagggggtctcaccatggcagaccccaatatctcggtgagaatttatcccactattcctctggcgtgccccaccacggtgaggcttcccaccatggtgggtcctacctcccccatggacccaatccctacagtgagtccttccaccacagcgaggcttcccaccttagcgggctccaacacgatgagtcccagcatcaccaagtcccccaccgtggctggccccaccatcaccaagtccaccaccatggcaggtcccgtcatcatgaagcccaccagcatggaaagtctcctcatcacggagagaccatttcccctcattcctctgtggggtcctaccagcgtgggatatctgactatcacagcgagtaccaccaaggtgatcaccaccccagtgagtaccaccatggcgaccatccccaccacacacagcaccactaccaccagacccaccggcaccgagactaccatcagcaccaagaccaccacggcgcgtatcattccagttacctcc

SEQ ID NO: 5499 - DNA, 6000 bp, Homo sapiens
atgtgttatataatttgatacagacctctgattatttttcaattaggtcttagtgaagatttataattttcttttcataggttttacaattctctgttaaatatatttctgcttatattatattttatagcttttattatattttggctattgctgatataaaggaaaactactgaatttttaatatttacttttattatctggcattgtaccaaacacatttcttacttctgaatctaactatttttagctaaaaatcttgaattttttatagtagactattatatagcctgtgaagtaatagatttatgtcctcatttcaaactttttcatcttattttttatgttttattttacttattgttgaagttcttagctatgaaaaatagtaatgataatgacaaacatctttgatttcttaaattaatggaaacatctctggtgtttctccatgttgtttttatctaaaatagttttctctgccatgttaaaaatgtgtctgttactcttagttttctaagctttttcttatttccttttaaaaaatgaagaatagatattttattaactttttggatccatggagatgatgattagtttttgaattttagattttttcttacaggatcttagtgttcacttaattttccataagtatattaattttccttgtagtatacgtggaaaattgaggtccaggttgtatttgaacatgtccagtgaaagaaaacaaaaacaaaaacaaaacaaaacaaaaaccagcaaaaacaagccaaaacaaaaaaccaaaagcagctcagtccattcttggtatgtcttcatttactaaacttgggtgacattgatgtataaatcaacaatcttttcaatcgtcttctaactatttatgaatcactcctttgttacccagttcttatttttcaatcgtgctgtcaaacatatcacacgatgctcttggtaaacagtttactaaaaatgtcccaataattccatcaaaagagatattaacataacttgttctctaagtgaaaccatattaatcacaagtgcttacaaaataaccatatgataatgttagaattttggacaacatctatgtcaagctcaaattagagcaaaaatgaaattagcaatctgtagattcttctatttgtttctgatggttaataacattttagctgcaagacagatactaaatgtaaagtattataacccctttattttaaaaattaagaaattgaggttcaaagatatagcagcacctgctcagattttactcaaactggagtttgcagggcactttcattcatagagaatcagcagcccctctgaagcttctgaagtgtttctgttttcacccggttgattctacatgtgataggagtcagggctcagggtttccatgctttaaaatatccagatgaaatcacgactaaacttttatctgtacttctggccaaccaaccccaaactgcattttccagagagactcctatgttagtggttttccatcagcaacagcaactcacaaactgcagctttgtgtaacttttgagcttcttgagttattaagcatttaatgttttctcaaccttttgcttctagtggcaatttcttttcctttccctttgggctccttgcctgagacttcctagagcagcggttcccaacccccaggctatggactgctatccatctgtggcctattaggatctgggccacacagcaggaggtgagcagtgggcaagccagcgaagcttcacctgtatttagtatttacagctttttcccatcacttgcgttaccgcctgagctttgcctcctgtgagatcagcggaggcatgagattctcctaggagcatgaaccctattgtgaactgtgcatgtgagcaatctaggttgtgtgctccttgtaagaatctaatgcctgatgatctgtcactgtctcccatcacccccagatgggaccatctagttgcaggaaaacaagctcagggatcctatcaagtctacattatggtaagttgtataattatttcattatatataaaacaatgtaattataatagaaataaagtgcacaataaatttaatgtacttaaatagtctccaaaccatccatcccaccccacaggtccgtggaaaaattgtcttccacgaaactagtccctggtgccaaaaaagttggggaccactgttctagaggacaaccatttttctttactcatttttctcctatcagcttttcaaaacactgtgttatatatatattatatgtataatatatatacacattatatatattacacacatgtatatatgtaaaatatctgtttttgtaaaatcaaactaataatcaaacagtgcagatatatataatgaggcaaaggtcctctctcattaacatctcttcctctgcccacagagacacataactcaccttcatcctcacatctcagaattaatgactgagtgtttttttatttcaatagcatgaacatactacataaacatacataacctataattgcatagcaatttccaactctgtgagaactatcagtcctgtgctcacccaacaattttttaactttaaaaactattgtttctttgttcactcagctttcttcatgactccagatctactcaatacttccatagttgattcaaaaattatattatttaatcgtattttgtctttttaaaaattggtttcaccatgtttttaatgtaaagtgataaaactgcatagataactatataatgtgggaagttagagattgaggcgtaattgtataccagcttactgatgaaaaaactgaggcagagagagatttaatgacctctctgaaatcatgtaacttcagttagggaagtggccgaaataaaaatccaggctttgagacttctgatctaatgattccacttcatcatgtcataagctctttcagaatcttctaacatttgtacaccaccttattccttctgggtactcaataaatgactgggcttgttgttctagtactcacaataattcaaaaaaaaaaaaaaaaacagaggaaaacatgtcttaccacatgataaattgatgtcagaataagtttactgtagtaattttttcagtgtgaaggttgttacctgtgaatgaaaaacagtgtaacaacagcaaaataaattctgtctcagtttttgttttttttctttttatgtgaaaggttaacacttcaactgacactacaaatgtttattaatttggctttaactcacagaatttgaattgggtagaaaacctttgaatattacttttcccatgaatgttttccccatacttggtgttgccaaagagattaccttggcactgtttaactaaacgtttattgattaattcattcaagcatcaaagctaatgaatacttacagatagcagttgccacaaacaaattttaggaagaatatcttattgctaggtatagtaactagaaaattataagaattttaaatcatggctccacatgttgaaagatcaaaaaggaaggctgttaaatcagaaagaacagacttcagaatgatgcaggttgtttgtttccccagggaaaatgttctttccagggccaagagcattttcttattttttctatattccttccatccatccatccatccatccgtccatccatccatccatccacccacccacccactcacccacccaagcatgcatgcatgcaccctacacacctgtgtcaaatacgaagctggatcctcaggacacagtggtttctgctctctctgagtttcagttctaaatttaaaggcaaactcagaagtttctaaatgtgtgagctcttttcccttctatcaaatcaattgcattttcccacacttccaacattcattttgttgtccacctgttcatgggaagcaaaggcacctttgcagacagatttcagtctggctttctttcatccaattgcaatgggcctctgatcttttcatggctggctgcttgccatgcatgtctcaacttaacgagcacctccttggaggggcctcttttaaccatctcatctgaagtagtcattcaccagctgccatcacatcaacctgttttattttcattgtagcatttgtccttgatattttttcatttgcttatttaattggtccccctttctgccacgaaagctctatgagggcagacaggtgcctcatctgcttctttgcctccgaattctgaaatgatttgaaacgcagttggcattcattaaatatttgttgacttaatgaatggattcttaattggctactactgcttaaaggtctacaaatactgattcatccttgttgacaagtttttacttctcacacgtatgcatattaatcagaatttaaaactaagtcttaaaaataaaacagcttggaaacgtgggaaacatctggcagagaaatcattcttgcattcgcagtgacggaaggaaaattttttctctgaagtaagcaggttgttggcctctttatcggtatcattggaaaatgcttgcctatttttgttggttttctcaggaactgggaacatctggcgtttggaacatagaacgttgttcatttttaaagcagagtcataataactttatgagttgagggtaagagagaaaatgaccaaagaaaatgaaggcagtctggagaaagaagaggctcgtgtcccttttaaggaacaggtttccttggctctttgagagtggttcttaaaggaagcttcctacgaagtccgcagttggtatccttactaaatgagccaactaaatagtggaggggaaaaaaagagtgcgtgcctggctcctcctagttcaggctcataccgcctcctgaaagttgtggctacaggacaggctttggctgctttctagaacgtcgctcggatccctttaaaggtggggatcttgacggagagtgcgggggatgaaggcgggagctgagggctggagagtctctgttgacatagtaactcttcagctccgtctcccttgctctccgctcttacgcttcgctaccaccagcggccccgcctgtgccctctctgcccgggcgccccagacgcatcctcgcggggtctcctcggcctgacctgctcaggtcaagatcctctttgcacccccttaagtggtgacttttccccgggccagtgggcgagccacttgcggcgggcgtctgcaccccctgcttcaccgtcgtcccctgggcaccggtctgcccaggtccagttcggccgctgacgcgaaccctccgcaccgggtccccgctggaactgcccactcggctcccccgggagcggggcccaggccagtcgggcgttcccgccatgagccagagcccggcgttcgggccccggaggggcagttctccccggggcgctgccggagccgctgcgcggcgcaacgagagccaggactatctgctcatggactcggagctgggagaagacggctgcccgcaagccccgctgccttgctacggctactacccctgcttgtgagtgccggcgacgcggggcggatcgggcgcgggctgcgcggagggaggttgtgcgctcgcaggagtggccgagtccgtccgcgcgcgtcctgaacccgcgtgtgtacctcctaggacggtgctgggaggtccgcgagagccagggctgggacctgagtgagtggaggggcgcgcggggagtgggggaggcggggttgtctaggtttgctcctcgtaggtacgcatggatatgtttgcccacgagagtgagaccgcatagtaacaccaccattgcaggtgattagatgggtggtcgatttctccagaccccttcatcctgcgctctacaagagacaggatcgctacgtaacaggcgggatctgaacagggggctgattcagatgtgcgcccgggtgactcttagcctatgtgggggagagatgactagaactccaagggttggagctgcctgggtgctgggtgcgcccg

SEQ ID NO: 5500 - DNA, 6000 bp, Homo sapiens
agtctcacccagtcccgaggtttgtaaacttctctaaccccagcttggggaatttccactcagccgctctgggctgagtgggcaggtttccacttgggagcatgggacaggcccgcctgccagccgagctgttatccaccccaggacaggtctggccctgcctccagggtggtctggagggaaaggtgcagagagcctggagtcagggctgtgctcaggggccccagcgccgatctcagcccatcctgataacaaatagcacctcttagacctcctggtctctatttcagccctgagagggctccctgggacgtcatgagtcctcccctcaggacagggagtgttgcaaaggagggacagagaggcgggagtcagagtgaccagagcccgggtcagaggctggggccagagccagcccctcctaactctgcttctcagtgtccacgttggggtggccgtgccagggcggctacaggaacctgacggagaccctgtggtcccaagtcagccacacagagactgctcactgtggctttgctgtgggcaaggccttggtggccgaggaacagagactgcctgggcagtgtagtgggctgccctgcatggtaggacaccctgcctagtggcctgccccgcctggtggggctccctgtggctccctgctggcttctggctctgaccatgccctgggcctagcagtgttgtcttctggccattcccctctgataccaaccagcagcccccagaggactcattaggctgctggtgtctccagctgagccctctgaggtgtggcaggcaggcctgacatcacagcctgggtgagtcactgtgggctgggtgagtcactgcgggctgagtgaggggtcccagctgaggaaagggcaggccacaggagcggcccccatcacagctccggctcccagccccgcagctgctccccatctctctgccaactgccagaacgacacaggaagctggggccggtgcctcaggtgccacgacagggtcctggaaaccattcccacccctctgagaggctgcagctgtgcctcccagtctcaggggatgcctagctacagaccggggtcttgggcaggatacctccggccaacggcccagctggactggagggcagaggtgcagcggagtaaagctcaggggacccacacatgcccctaaaggtctccctcacatgccaccagcccaggggcctggggaagagtgggctccttgattcctcccggctcctgtacccttttcgggcaccctgggctggctgcagtgtggagcccctcgagggagagggccagggcgggggctgtggttggctctgctgcatctgacagcttgcccatcctcaagtgccaggtggaggtcagaaaatctcccctggctttcacgtgcatcccttgccccaacccgccccagcaagtgggcacgaggtaagggctcctttgccagcccctcctccctccctgtgtctcttcctgtttgtgggctcacctgaagtgtgaagagggggagtgccactctccatccaggccccaggcaagcagcacctccctgctctcctgcactcctggacacaaccagcagctcctgccatggacaggtggtacctgggtgagtcctctgagccccattcctcctccctgctcaggctctaacacaggtgccagccccgtccctttcaagtgcacccacaagctccccagaagtgcaggaaaagcagaaaggaagagaggcagaatttccaaaaaagagcatctccatacggagtcactggcctgctgtaacgtgtgtgcagagcatatctgagctgcgagggctgggaaggcagctgtccaactgcctcatttacttgtctgtccatccgtcccttagagatgcaggaactcagaagccaggctgctggcttgaaatcttggttcccctaccctctggccatctgacctctggcaagttatttaacttatctgggcctcagtttcttcctctatgaaatggggtgataataatgccttctttaccttctaaaactcattgtgatgactaaagaattaatttctggccaggcatggtggctcacgcctgtaattccagcactttgggaggccaaggcgggcggattatctgaggtcaggagttcgagaccagcctgaccaacatggtgaaaccccgtctctactaaaaatacaaaactagccaggcttggtggcacatgcctttaatcccagctactcaggaggctgagacaggagagtcacttgaacccgggaggcggaggttgcagtgagtcgagatcgcaccattgcactccagcctgggtgacaagagcgaaactccgtcttaaaaaaaagaattaatttctgtaaagtgcttgaaacggtgccttgcacacagagtttaaaaatgtagccatcaactagctttccctattgcttcctattcatctatctattgatcgatctatcatccatatctatctatctatctatctatctatctatctatctatctatctatctatctctctatttatctatctatccatccatctgttggtgcctccccatgcacctcctcccccccgcagtgggagcccttccatccacactgcagctttgtttgtgaccagggtaaatattacctggcactgttaatgtttaatgcccccacctcatccccagccaccccaccaaggagcaaagacagcaggaagaggcaagtggagacagtccatttgggtggggaaatgactgggttgtcaatggatagatagatagatagacagatagatagatagatagatagatagatagatagatagatagatagacagacagacagacagacagacagatgaatttatttaacttcccacttatttttacatctcttattattcccgaaagactccatggaggcttacaaatacagaccaaatgcaataagataacacaatcctgtataataaagggagcacccttgtcttgtgtggagatggcagtagctttggtagcacatcttggaggatctgggctttctacctccagtttgccattaactgtgtgtttcaggcaagtcccttcaccttcctgccctcgttttttctggtgtacccagtgccctggccacgtccaggggctattgtggaaagcaaatgagcagcctcaagtttctttatctgtaaaacgccattagtaggaattaagtgatgcagtgcattccaagagcctggcacgtggtccatcttcaccaaacgctggctctgctgtgatgtttgcacgaatatatatttcttggctccagaagcagaagggagctgaacgggtattgcagcgcctgatctgcagggccatgccattctctccgtctcactcattcgtgcccattttcattggagggtggctggcttttccatgtccaacagcaaacatttgccaaaggctaatgcttgtcatttcttcaatcaacacacatataacagtaaaaatgatgccactcaccgtgtgccaggccctgggatatgctctttgcatgcattatctcacttcccctcaccaccaccctaggagctgggtactgcgcccattttacagatgaggagactgaggcacagagaggtgaagtcattgactgagaccacaccattagcaagtgagagggccagggtgtgaactcaagtgccaagccctgcccctgcttggggaggattcatggatacagtggctcccttcagaagggctcaagctcccctgctgtccgctggccactgaccttggctgttttgtggccattgggcttcagccttttctggaggccaattcaatggactagaactcaacgaggattctacagtacctgtgactacccggcacaggagtcctggggcgaaggaggtcacagcggagtggggaggctgcctgcgaggtgtggaaagcatctgcctcctgcagcaggaggcctgattgtcagtctccacttcccccacactggctgtgtgaccctgggcaaggcccctacctctctgtgccttagacacctgcctcatcagtaaaatgggaaacataaagcttgaggagaaaaaacagtgaggaaagtgcttggtaaaccataaacgcagggggttttccccacgatgaaagtcttgccctgtccttaaggatcctgcatgctccatggtaaactggcaaggacacaatccgagagccaggccaaatggtggtaggaggaagtgccagggcggcagggaaggagaaattagttggggatgactgaagcccttctgaatgaggtgtaacctgcagggtgcacgttgatgggtgaataggatgacagatgaagggcccttctggaggatctactgctggtcagctttggcggtgctccagggatgtggtgggggagcagtgggccaggctcctagggaccactgcaggaaagcctccagtaccacataaggaacaccagctgcagcggcggcatccatggtggctggtgcggtgggccctgcctgggctgggggccactgtgggccactgcccccagaaactcccaagtacagtgtacactgaagagattgtgcaacttccactttcctgttcccaccgccccagctgtagcttccccagctggcagaacagcacgactgctgacccatcccaacccttctctttggaaatttcctttgggaaggtttggaaactcagccagctcctccctgcccctgcctccccacgcacgtcctcaccctgcagaaggagcccctccatccacactgcagcttttcttgtgaccagggtaaatattacctggcactgttaatgtttaatgcccgcacctcgtccccggccaccccgtggaggcagccagacactctccaaaaagcagagacagcaggaagaggggagtggaggcagcccattcacctggggaaatgactgggttgtcgatggacggtggtgagtgtgctggtgtgcgtgcccgggcgtgtgcaatgctgggtggctctgattggcctgcctttgtggggtcagctggaccctactcttccctctcctgccacctcagccttccagagtacccagcccctcttcctgtcggcctcctctctaagaaaatttgcaacttaaaggaggaccctgctttaaccccaaagaaagatagcttgagtggcagaaaggcagcagatagaagctggagagctgagcgttcctcctcggcctcctggcacacacccgccctgagttcaatgcatcttgctagaccgtctgaacttgggcgggaggcagacggcgtccatctggctggggaaggagcaggcccctctggtcagccttcctaggctggatttggggtgagagcccgccaagttcaagtcacactctccaaaggcttcctgtcacaggaactgactcaggcctggaaaccaagaggggcacttgctgacagaggtgggttttgagccagatgcagaaaggggagggtgctgggcagggagggtctcagcaagcggctcagggccaggtggccacggaggaggaggtttcctggggcgtgtggggaagcctcagctggcgtctagctgttgctctgacacttaaatccccatatgaccttaaacaaggcctgaaccaaatctgggaagacagccctgacggccttctgtgtgggacctgggtccttcatggcctccctgagcacccagcacctcaggcccgtcaggatgggcactgactcttcctggcctgtcctttcctggcccagggactggccgctggggacagctgggcttgacagaccctaagtctcactgctgctcaggggcacagtttggcacagcccggaaagtgctaacttgcgcgttccttcctcctcgggctccacttccctcgtgcgagaaggggctccggcagggcaggaaagagtagcggcccttagctgtggcagaagcgtcctggccaggccaccgtctggctgtccggggcaagtgta

SEQ ID NO: 5501 - DNA, 6000 bp, Homo sapiens
ggcatcagtactaggaggtctttcctctcagcccattggatttccctagagtcctacacggctgggatgaggcacctgggtgctgagtagaggaagggagtcatgggtcagtcaccctgtatgcagattttcacacaaccccctctctccaggacacgcctcgccccccaccctaagtaatgcagaacccaaatccacacccttcctgggtttctccagagtcaacctcaaaccctaggctggggagtctgtttcctataggcactttcaaccagtgatcctgttttcagccccacacatcagctcttctttcagaggcacctggcccctctgttgtgtgaatgggaatgtgctgccttcctctaaatcagacaagcacctggaaaggctttttgtttatctgaatgactcctgttggaatattagtcatgaataggataatatgtttcaaatgttccaaacttctttaagagaaagagaaaaccgtctgttgactctggtcttcactcaggtccagcggcgggatgctccaggtccagtctgaggagtaaatgctgggcgtgtaacctcatcagtgttgggaacctggtgaggctacacagcacagaggggccggactgcatcagggaaagaggagttgggctgtcttctcattgtcacacacaatcccaccatggaggactcaggctgtctcatggctacagaggtagtgaagcagttgccaggcgccacagcaggaacggaatttctccgtgaagacagtggtaaggcggaaggactgagagtgcatcccgctggggtactggaaggtgtaggattccatcagggcaaacgctatcatttgtgctttaagactaggatttgtggaacagggagaatgcatcccctgccctccctgttgcttagcaacagtcctctttctcattcccagcaggtccaaaagggcccagttttgaagattgggggcaaggagtgggggatgaaggtaagataactccctggtctgcataataatgagacattctggctccattgtgcaaaaggtacctgccttgcaaatgaatgaagtagttaaaaaacacttctccctgtttggggtttattctgtgaggatgaatgcttacctgggggagacacatgtttctctgtatgtgtttgtatttccacagctgtctgctggatcacaagagtcaaagacacgccttcagcccacacaggtggggaggctcagaatgcctgccccctagggcctccacgctggacattgggtcagggaagccccctttcctgagttgttctgtgggactccaaagggcctcctgccaagctctctgacagttcacatcccatctgaagagcctcatgcaccagtccagggcctctgagaagcagatgccaagaggggattaaaaatgccaagattttgttggaggagatgcccaggtgaggaaagtcagagggaggctgtctgaggagttttcagaccaggactcagggcagaccctgaggggaggagggagagcaggttgggaggatgcatcctagactgccatggagtctaaggaagattccacggccgtgcaagagtgctccagccaaaggcacccttggaggagcccacctctcccggggactgcctcccttcatgtcctcctgtgctcagtcccttcagagtgcagcccctttggccttggacacttcctctccctgcgtttcgttgggctgcagggcgtgttctcctggcctccacacccaggcctgctcaggggtagggttgggtgaacctgaggcttgggaatatcccactggggggattgggaggcctgcaaaggtaggtagagggccacgcagtgaggggtgcagaagggagggcctgtggacagagggggtgaacccaaggacggcaagcagcagcagggacaggcgtgaccacaggaggccacctgtgaagggagaaggccagatttagcaggagcgtggactccccgcctgttgctctttcccccaccatgttgtagctccttagtgtgggtctcctcccacctcacttcgcatgggaacccttctgcaagtggcttcacttacacctgtgtcttgttctgtctgggctgctgtaacaaaatatctgaggctgggtaatttataaaccacagagagttatggaggctggaagtccaagaccaaggcacaggcaggtttgatgtctgctgaggccttgaccactgcatcacatggtggaaggcagacgggcagaaagaggacaaacactgtgtcctcacagcagaagagaatgaacctcctccctcgagccctttgataagggccctaaccccatctggaagggctctacctgatgacttaatcacctcctaaaggccctgcctcttaaaactatctcatggggattatgtttcaatatataaattttgtgagacacattcagaccatagcaacctactatgttctttttccttatctgtaatgactggttatgcttataaatgtttgaaagcaaaagtgccttttccgtgaaattttgcatctgtttccattttatcccttctctgagcatcatggagactcagctgtcctgccccggggactggtgtcaggaacctggtgtatggtctccaagctacgctgctgctctgatgcttctcatctctttgactcttgagctgaggttgatccctcctacaatcttgtgtggtgttgagtggaggaggggacaggcagtgaaggggcatgtggccagcccacagtcacccactcttgcttcttgcgaacccaatcaatgcttcaagtgattaccagctgtgaagtgtgaggaacagtgggaagagagcaactcaggaggggtgtggggtaaggactcctctccctcagtctcctagtgggagatggccctagggggtgggctgaggaggaagacagaaggctgacactcggagtaggttggatttcaaccctgttcattcaatgacaagtgtattacatatgctatctcttgagcttcccactgtagacttctgaggtgagaagctaggtaacttgcagttggtagagcagggtctcaaccccaccactgaagtgcaaagtctgtgatgtaaagttctgcattgccccgggaccagggtggctggtgaatggccaagagaaagtcaggtcagcctgaccttctagggcaggagtccccacacctggtctgtggcctgctaggaaccaggctgcacagaaggaggtgagtggtaggtgagcaaagcttcatttgtattttgaccactccctatggctcacattactgcctgagctccgcttcctgtcagatcagcagcggcattacattctcacaggatcctgaacccttttgtgaactgcgcattcgagggatctaggctgtgcgctccttatgagaatctaacgcctgatgatctgtcactgtctcccatcacccccagatgggactgtctagttgcaagaaaacaagctcagggctcccactgattcgacattatggtggtgttgtataattatttcattatatattagaatataatacataatatatattatatgatatattagaatataatacgtaatatatgttatataatatttagaatataatatgtaatatatgttatataatatttagaatataatacgtaatatatgttatataatatattagaatataatacgtaatatatgttatataatatattagaatataatacgtaatatatgttatataatatattagaatataatacgtaatatatgttatataatatattagaatataatacgtaatatatattatataacatattagaatataatacgtaatatatgttatataatatattagaatataatacataatatatattatattatatattagaatataatacagaatatatattatatattagaatataatacataatatatattatatattagaatataatacagaatatatattatatattagaatataatacagaatatatgttatataatatattagaatataatacagaatatatgttatataatatattagaatataatacagaatatatgttatagagtatattagaatataatacataatatatgttatataatatattagaatataatacataatatatattatattatatattagaatataatacataatgaaataaggaatataatagaatattatttcatagaatagaatagaatattatttccttctataatagaatagaatatttcattatttcatcccatattcattatttcattctataatattatagaatagaatagaatattatataatgtaatagaatattatttcattatatattagaatataatatataatgaaataaggaatataatagaatataatagaagtaaagtaattattataagtaaacacagtagaaacaaagttcacaataaatgtcatgtgtttgaatcatctcgaaaccatcctcccccaccacctccctggtccatggaaaaaatgtctcccatgaaactggtccctggtgccaaaaaggttggggactgctgttctagggccactgagtgattcacaggacaggagacatttgtgaggggctccttggggacccctacttccctgccctgtaacatccagcctcatgtgcgcacgtgttcaacttcatgcctttgacttagacacatcgacatgagcataccggccttctggttccaagccagggttccataaacaaatccttcttagttagccttggtagctcaacacctttggtatctcactcacttaactgccacgcctactcttgttggatccggttataaagtaaactatgttctttgagaactgttgcatacagatgagttggcagccggtctgagctggcccacagactcataaaatcaacagggcctcgggtaccctcacctagcatatccaaactcttgcatcaaaggtgcagggacttgctcacatcgagaatctggttgctttcttggagaccaagaaaatgagtttttgtttctacatttactccagcaatccatgaggtaagaggagaaacacctcattgtctctttgtaggaaaaagaagttaattcttgtgaaaatttagacctcttttccccgcctcaaatctaggcagacttgtctgtccactcctgggggatagatagaagcatggttttaactcactcactggatgcttttggtgtgctggttacatgtggattattagctgtgtgctgcatcttgccttccctgggtcactccgcagccctggggctggagggcagtaagaatctttggttgcatcatgcctgattccaaagtcttcttttggtggcagagatgtatgtagggttttcatctctggtggcatcctttcaattgtagcaagaccttgcctagtaacacaacctctgccaagccgtttccatctttaaggtagaggatcaaggtgctagtggggtctattatggaaaacatatatcaggaaaaggcaagagttagccagacattttgattaccttcacccaaatgtctttctttcattttctgatgtaggactttataggaattttgcaccattctgaatggatacatttggatttctcaacatttgttcagcttcctaatgactgttgtgacaattgctctataccagtgaatgccaactgtttatctctgctctgaacaggtatggagccccttctcccaatatctgtatcttacagatttggtgcatagacgcttaaaaggagttggtctttcgcaaccagcaatctttaggaaaaatgattgaatttttctccttttagctgggcttacaaaatggagcaaaacatagtgattgtgctatggaccttttatggacagggacttggcagagccactcactggatgcttttgatctgctggttgtacctggattattagttgcgagctgcacgctgccttccctgggccat

SEQ ID NO: 5502 - DNA, 6000 bp, Homo sapiens
ggtggagggaagaaagcacaatcccagtaaaccttggtggccttaacaccgacttgaatgtcctgggattatctatttctgagaaactgccccaaataggctttataagaaatccatgctgacttagcaacccagctcatggtaagattgttgaaagagattgcttctagccactggatctgacattcctggttacgggccatctgactttataaactttgtataggtattactttaatgaaagtggaaattaaaatcaaataaagcctttaactcaagcagttcaaaaaggaaaacaaaacccacactttaagatatcaagctagccaggcgcaatggctcacgcctgtaatctcaaccctttgggaggccaaggtgggcgatcccttgagtctgagagctcaagaccagactgggtaatgtggcaaaacgccgtttctaccaaaaattattaaaaatcagctgggcatggtggcatgtgcctgtggtaccagatactcaggaggctgagatggaaggattacttgagcccaggaggcggaggctgcagtaatccgagattgcgccactgcactccagcctgggtgacagagcaaggccctgtccccaaaaaaaaccaaaaacacacatacacacaaagaaatcaagctaagattctgaaccttgataaaagccacaggcagaaactactatctaaatcaagacagaagaaaatcttctggagtcaaggcacacagaaattcacaagacttcaacgctcaaagccaaacactgattgcctgatggcctcacagccctgctctaaggagcccaaactagcaatcacagggttacatgaggaaggaacctcgagtctctagaagattaaaataagaagatgcagtaaaaaggaggcttatagccatgggacatctcaccgattctcggaagccatcatacttgtagacatggccattctttgtaagcagtttaagtccatggcccagagcaacacggcgccagataccttctgttaactccccagcctggatgttgtccactttgcctgtcttgctattcttgaagatgatgccctgacggctcaacctcagtcgaccatcattctgtaagaaaagcaggcccagatgcatggagacagtacacagcatgtcctgggttctacagctctacctaacacacattcctgctgcaagtggactggccagattatcaatgcaggagcaacagctgagggtgccaaggagtctagattctaaaccagactctggtatctagaacccttaacagattctcagtttcctcatttgtaaaacaggaattgggaactgaacagcatatacggtccctataactctgagactatctctcagtattgccttgagttggtggagacactaggtacacattatactgagtcttctttttccaaaataacgttaccaaagcaagctctcattaatggacaaaaactctaccctccttccttctctctacttgtatcacctgtccaagccattctcaccatggaacctttcacctcctgatagacgtcgttgaactccagtgtctctgccatgtcgacccctgcctgtggtggcctgggcagagccccaggctgcacaagggaaaccaagtaaactgggagctgggccccaactcctgagtgggtgtgcggatgctcagcaggttgggaatctgaattcaagaggaagacagataagcatgaaagacagcacctcgctgtgctcacggatggagccaggtagcaactcccagctgcgcctggatgtctcaggatttcctctgcctggaaacctacagacggacgctgcagtgcccgagggtccaggtccaggcctgggtggagaaccgggcccggaataccgctgacacccaacccgacgcccgctctggccgctccggcgggagccatggcaacgagcagcggaaccccagggtctgccaggagcccgcacatcgcacgcgacccaatccagctcagagtgcagggtttccctcgcaccgctcccaccaccccgcggccccagacccacggttcacccccgccccacataatggattcgcccgctccccgcggttgcgaacgcggaatggtccatgtcgagggtcccgtgggggagcggggcccctgccttcctgggaccggggacgaccaccacctacctcctcaggctgcggcctcgcgagggccccggcgcgagaggtgggcgcgctggggggacgcggggggggcgcggggagggggatggggggacaccggggaagcttttcccgcgtgcgcggccccgcgtcccgccaccggaagccgtacacaggccacagagaggatgagctggctagagagacgcgagtcgggcccgcctgcgagacagtcgcatagagcgtcagcgactctggaggacctgagggaagggtggttgccgtgaagcctctctcacccagggggaatccggcctagaaaatgtgtgtagggctctttagaaactacagacacttcttcagtcgagactagatactaaagagaaattgtgtagttttattgtatcagacttagtacaggggtggggtgggggtgtgtattggaatgatgcgtgcccgtttctctgcaaaatagtttctatgtcatggaaaggagtcgatgggacaagaagagaagtatttgaacagttgtgggaggaaacgacctctcccactggctgcggagagtatgcgggtgttggtgtcatcgtgggtgcactgctttctggctgaactgtcaagttcactgtctacacccaaaattttcacatccttaaccgaaaattataggtacctccaagaggctggcaaacggccttatccagttcaagtcctggtgtcagattcaccttggagccagaactgatttgaaaccacatcatcctgtggttgcggaagccaggtctcccccgtataatcccagagtgcattttgcaacatcagagaccagacctggaaaagatgttttagtttttctaccccaacctccttttactgatgggaaaactgagacccaaaggggagtgagttgcccagggtctcagtgcgttggcaacaaggctaggtaggacccagacctccttaacaccaccagtccagttatcttctgtcataatcacagtgactgtatgttcagaatgactattgatatgtgtcctacatgaagacattagtacagaatatgtaagctcaagatttccctgacaatcaatacaccagcttgctaaatcaatcctggggtaagagacaacaggaatgcacccttctcccctgaactcatagctttaacctctgagtagtggctattccagcattatctagcaaaataaattcaactgggtttaataaatagatattgagggcctattactactttagcacacttctcagatttgaggaaacttgaacaaggtgaaaacatccccggccaggcacggtggctcacacctgtaatcctagcacttggggaggccaaggcagggagatcacttgaggtcaggagtttgagaccagactggccaacgtggtgaagccccgtctctattaaaaatacaaaaattagccaggcgtggtggcgggtgcctataatcccagctactcaggaggctgaggcatgagaattgcttgaacccaggaggcagaggttgcagtgagctgagattgtgccactgcactccagcccgggtgacagagcgagactctgtcaaaaaaaaaaaaaaaaagaaagaaagaaaaagaaaaaaaaaaggaagggaaggaaagaaagaaaaaaaaaaaaaacagaaaaaaaaacccagccccaacctttcaggaaaacataatctaacaaatgactttaataaataaagtgacagttaaaaaaaaaagaagttggcacatatacaccgtggaatactatgcagctgtaaaacaggatgagttcatgtcctttgcagggacatggatgaagctggactccatcattctgagcaaattatcacaaggacagaaaaccaaacaccgcatattctcactcataggtgggaattgaacaatgagaacacttggacacagggtggggaacatcacacacaccagggcctgtcgcggggtgggcggagtggggagggatagcattaggagatatacctaatgtaaatgacgggtatatttacagttaacgggtgcaacacaccaacatggcacacgtatacatatgtaacaaacctgcacgttgtgcaggtttaccatagaacttagagtataagaataataataaaaagaaaacaaaacaaaaaagacgtgctaactgctatgctacaggtagagcgaagctcattaccagctggagttagaaatatgtgactctttactcatcacaccccagaagacccagaaaaactttcaagagaccttttccccctgacccatgccactgggggcaactcaggaaaggaggggacggcgcagaactgggtggaatttggcagacactcaggaatgaagagggtccttagctcaggcaggctattaggtgactgggggatgggaaattgcaaggggctttagggagagtgtgagcagctggtgagctgggatgaggatgctgcagaagagaacagaacagaaacagtagacagagtgcagataaaacattagtcccagagggctccagccagctacatcccaggcaatcaggagcccaggattggagaccccacccctgctgtgacatcacaggggagtggagtggagacgaacaaaaagggggtcccccgccctggtcctggcctcttggaagccagagtatcaagagcagagaatctcactaggattgcatggcttaaagggacaggctccccattcctccaacccctctaagctgccccctccaggtcgtgatctcgtctccctgtcctgtaggacctccctctcctgaggccaccactgggcccccttctgagtgtcccctgagcactctctcagcatgaactgcatatccgacttcttcacctatgagaccaccaagtcggtggttgtgaagagctggaccatcgggatcatcaaccgagtagttcagcttctgatcatctcctactttgtagggtgagtctgtggcctttcaggttcctggcggggtgggctgcctggtatcccgtcttcaccctcctgcctcggtgctaccatccagcttcctgagctcctctgctcctgggggaaacagtttcttctgtggagccgagtcttaaagactggcctctgccacccccacctagggcctaaattcacccaggtgaattcttttcccagttcgtcctccagggttgagattggtttcaagacacacgctcggagtagtagggtccctgccccggcactgccctccaccgagggagggctcaggagctccatctccaccctccctgctctcatctccccaacaagagaacaggcagaccccctcccacatcttcgaattcccctcagtcaagtcttcggggtctcaaaaagacaagacagcacaggaatagggaagggaaggcactgagacaagggggtggtggcaggttgatcaagttggtggccgggagggaaagagagaactggatctgttttagaatgaggaatttccttctggcatggatgggtgagatggtgagagagagaagggcaagggagaagccctctgctcttgaaggggaggacaaagagggaactgccccttgatgaggaaacaaacagaggcccaagggaagagtggccaaggagaaaaggagcttttctgaacatagtgccgctccctccccaggaatccagaaatgctcccctttgtcaaaaagtgtaagttccctacctctccctgaccctgtgccatgtaacccatcctaggagttgcttaagagccaggaaggtgcaaccatcccctcagcccccaccgcctgcaagcacacacctacacacacacacacacacgcacacaaa

SEQ ID NO: 5503 - DNA, 6000 bp, Homo sapiens
ggtcggtcggcattcagtgctcgccgtggaagcgaaccgcaggagcatcctggggcagcggggagttgctgcactcacctagacaggcggcctactgtgacttcaggcaagtcattttccttctctgtgcctcagtttctttgtctgcaaaatgagcagctggactagaaacttaccattctttcacagcacgtcaaactcaacatgcccatttgagctgaagacactgaggctactcactgggtgtgaacctttgacagcatccaggccctgcacagttgtctaggagaagcctgacccatgatgtcctttccgctacccacctgccacgagccccagttctgagctggaggggtgggggtgggtggaaggtggatagtggtcagtgcctcacctggccgactgcagcctggcagagtccatgggggacctcgcagcacagtggatcctcttgccttgtgtctctagttggtccagctctggtctattccatgctattccgttgtcatgggcaggactgggtttgatgaagttggacctaggtgtatcccagcctctcctggtttctgtcgtctttctgtggtgcccagggcttatgtttctatctctttgaatgttgagtttactccgtccttcagggatcagggctgcctgagctcagggtggaggtgctgttgtctgtctggcttccgggccctggactggcagtgtcccccagcacccctgtccagctatgccaagccccctccttttctttcttggcctctgccctatttgttctgtgactggcccaagagaggggtgtgggctggcaggtgtcccacataaagcctggaggcagcatccaggcctggctgacttaccccggggccccctgcctactgcccccagccaagctgggtctccttcttcctgcccagctgaggcagggcctagaagggcaccgaggcaggccctctgtgatgctcctgttgctatggtaattctagatgagaaggccatagcattctgtgtctggcacccccgcgcatctccccagctctgccctgctgccccaagagatggctctctgctggggagctcgagagcttggaatctgctgcagtcaaagtttcttccatgcggccaggcacagtggctcatgcctgcaatcctagcactttgggaggccgaggcgggtgaattacttgaggtcaggagttcaagaccaacctggccaacatggtgaaaccccatctctactaaaaatacaatacttagccggaaatcacttgaacccaggaggcagatgttgcagtgagccaagatcatgccactgcactccagcctgggtaacaaagcgagactccgtctcaaaaaaaaaaaaaaagtatctttcatgcaggccccatcctttggacctcccttcaaccccaagagagaccactaccctagcaggtaagactctacctctcagaaactgacctttactgtagagctgatagtgggaaagggctcaggatccaaaatcaaaagacctagatcctagtctcaagccatttatagctgtgtgaccttggacaaggcaggccttgagcttcagtgtcctcctttgtaaaatgtggataaacatgcgatactgaatcatccttcaggaatagctctatgactttccgtaggttgttcccctgatgtgtaatgctcttccattcttctcagctccatgaactcctactcatgcttcaagacccaaccgaaatgccccattgtctgtaaaaatttccctgacctctgtgcacttggcacagatcttaggccttgccattctgtgttagagttgttatttaagtgtttccaaattttttgactatgaatacgtacaggcaggaatcagattaggctcagttctggaaggagaaatggtttggcgaatattttctttgcggaacggaaagcagaagagggcgaccttgactgggttgggtgccatctctgcaggggtcaatcctgggactcttgttccaggcatggcttgggtcaatcagcactcatgactttgctgtgtgcctgagccgtgcctggctaactggggacattttcatagctgagacccagtaggagagaccatgacttgtgccagggtgtgcctgtctcagctctggggcagggccaggagcagctgctcatgggatgtctctggggacatgctggggcctctgggaggggaagggagactggccatgcactgtctatggtcctggtggtactcctgggatattgccaaggagcctgcggttcagggaacagggaggagggactctagtgtctccaactccctctcatggctctatggctgctggtcggggtcagggagatgaagcagtgccagctccgtggtctgcactgatcctgaccagtgaaccaggcttccccagccagagccagctagtcaagcacgctctctagtggccaccacagggaaggcaagaacttgtctccacaaaggcaggattttcatttattccttcagagagtacagaatgagcatcaatgttccaggcatggtgccaggcatgtgtgttaactttagttaaaacatacttattggccgagtgtggcggctcactcctgtaatcccaccactttgggaggcctaggtgggaggactgcttgaacttagagctcaataccagcctgggtaatgtagtgagaccctatctctataaaaaaaaaaaaaatagctgggtgtggtggtgtgcgtctgtagtcccagcgacttgggaggctgagatgggaggattgcttgagcctgggaagtggaggttgcaatgagccaaaatcacacccattgcactccagcctgggtgaccttgtctcaaaaatatagttatatatttacttatatatttatatgtataaatatatgtgtacatacaaatatatttgtaatattatagacatattaatacatatttacatatgttaatatataaatatatataatatatatttatcatcttctaaatggaaagctcttgagtttcaggatgtgttggttgggaagggaatacaggatagggaaataatccattaagcaatgactcagcacaggccataaaatcagaatcacctggagaacttgaacaatcccaacacctggggtccatccagaccaatcaaatcagaattcgtaggggtcaggcacaggcaccagtggtttggagagttgacggacacatgtcccatccatcattctcattcggctgccaaggtaggcatcgttgtcccattttgcatatgaggagactgaggctgaagtgaacctgcttctttccccatatcagttgaggacagcgatggggcagcggggaggcagtaaatactcctacaaggctgcctctaaagagagtcttataataacaacagctttattgtttgccatgattagaaaagtattcaaggtcattgcgaaatagtgtttttttttctaggcagataattatataaaggcaaaaatggtgtgtgggggtgggggacaaggggagggagagcattaggacaaatacctaatgcacgcaaggcttaaaacctagatgatgggttgacaggtgcagcaaaccaccatggcacacgtatacctatgtaacaaacctgcacatcatgtatacctatgtaacaaacctgtacattctgcacacgtatcccagaacttaaagtgaaaaaaaaagtggtgtgtagaaaaatcacctgcaatctcagcatagttaacgcttagtacatttcagagagagagggtgacaggaaagggaggatgagagtgggtttaagacacaaggtcatattataaaatcagggcttctggaagtttagtcccaaaaccacacatctcataatcccctgcagtgcttgattaaaatgcaacatccctaaggccacagactcagactctggagaaagatccagaaaactgcccgtttaataaacatttgggcgattcttacggcctctaaagaccaagaaccactgctgcctagagctctgctctcttcattgaacaatacaagaggagtgtgtaggtagacacccaccacttccaacagcttaggagagcccttgagtatggattgatgtattaaaatttattgaatcacatgctgagattttcaccagctgcccgtggggatctgggcatttattcccatattgcactggctggctggaagccagcagcataaactccagggctgttctgtcaacccccaccagactcacccccctccaccagccccggcaggcttctccttccatctctctgaagcaacttactgatgggccctgccagccaatcacagccagaataacgtatgatgtcaccagcagccaatcagagctcctcgtcagcatatgcagaattctgtcattttactagggtgatgaaattcccaagcaacaccatccttttcagataagggcactgaggctgagagaggagctgaaacctacccggggtcaccacacacaggtggcaaggctgggaccagaaaccaggactgttgactgcagcccggtattcattctttccatagcccacagggctgtcaaagaccccagggcctagtcagaggctcctccttcctggagagttcctggcacagaagttgaagctcagcacagccccctaacccccaactctctctgcaaggcctcaggggtcagaacactggtggagcagatcctttagcctctggattttagggccatggtagagggggtgttgccctaaattccagccctggtctcagcccaacaccctccaagaagaaattagaggggccatggccaggctgtgctagccgttgcttctgagcagattacaagaagggactaagacaaggactcctttgtggaggtcctggcttagggagtcaagtgacggcggctcagcactcacgtgggcagtgccagcctctaagagtgggcaggggcactggccacagagtcccagggagtcccaccagcctagtcgccagaccttctgtgggatcatcggacccacctggaaccccacctgtgagtacaaggtgccccaggtggactgggctggggctttgaggccttcagggttggatggccatcttgcgtatttgtgtgggatatgcacacacaggcagcacatgcgcaggtgtgtgggcacctgtgtgtctgtgcaaatgccctgaggtgggaatgagcttggtgtgcatcaggcacagccagccagtgtggctgcagcaaaacacacagggaaagaatggagggggcatcaatcactgcttcagtaaatttttattgagcgccttctacgagaacacaagaggagcttccattctgaggaggaaacaggcaggaaacaggcagatatcctgtataatttcaagtagtgataagtgctctctagaaatatcaagcaaggtgaggagacacagagcaccggtggcagtggggctctatttccaggttggatggttgggaacatcctttctaaagggaacctggagtgggaaggaaccatgcaggtatctcaggaagagcttcctccaggcaggaagatcagcaggtggaaaggccctggagccaccattcagtaaacatcatttgagcatctctaccagctaggttccattatgggaatgggaatatggtggtggacagggctgcctggtcccttccatacttctcacactagggtggttgagagagcttgggagctaacgaacaagatgggctgagaacactgcctagcccagaggacctgagcttagtgtgtagacattgctgctgttactgcctttgtcattgtattatttatttatttatttatttatttttagacagagttttgctcttcttacccaggctggagtgcaatggcgtgatctcagctcactgcaacctccacctcctgggttcaagcgattctcctgcctcagcctcctgagtagctgggattacaggcacccgcaccacgcctggataattttt

SEQ ID NO: 5504 - DNA, 6000 bp, Homo sapiens
gagcgccccatctccctctctgcaccctgcaattcccacccctccgtatttatttccctggtcccgccgacagtccctccttgtctgtctccgggattcaggcctccctccctgacatggagagtaacctgtctggcctggtgcctgctgccgggctggtgcctgcgctgccacctgctgtgaccctggggctgacagctgcctacaccaccctgtatgccctgctcttcttctccgtctatgcccagctctggctggtgcttctgtatgggcacaagcgtctcagctatcagacggtgttcctggccctctgtctgctctgggccgccttgcgtaccaccctcttctccttctacttccgagatactccccgcgccaaccgcctggggcccttgcccttctggcttctctactgctgccccgtctgcctgcagttcttcaccttgacgcttatgaacctctactttgcccaggtaaccaactgtggtcccgggtggggggcgggaggtggcaagcctcaaggacccacaggagtgaagggcatctctgctcctaggtggtgttcaaggccaaggtgaagcgtcggccggagatgagccgaggcttgtaagtactcgggacactggtgggctcagcctccaggtcaggggcaggtgacagtcccatgtagatcccttcccacctctcagggctgagacaaaggcaacccagggaatgtctgtggaagatcttggaaaagttaaagcacctggcgcagatggctcagcagaggccttgcagatctgcaaggcacaggaataggaatgcttgtggtagtgtgagggagagggccccagtgtcatccaccatggagggcgagctggaggctccagcccatggaagcaccaaagccatatgcactcctgggtgacctggggccgcaatgccctcgtcatttgtacagtgtcttacggtttataaagagctttcccagccatcttttatttgtacaatttccctgagaggctactatcctcccttgagagatgaagaaactgaggcccagccaggtaagacagcaggatcaaggtcgcagagctggggctcagacagagacttctgactccagttggtgcaccttccgaagtaccatggctgtcagtcaccttctgacctttttgggcctcagtttctccatctgtaagagtggaggaacagggctcagactggatgccctgagttttgtcgacattggggtttcctgcaggaggtggggcaggtggtgagtgctgagggctgttgagggcccgcgctgactgtgctgtggctgcaggctcgctgtccgaggggcctttgtgggggcctcgctgctctttctgctggtgaacgtgctgtgtgctgtgctctcccatcggcgccgggcacagccctgggccctgctgcttgtccgcgtcctggtgagcgactccctgttcgtcatctgcgcgctgtctcttgctgcctgcctctgcctcgtcgccaggcgggcgccctccactagcatctacctggaggccaaggtagggctgcagcactgatgcccaggtgtcttttgggtctctcggcagcggttctcagggtgtagaggaagctgggagccttctctccctgagggtcctctgttgttacctgtgccaggggaccagtgtgtgccaggcggccgcgatgggtggcgccatggtcctgctctatgccagccgggcctgctacaacctgacagcactggccttggccccccagagccggctggacaccttcgattacgactggtacaatgtgtctgaccaggtgggcatacgcatgtctgccacctccttagtagccgtggcaccttggccccagctggcctgggccctgtcccactacccctttggcgtgactgcagactggcaccagcccctgccttcccacaggcggacctggtgaatgacctggggaacaaaggctacctggtatttggcctcatcctcttcgtgtgggagctactgcccaccaccctgctggtgggcttcttccgggtgcaccggcccccacaggacctggtaagggtctgctccctcttctgtggggccagtggagggggcggatgttgcaaatcctgggttggagtctggggttgggcctgggaggccagtgcaggacaggagtaagtatcgatgatggcttcctcccccagagcaccagccacatcctcaatgggcaggtctttgcctctcggtcctacttctttgaccgggctgggcactgtgaagatgagggctgctcctgggagcacagccggggtgagagcaccaggtaggagccgtggcactgcctcagtacccctgccctacccgcccaccccgctggctccatcaagctatgggggaccgagatagccgggtcttgccttccacccctgccatggcctttgcttccccatctgtactaggtgaggtcccctgggttcctattgctaaagcctccacctcttgcctagagatgtactttgtcctgggccccgaaggtctaggtcacaggggttctgttctaagcctgtcttcctcctgcagctcttgtgactgtggccctggtcactgtcctgagactgaccctgtttctctgctgcagtatgtcgggcagtctaggctctgggagctggtatggtgccatcgggcgtgagccgggctggtatgggggcagccagacgaagaccactcctctgctcttctcccaggtgccaggaccaggcggccaccaccacagtctctactccaccccacagacgtgatccccctccctcccccacagaatacccaggccccagtccccctcaccctaggcccctgtgccaagtttgtctgccgcttcttgcccaggatcctgggggtcgtggctaccccctcctctggccggctccttgctgctcctgtcatagtgagcttgtgccgtccccctaggatggggggcatggccctggctgccagatgcccacagcaccctggcatgacctgccacctctgcttccacaccggagccagctacctctcctgtgcctgccactcaataaacagtgtctgcgccccacagttgtgcacctgtctgtcatctgccttgtgttcctatcacttttgcctgtttggcctaaggctgaacagacactagcccttgaagtgggctgctaggctgggcaggggtgacttaccccatcaaggctggtgggctgggagaggaggggcctgcagtttgcaagggaaggagaccacacaggcctttgttctcaaagctctcctggcccagaattgccccactacctccagatccctctccacttgaacagttgctactctttcctcaagacctgcgtcaactgttacctcctttaggaagccttctgtctcctggtcaagggacatggcccctctgctgggccccacagctccacattactgattatgtggccattgaggttctttgttttgttttgttttttgaagcagggtctcactctgtcactcagactggagtgcagtggcacgatcatggcccactgcagcctcaacctaccaggctcaagcaatcctcctgcctcagcctcccgagtagctgggaatacaggcacatgccaccattcctgactaattttttaatttttaattttagaggtggggtttcaccatgttgcccaggctggtgtcgaacccccgggctcaagcaatccacccacctcagcttcccaaagtgctgggattacaggcatgaggtaccatgcctggcagcttctgagtcttaaccccaatggattagactttctggaggccctgtttccctatcaccaccccaacctggtctttaggagtcaggagttagtccagggcttgctggggagttggcgcagtgactgagcagcccccatcttcctaccagggcgtgggtttgcccagatgtacaggtggtcccctagctatgccctcccgttagccctcttctccactgtccttagtagcatagtcactgccctctgcttccatggccctggcaggtctgtctgatggctaggagtcctttgctggagggtctgtcccctgcccacataggtggttgtcccagcttttcagagttcccttggcttatcactgggcctgcttcaaaaccctttacttgggaccatcctgggcaccaggccctcagggcctccagagagggcatctgagactcatagagaatcagcttgaagctggacaatcactttttgttgaaataaaaactgctaacgtttgtggggcactttattgtgtgtgccaggctctgttttgaggatttctaaacactggcctccttaatgcccagaacagcaccccgaagtgatgattaatcatcccttttctgtaagtgggaacagggagactccagagtttggtaacctgttcaggttccctaccagtagcgggtggtcagcctcaaagcccaggctgaaagccatccagcatgagggctgaggaccccagcaggcaccagagggtctttggagaggtcacaggttgtcaagtgggtgagaacagggcggggcaagttcaggaccagccagggcctgggtgttcaggcagtgggagagtggatgctggcaccagtgccatgctgggatctgcaggcagcttcagccacagccttccggggctgatttctgggcatggaagtgagaaccaaaagctggggcagggagcaccctggagggatagccggggagcaggtagagggccaaaacctggagtgggggcaggaggtgctccagcagcaactcccccagaggtgggtcccaacctccacgtcggccaattccaggtggccccaccgggtttcccccacccctttgtcccgcggagcccctccctcatgagtgctgagcccaagggccaggctgtccccaggggcggagagttgcggacccttcccgatccggtaatgggcctgggagatgccagattagcgtggtgcctgtccggagagacgggccagctgatgcccaggtcggggccctgccgctggccacactgggctccggtccaaggctagaaggctggcccctgctgcaacccctctccggctcctctgccacccacctcccggggctggccggctgtggggagccaggcggccgcaggtaaacggcttggggcggcgccggcggcgagggcgctgcacggagggaagcgcggcgccggaggggttaaccgcgggaggaggggggcttctgccggcgggaggggggtcccagccccggcggccgcccgctccgcccctgccgcctccgcggcccagtcggcaccggcgaggccgtgctggaacccgggcctcagccgcagccgcagcggggccgacagtaagtgcggtgcgggctccggtgcgcgggcaggactcaggggcagggacgccccaggggcgactggccgggcggggtgcccacctctcgcgcgtgggcgcctccgggagtggtgtggccgccggtcccgccgcccgccacgctccgaggcgtcgctgtgcggacgcgggggaggcggtgggagcgagctgcgggcgctgcgcggtggccctgctgtctggcgtgtgcacgctagtgtccacacacgtgtgcgtgggctctgggtgccctggcgcggccggcacgcccatgggggccggggatgccggggcgtctgcggagagtgcaggtggggtgcgtgcgtgcagcggggcggcgcggcgctgcagcctcgggatggagcgtgggcgcgcgggtctttgtgcccgcgcttggcggcgcgtgccggggcgtgtgtgcgcgtgggcgccgccgcccgctgtctcggactgacagctgtctcgggggctgtcgccccggtgtggcctttgcggacccccgccccgctttttccgggaactgggcgtccccagcacccctcctcgcctgggtgcggcggccgggacccgcccctgggttcctcgaaagcccggcggggcgcgggg

SEQ ID NO: 5505 - DNA, 6000 bp, Homo sapiens
tagtagagacggggtttcaccatgttggccaggctggtcttgaactcctgacctcaagtgatccgccctcctcagtctcccaaagtgcagggattacaggcgtgagccaccgtgcctggctgtgtctctctagttttactcccaggctagcactgctcccttgatgacaggtccctaagccagggcccagaacacccacaaacggtgactgccaggctgctgtgaggatggtgctacccagaggggcccctacactagctctttctctccctcccgagacccgtaagtacgtggcgacagactcactgaatgccggtgagggacacagcccagatgccatctgtccgtgccccattctggctgtgccaggaacaggacattgccatcccagtctcagcgccctcttgcgggacctcactgggccctgcccacattgtttgtttctgctccttctgagctccctcctgcatcacgctccacatggtgtaactgcttactgggaaccacattccactagggcctctggggttgtgtacccaaacatcaagggaattctttagcggcaataaagacaatttattgggatgtgccgtttttgcagacagctgcgtgcatctattatttcctttcttcgaaataaaaatatcttatactttttttcatgttttaaaatgtatgctccttgtcacaacaaaacaaaacaaaaaacaaaacaaaaacaaaactcaaacctgtggccacatcctgagatctctctcgaccccactctgttccccagagctgtgtcatcttttaaacatttgctgacttaggagttcagtgatttcattgttactttaatttgcatccctttgtagcctaatgaggtggagctttattttaggcattcctcactgatatttcctctttcttgggaacttctggttcaagtcttttcccatatgtggaatttaaggctgaatgtatgggattttaaaggctctgcaggaagcagaattttggcacccatgatcttcactcctggtgtcctgcctgtggttgtgctagatgagatggcaaaaaggattttgtagatgcgattgaagtcacgaatgagctgatcttaaattagggagatcatcctagattatctgatgagcccagtgtaattgttaccagaaagaggtcctgatctagatcccaagagagggttcttggatctcccacaagaaagaactcagggcaagtccacagtgcaatgcaaaaacaagtttattaagaaagtaaagtaggctgggtgcggtggctcgttcctgtaatcccagcactttgggaggcctaggcgggtggatcacctgaggtcaggagttcgagaccagcctggccaacatggtcaaaccccgtctctactaaaaacacaaaaattaactgggcgtggtggcgtgtgcatgtaattccagctactcaggaggctgaggcaggagaatcccttgaacctgggaggcggaggttgcagtgagctgaggtcgtgccattgcactccagcctggcgacagagcgagactctgtctcaaaaaaaaaaaaaagaaaaaaaaaagaaaagaaagtaaagtggtgacagaacagctgctccatagacagagttaggacgttccggaaagtaaggaggaacgtgtccaccctaggtataatactcgtttatatataggatgaaaaaagatcaaagatcatgaggacacgtgctctgccactggggtttgtgataaagaattttcctaattactgtattttgcaagaattgatattattacctttaaagcaaaattagggatgcttctgttctgaagatatcaggatatcagcacactcccaagtctaggtctgcttagtaaacattatcaatctgttcccttaactgtgaacgcctcactttctgggaatgcagcctgataaagccccagcctcatttttcctagtcctcactcaagatggagtcgcagcaagtcccagcctcattttccctagtcctcactcaagatggagtcgcagcaagtcccagcctcatttttcctagtcctcactcaagatggagtcgcagcaagtcccagcctcatttttcctagtcctaactcaagatggagtcgctctggttcgaatgcctcagacataatcatatgagcccttggctcactgcaacctctgtctcccaggttcaagcgattctcctgtctcagcctcctgagtagctgggattacaggcgcctgccaccatgcctggctaatttttgtatttttagtagagacggcgtttcaccatgttggtcaagctggtctcgaactcctgacctcaggtgatccgcctgccttggtctcccaaagtgctgggattacaggcatgagccactgtacctggcctgaaagcagagtcttgacgaattatttgtacactcatgttcacagcagcattattcacaatagtcaaaaggtggaagcaacccagtgcccatccatggatgactggataagcaaaatgtcatggatacatacagtggagtattattcagctttaaaaaggaaggaaatttggacacatgctacatggatgaaccttgaggattttaggctaaatgacataagccagtcacaaaagaacaaatactgcaggattccacttaaatgaggaacctagagtcgccaaaatcttagggatagaaaggagaatggtggtttccaggggctgagggaatgaggagtcagtgcttaatgggtccagaatttcagttttgcaagataaaaagagttctggagttggaggtgatagttgtatagcatcattaatatatttaatatcaatgagctgtacacttcaatatagttatgtgaactaaaaatatctgagacaggtctcgatctatttagtaagtttattttgccaaggttaaggagtgcctgggaggcaggtctatgccttccttcaaggatgatttgtaggacttcaatatttaaaggggaaactggccaggtgctgtggcggaggttgctgagtgacctgagatcgcaccactgcactctagcctgggcaacgaagcaagactctgtctcaaaaaaaaaaaaaaaaaaaaaaaagggaaagggtggatattgggaaagagggagaaattttaaaaatatgtggagagataagagacaaaggttgcattcttgtgagtctttgatcagactttcactgaaatacacaatttacaggttgcgggggtagaggaatagtcacttatgccttagtctggctcggtgaatctgcacttttataccagaggaagcaatcaggtgagcagagggatgacttagagttccatcctttgtttggaacctgtgaagatcagttgtcaatgtacattgttagggtaaaattcaacaaaactgttttagggtaaagatcttgggtgcccacgaaaaatttcctagcgggcaaattgtgagggaggtatgtagctttttaaatcttcgtagctattttattaaagaagaaaaggcgaggcagtttgcccaacgcagttcccagcttgacttttccctttggcttagtgattttggagtcctgagatttattttcctttcacagttatgatggtaaattttatatttattttaaaccctcccccctccccaaaagagggggaaaaagtaaagaggtatggcagaaggggaagtcacagagattggaagcgtcttgcagcacctttttttttgagatggagtctcgctctgttgccaggctggagtgcagtggcgcaatctcagctcactgcaatttccgcctcccgggttcaagcgattcccctgcctcagcctccgagtagctgggactatagacacgtgccaccacgtctggctaactttttgtatttcagtagagacggggcttcaccatgttggccaggatggtctcgatctcctgacctcgtgatccacctgcctcggtctcccaaagggctgggattacaggcgtcttgctgcatctcgaagcgtcttcagcgtgctcttgcttgctggctctgatgatggaggtgttcaagccatcgtggaaggaatgcagtggcctctaggagtgagaatgacaccagccaacatccagcaagaagacgtggacttcagtcctaggcccatggagacaattctgttaacatcctggatgagcctggaagtgggctttccccagagtctgcagataagagcccacggcagctgacattttgactctagcctcgtgaggccctgagacaggaggtttcctgccccgcaggactgaaagatgatgaatgggagttattttatattttcagattgtggtaattagtcactgtagcaatagaaaacgaatacaaggtctttatgcattaatgttgaaaacactttttatatacgttgtaaatattttttaagtgtgtcatatgtttttaaacttttcccttaatgatattgaatcctcctaatttcaccatcagagggtaaactccagttccattctggggggagtcctttgcagtcaccccgtgtactcaatactcacatgcatcagaatcaccccgaatgcttgttaaaacacagattcctgggtcctccccgcagagttgctgatttagtaggtttaagggcccaagaatttgcatttctaaaatgtttccaggtgatgctgaagcttctggccggaaagacatcctttgagaacatatttcctccccagccctcggcccttaagccccagaacgctgccccgccctgggtggaacgaagctgagctccaccctagaggggcggggccctttagctccgccccactcaggagaaccccacccctccctccccgttctcattggctgggactgcagggatcccctgcgccacagtgccgtgcgcgcgtcagcaaaaacgccagggacggggtctccgcgcctgcgcagtgaagctgggcgccttcggggcttgagcttctgagggtcgggtccagcgcgtgggctgctggatggcggaaccccaggcggagtcggagcccctgctgggcggggcccgcggcggtggcggcgactggccggcggggctgaccacttaccgcagcatccaagtcggccctggtgagccgcccggacctggggaggggactggcccgggagaccagggtcgcgcgtgggggtcccgctgtcccagcaccccgctttctgccgggcgcgcccccaccaggttcgagtccgagcggggcccgggccgcgccgggtgccaggcgagccggtgttctgagggcgagtgggctgcgtcctgcggacccggaccggggtcagggcagagctggggtctcttccgtgtcgcgtcctgatcccgaccagctgggcgaagaggccctcgcccagccttgggcagccccgagggaaccggccacctgcggcaggcaccctccgtgtgcccgggcgggcccagaccccatacttcccgactgtcgccgtaatgagggtcgcctaattgactcagagaaggcagcactttgatttttcccgtttcttctggaaaaagcagaggctcacagagaggcgttaccctacccaaggtcacacacccagtaagtggccgaggtgggattcgaaccagttgggagctaggagtcctttctttgtagggtgcctttccccgtcccacttcccgtggggctggggcgggccccctagacgggggcggcttcctctccttgccctctgccaccccagagtcccctctgcactccctcctgcccttcccgttttttgtcctggtctgaagattgctgaatccgccccccgagggtggggtgcgtccgcccctcgctgacaccaggggaatgagattctggattaagaggtggaaggaccttagcttcacttcacagatgaggaaactgaggcccagagaggccctgagacctgcccaaggtcacagccctctgttctggtgcggctgctgctcgaaccactctgagaattcacacctggctcc

SEQ ID NO: 5506 - DNA, 6000 bp, Homo sapiens
tatattaatgtttgtgaaatttgatgtttcctaggaatacagataactaacaataatagacatgggttttcagtaatcaccagtagctgaaaacaaaaatatagtaccaaaaattcaattgtttttggagaacttaagtttaggtttaatataatagataaatgtatttaacttggctgtgggaactaggtttcttaatgttggagaagtaaggtacggataagcaagaagggagattagaatgaatgctgtagtactgaattttagttgcgaacatcggtaacaactcatttttaacttaatacatagatagatggatagagaaacaattataggtatgtacaccaacacgggttatacatgtataaccaagcactgtcctatgtgagagtctggaagcaatgacaactcagtaacagttagcaaccccattgctagatcttggtttttaaataccaatctgcaatgaaaagaatcaggactccttattgaaaaggctcatactaaggctagggcaaggaatataaaaggtaatgtacagacagcttcctatagtgacaataaggctggaaatgttcagaaaacaaaaggatggacatatatcaatagctcctaatgtccaaagctggaccaacttgaacagcacaataaataacaaatagcatagtatcagactatataacccaaagtataaaataaacctaaattatcatcaatgatagactggataaagaaaatgtgatacatatacaccatggaatactatgcagccataaaaaagaacaagaacatgtctgtagcaggaacatggatggagttggagaccatgatccttagcaaactgacacaggaacagtaaaccaagtgatgagaacacatagacacacagagaggaacaacacacactggggccttttggagggtggagggtgtgagaagggagaggatcaggaaaaataactaatgggtagtaggcttaatatctgggtgataaaatgatctgtacaacaaacccccatgactcaagtttacctatgtaacaaacctgcacatgtatccctgtgcttaaatgttaaaaaataatataaacacataaatatacatgtgtccacactgatttaaattaatgactacgttttttcaaaatgggagagaagagacgatgcttcaatacaaaaatttcaagtaatttatgtagatactctcccctcgtggagagtaggatatagttagttactcacttccaaggaatacagtatggaataaaaacaaacaaacaaacagttaatttagagtggataaaatgtgcaaaaacactttaaccaactgatgaaggttaatgtcaccagtgacgtcaggggatatcatggattccattgtatgatgtgttgagaagagcatttcacctgtatggtactcttttctgaaaatccataaccccagtctgatcctgagaaaagtatcaggcaaatcccaattgagagacattctgcaaacacctatccagtacttatcaagctgttgatgtcatatgaaaaacgaagatgaaactgtcacaaaacagaacaaggagctatgacaactaaatataatgaggtgtccggagctagatcctggcacagaaaaatactctaatggaaaaactgatataactgtaaataaagtctggtgtttaattaacagtgacatacctgtgtcagtttcttatttttgacaaaggtaccagagtaatgtaagatgataacattaaggaaaactgaaattggatgaagggtacaggggaactctccgtagttaattagaaacacttatgtaaataaaattattccaaatgaaaggtttattattaaaaatatgggttggtttcctagcatcagatttctgatctaaagtacaaatctggtcattttgcccccttgcttataaccgttcattgtttctctgtctctatgagacgaagacaatgcttctgagtgagatggtgccgagccatctcttgctttgctttccagccgcacttccactacttcccctcatataacctgaagtctagttttaccaagcttttagcagtgtctagaaagacataatttttctccacttgataatccctacaaacacatagcaactcagttcaattttatttttctctctgtgagttctccctgaattccctcaaagtcagagttagacactctattttgctcacatggcactctgcacctcactctataagagcctttatcacattttggggggcaactcattattgacaagagttgccagttatgtgccagaactgtgttgaaagtttacttatatcctgtcagaaaagaaatgttaggtaatatatccaagtcaatacagctaagaaattgagggcctgtaatctgaaaccagttactaattattagtctgaaagcctgaggtctttcaggtagaacacactacctttctgaatgctaggattcttgtagtttacttttcagctcccagacccctcgtcactccttaaactcattaacacagcaggttttaataaagacagcccagtctctgaaatcagacaacttgagtcccatccttagttatggtttcatcacttaccaagaatataatcttgagaaagaatctaaatctttagttgggttacctaacaaatgcaaggatacctaaaattttctgtagatcaggtaatatatgtatggcttcagcacaataccttgcacattagtgagcattcataaacattaagagtcttctaagaatatcagggattttgttttgttcaactttatatctcaaacacttggagaataaatacacatcataggtgcttaatatataactatttgacatatatgtacatctatatacatgtatatacgtatataatatatgtatatatgatatttctatgtatcatacagagaaaatatatttgatacatacatttataaatatatgtgtatataatacagataaagagagtttaggtttagaaagtaaaatagaggttttaactacttgggaaaatagaaattaaaaacaactggattactattttggaaaaatatagttgtgtcatctgtggttatattagtccaggtgttatcatgacagttaagtggggaaaaaaaacttgtcctgcatctatatcaatgatgctattacatcatatgaaaactgaaatctttcaattttgagaagaattaaagttaataattgcctctggatcaggaagagcttcactagttacccaagcaagtgatgagtttaacagtttggtggattttgaaattttaatttaacttgaattttatgtgtcatactctattatcctttttcaagagaaaacagaatgctattattcacagccttgttttttaacacagaaaaataaaaaaaggaaaaatgcttcaaatttcacttgacttgcaagactaaaacttcacaaactaaaatgacaaatgtatgatttgtaaaatacagttacaattaggttttttttttcataacaatctgtggtgaaatgtaacgggaaagcagacacttattttaaagatgcaattttaaaaataaaattcaaaacttaggaaatagaaaagcactcaagttttagcagggattttaaaatgtcatctacaaactacaaatacaggtaatcagtgacaccaaataaagtattttgaaagagttaaggtaatgtatatttcaaaaagccgttaccaggctttctgtaagtcccttgcaagaattccactttaagcattgtagtctcaaatattatatcaggcaaacctaggcatttgctatattctttttaaaaatttaatggcagacatcaccctaggttccctaacgtttaaggagaacctctccttctaatgattctctcacacagcttattggaacaggagattgtatttactaactagatcaggaaatctcaaaccatacagaggaaatcagaaaccggtcactcacggctaccacagtgactgcttctgagtgtggttcaagctcagtccaggacaggcagatgaaaggacaatcttaaaggtgactctggagagcaagtgagactgtaaccccaaaactttctaggataattcattttcacttctacccagtcaaaacaactattgacatcatcactgaagtgcttaagtctacctggaggtggcgtggagcagagtgagcattccagagtcccagacaagaggagatgtgcacgaaacactatcttcctgtcagacacctgtgcccactgccccaagcactgcccctctggtccttcatcagcctttgcgctgtgtccctcctgctcctgcaatgggccacagcacagaaggaaagagtcctccggaatgggtgactgtatagaaagcaatcgaatctttaatcacttttcctactttacacttcacgcagttcttattcctatccctgcttcatgcctttccaagagaatgttagaggcctctttcaattttcatttctcagtcttttccccatcccgttcagtaccctaaacttcgtcagttatttaaaataaccttttaccccctcctccccttcccaggatgtttcaacttctctggctctcttccccatccttacctcctccaattctttcatcctggtcctggcctcttaaacccgccaggggctgccctttgcctgtcttttctcctcccatccctctctgaaccctttcacctcatccattcccttgtcaggctctccagattcccgggctgtttgctggtgagaaatctttgctgcagcgaggaccggagtcccccgcgcgcagcccagtggcagaagagggctaggctgagagggaagccaggactgtaggagagggaggcagcccgtcctcctcacgaacctgcaaggatgcggcaggggcctgggggcatggggaggtactaaccccccggagcccccgattggggcttgcagacctggcccgtgggcggattttctgcctagcgcagccgagaagcagaggtgccaggaaaaccaagagaggggcgctgggggtgcccatccccagagtcggtccctctgcgaaccgaggaagaaaagaggagggagtcagcgagtggtcagaagggaaaacctgacaccagactggctccggagcgtccgggagactggggcgctccggtgagcacccagggggtgaagccagccgagcggtgggcgaggggcgtgcggagggagtgcgcgctcgaggaggggacgccaggagggcagcgatgctccgggctggtgcaggcttgctgggggatgtcggctgatgcgagctggagagcgcgtgtggcggccgcggcgccagtgtttgtgtgtatgtgagaaagcaaggggcgagcgcgagtgcgagtgaggcaaagatagagcgcatgtctcatccctgcgagcagccactagacgctccaccaccatcttttgcatgtgcaacatttgcagccggacagaaaacctctcccagggctatggagactgcgggaaaaatctggcggctcgcgatggattgctaaggagaactagtcataatcttaaaccaccgaaacctctttccttttttttctttcttttctttcttttctttttttttttttttttttggttgattttaattttagcgccatcgtcttcaatgcttctctgaacagcctttaggaagagtgcgagagaaagagagagagcgcgcgccagggagaggagaaaagaagatgaggattatttccagacagattgtcttgttattttctggattttggggactcgccatgggagcctttccgagcagcgtgcaaataggtaaggtgtgctccgatggggtgtgcatgtggctggttgtagcagatatccgaaagtgagttaaatgagttgctgataagcaattcagggaaaccttcagcagttcccttcccctctgtttccctcctcttcctttctctcctttgcaaaaagacttcctctttagtg

SEQ ID NO: 5507 - DNA, 6000 bp, Homo sapiens
aggtactttcttaatgatgggcttggcctgaacttctgtaagagaatcgcagattcaaatcccagattaagtctttgtttcttttacccaagtaatgccacttaagaagtccaaacacgtttgggtgaggtggcttacacctgtaatcttaaaactttgggaggccgaggcaggtggatcacctgaggtcaggagttcgagactagcctggtgaaaccctgtatctactaacaatacaaaaattagccgggtgtggtggcatgcacctgtagtcccagctactcgggaggctgaggcaggagaatcacttgaacttgggaggcagaggttgcagtgagccgagatcacaccactgcactccagcctggaaaacagtgcaagactccatctcaaaaaaaagaaagaagtccaaatgcctagcccctcatgattccaaattttgacttacatatactgatctgctggaaaggctagaatgagacttacccccacactcatccttccaaggatgatgtctggggaattagcagaaacaatgcagataaaaagctttctctgggtggatgtattagtctattctcacactgctatacaggcatacctgaaactgggttatttattttattttattttgttttattttttgagatggagttttgctcttgttcccaggctggagtgcaatgacgcaatctcggctcactgcaacctctgccttctgggttcaagcgattctccttcctcagcctcctgagtagctgggataacaggcatgggccaccatgcccagctaattttgtatttttagtagagatggggtttcaccatgttggtcaggctggtctcgaactcctgacctcaggtgatccacgagactgggtaatttataaagaaagtggtttaattgacccatagttctgcatggctggggagacctcaggaaacttacaatcatggtggaaggggaaggggaagcaaggcaacatcatccatggtggagagagagagagaagggggaagcgccacacttttaaactatcaggtctcatgagaactcactatcatgagaacagcaaggggaaaatctgcccccatgatccaataacctctcaccaggcccctcctctgacacatgcggattgaaatttgagatgagatttgggtggggacatacagccaaaccatattagtggatgaaaaatgctgtatgtaagatagtgaggagggaccatttttgtgaaaaactgaagggtggggagaggagcaataccaaacctaaaagaactgagtatgagctgggtgtagtggtgcatgcctatattcctagctactggggaggccaaggcggaaggatcacttgagctcaggagatcaagaccagcctgggcaacataccaacacctcatctctactaaaaagagaagaaattagccaggtgtggtggcacacacatatactcccagctatgggaggctgggatgggaggattgcttgaggctgggagatggaggctacagtgagccatgatcacaccactgcattccagcctgggcgacagagtgaaactctgcctcttagggaaaaaaaaaaaaaaagctaaaagtactgagtaaacaaagtccagacaggacactaagattagaaaaagaaagatctaagccagctgacagtacagagcaaggctgtcaaggaaagatcaggaagcattgtatataaactactttgaagacaagtcactcatacaaaatcattgccatcttgacagaattcatcagccaataaagagccataatgggcaggattactagactgttgttaagttagctaatgaaagttgtaatgtacctgtattacacatcattagtaatggccttccagtaacagatgggcatatcagaaagtgcaaagaaaagggagggaagcacgtccccagaaggtttgacttagagtcatagcttactacaatgcatggcaagaatgcaatgtcgatcatcgcctcaattaaacctttgcataaagggatgcttctgcattgctttcccataaaaactgctacctacatagctatattgcctgtagcttgcctttctcttgtcctaattcatcccataagtagaagctgacaattcaaagaactgataggaagagctgagactttgagggccagatcagtcctctatgatcttccctcttgatgaagccccatttatctgcccaccctctctaaagagtatttctcagataaactttccataactgtgtaccaaagttcctccaccaagttacatttaaattactctttcttctgaaatattttcaaatgtatagcagaattggatggatagtacaaagaattcccctagacccccacaatcatttgagaataagttagcgacatgatcaacatgatgtgccctgtttttgttttttgttttttttttcttttctgagacagagtctcattctgtcgcccaggctgaagtgcagtggtgtgatctcggctcagtgcaacctctgccttctgggttcacaagattctcatgcctcagcctcctgagtagctggaattacaggcatgtgccaccgtgccgggctaatttttgtatttttagtagagacagggtttcaccatgttggccaggctggccttgaactcctgatctcaggtgatctacccacctaggtctcctaaagtgctgggattacaggcgtgagccactgtgtgcgatcttccctcattcttgaatacttagtgtgctggtcttacaaacaaggacattcttttgcataatctctatacaattaaaatcaggaaaccaacattactacattgccacattactaccatctaatccacatacctcattcgagtttcaattcttcccaaaatgttctttataacaaaaggatccaattcagaatcagatattgtgcttgtgtctctttagtctgataggttcctcagtctttccttaacttttataaccttggcacttttgtgtgtgtgtgtttttgtttttgagacagggtctacctctattgcccaggctggagtgcagtggcacaatcacagctcactgcagactctatctcctgagctcaagtgatcctcctgcctcagcctcccaagtagctgggactacaggagtgcaccaccacattaaactaatcttttatttttttgtgtggagacagggtatccttatgtagcttaggctggtctcaaattcctgggctcaagcagtcctcttacttcaacctcccaaagtactgggattacaggtatgagccattgcacctggcccaccttggcacttttgaagatgcctgctgttttgtttgtcccacagtatgccactgtctcatctggtgtttcctcctgaatagattcaagttatgaatttttggcaagactataccggaagagctatggaagctaggtgtgcttgttactattggggtgtcattctcctaggctgctaagtggacagagctagggaatatatgcatgtatgaacatgtgcaaacacacattacatttgtatttatttcttttcttttctttttttttttttttttttgaggcggagtctccctctgtctcccaggctggagtgcagtggcgcgatcttggttcatggcaacctccacctcctgattcaaacaattcccctgcctcagcctcccgagtagctgggattacaggcatgtgccaccacgcctgactaatttttgtagtttcagtagagatggggctcaccatgttggtcaggctggtctcaaactcctaacctcaagtgatccactggcctcggcctcccaaagtgctgggattacaggcttgagccaccacgcccagcttatttgcaattatttatatatttagcaaatgtactgaaaaccatgggttcacactgatacctccaaaaccaagtcaacaccaaatggttatcttagttttctctctttctgtgtataccactcccttcaccaacagtaagaaagcaattaggctacattttattggtagatgaaaattaggtgtagaacttcatggattctaaacaaagggactgagtgattaggagaataggaatcaaatatatactttccccccttcggttggctctgtgaaaatttatatcaaaatttgcctctataatctcatttttaataaaaaagcaggcagatgttggaaatggtatttgttttttctttctagagcatctgggggtgtctagaaatggaaaatagtgttattgtatagaattatgcatcatgttccttagtaatgaaaaatgaatgcgtattcaatcaaaaagtgaaaaaaaaacttttattaaatgatgttgaactttgttttcatcttcaataagcctagaagcatcctttctagaaggttactttctgaattgtgagcagtgaaaatttgagaagccctcctatttatcaaaagtcaatgtttcttttaattaaaagggcttaggaaaaacaaaaagcacttttccattgcattgtttgcagttgttcttcattagacaataccaggtttccattagccttgtgtaattcaagagcccaagaaccactgtcaaatgctgaagatgttactgcataagtctgatttagaacagctatttggatttcaattattaatgaaattagtgtcctgaatgtcagcaagagtactgccttaggtaaaggctgtaaaggaaatcatattagtgtggaatttcctctccttaggggctcctcttagattacattattcacttagctatctcctgtcaggaaaatggaaatgttggccacggtctgatcttggggcagaaccaaagggagaagttaagggatttcatgacggcatcaattccaaaacatttgcatggtgctggtattgcctttggtcccactgagtgtttacaaaatagcaccagtaaggatagcatcaactggcaaacggagaaggaggagaacagagtggagaggaaccctgttaggagaaattgagcggcattccatctggtaggcaagtttgcatttctcctttttgggatctgcccaggaatgttgtcaagtgtaatggctcccctgtgggcctgcatcctggtggctgcaggtgagtccttttaataattttactaggcattaaggattaactcttagaagatagagacaatatttgtatacaccgtactgtaggacttctcaggcatgtttgtttttattcatcgtctgtaaaatgccagtcctgtgaagctatatggaaaacaatgatttgtttgtgacttggctcctatgattgcaaatacgtatacatatagcatcagactgtggggctttttacacatagctgaaaatatgctctgaaatgttataattgcttgataaatctctgcttctctagaaatcaagctctctgcaggttgattgagagtttggggcattctttttcaaatttgcttttatgtgtggataatatgtttttattatccaaaatagtcttggcttcattatcagctgttagcagcccagagaaaaagtccactagatttgtcatggctacagatatatgtatatcattttggtattagaggccttaacatctcgccttacaaaatctatataggtgatgagtatatctctaaagacaggtactataaactggtaagttttgagtctacaattcctcttaaaagtaatttagaagttaatacttttttttctaaatttctagaactatatttccatggcaccagtattaactctactgaattgaatcattttagttaggatacaattgattcttagtacatgcgcacaaatcaagaatttatgattatgctggtgttctcaacaccccactttcttgaggtttctcctagagctcatatctgaattctcaagttttaggatgtaactggaagtggaatgagtcaattatagagatgagttagaaatttggtagccaggaagctggaaatgatttttttattgggt

SEQ ID NO: 5508 - DNA, 6000 bp, Homo sapiens
tctagcatctcttccctaccatgaggagggctgcagacagctcactgcagcctcaaactccctaggctcaggtgctcctcccacctcatcctcctgtgtagctgggactgtaggcatgcgccaccatgctgggctaatttttctagtttttgtagaggtctcaccatgttgcccaggttggtctcaattcctgggctcaagtgatccacctgccttggcctcccaaagtgctgggattacaggtgtgagccactgtgcctggccactttatctcagttttttcatctgcaatatgggagtaataacaatatcttcttcataggaaataaagattaaataagataaagagctgagcacagtgctgggcacatagtatatgctcgatgaatgagggctactgttggtggagtggtgcagaacagggccattccaaggacccagggccttggtggaggaaagctctgagtcatacatgataggacagcagggcaaagaagaccaggaaggaaggtgctcttctatgtctgttgaagacactgctgtgcctctctccttcctatcatgcccactgctgcctcttcaggcaggtgaactgggaaacttgaatcaggcattttgccatcctgctggcttccaccccctccatgagtagacagccgctgaatcttccagcctccataccaggatgggtcaagtctctggaactggttagtaggaaaggtgctccttatctgacccctagcacagagagaggtaggctctgcaggggcactgtatgagcaagtgccaaccatgggtgcccaaccaaaggggcgataagggaagaggaaggcaaatcttccctttagcactgtgataacaaaccttaagcctcccccagcccttttctagcaggtgggtccctagtgtggccagatgttactaagggtcgaagagttttggtacatttataggttttaaaaggtcaggctctttggtggtaaaagttttacagactagtaaaattttactgcagaagatgggaaacacagctgtaatagaaaaggctggagccaagagtctggaagatctcagttccgtctgaaattagctgtgggaattaacgcatgtcatggaggttctctgggctctgtgttttaacctggaaaatgggagcaagaaaagcaatcaggggtaggacaaggggcaacggcatccagcgatagatgggaagttgaggcccacatgtgatcacatccttctctctgcagtgctagagccgctggacacaaggggaaggaaggctcaggcctgtgggtcctgcagtctcggagcttttcattacccagactggatcgccgccatctgtgtgtctgcctctattccttgggaggagcctggccgtctgcaggcagagctcacgaatcaaattagcccaggctctgcttttccctcatccccaccagccaaggcgagttcatcaaggcctcgcactaattcttatcttatttaaaaggggcaaaagtgactccacagtttcatctgaggcaatttacaccccgccactggccacacggctccagcttccccctgtctgttgtgccatcaaatccattaataggacatttcttcaggggaaacttgattgccgctccatcagaaaggcacacaggcaatacatctccatccgaggccatggcctgcccggctccctctaatcctgttacctaaggagctaattctctaatgcacgcactgtgcagaggacatcctctttccttcctaacacaattggacagtcccagaggattccaggagctcaatgcagaaatgaaggcttggggccgatgggacaggatctcctagatttctcaggacctctggaggggttgtaacacatgctcatggctggcaccccactccgccttgccgagagcctgctttctagagtactacactgggaaggggtgagccacacccagaccaccctggcttcatagttcagccacctcctgcttctgcttcatccttcctccgcctcctccttctctttcttttctccttccattttcctctcttttttctccctttcttctttgccttttccgccgatcttccttttcctcctcagtttctttcctaactttcttcctgtctggtcttctttttcttcttgttcctcttattttttacttctcccctcttctccttctccagatccccacaactgtgaaaatattgttttacctttcactttttttgtgctccattccctcccgctttggtgctgtcctttcagaacaagttcaatttctaatgcttcttcccagctgtctccaaatggttcagctctgtgggaggaatgggccccaggccataccagcctaggtgtggagcaagaggtagggaggccctcgtggatatacacaaacaccccaaatacaaaatggagcattgtggtagtggttaggttgtgtcaggggagcaattaagttctattcgctcttcaatgaggaaatgattataatggcaaccccaaatgggtttgttactgctaaaggccaaaccctagcttatggctgtatgaagggaccccatcaacaaatggcataatgctctatgcagatttcataatgcacataaacaggaggagaaagtcgtctagaaattttcagatttctaagtgctaatggccacttagacgtcagtgggagcttaaatactttgttggccaggcacagtggctcatgcctgtaatcccagcactctgggaggccgaggcgggcagattgcttgagcccaggaatttgagaccagcctgggcaacatggcaaaaccctgtctctactaaaaatacaaaaattagccaggcatgatagcatgcccctgtagtctcagctacttgggaggctgaggtggagggatcacctaagccagggagattgaggttgcagtgagctgtgatcatgctactgcactctagcctgggtgatggagtgagatcctgtttcaaaaaaaaaaaaaaaagaaaaaagaatctttgttgggcttgaagatgcatttaggaatctatagtgttctgcttgggccccattcaagacctcagcctggtggcctaggaggcagcctggttcttcttgccttgctttatcctgctgtcaaacctcaggtctgaggacattcattctggaattctggggaggtctggctctataaattctctaaaagtttggggccctctttctattcactgccctcatatccattcccctgagggaaatgcttggagctaattgtccatgtttttctggattgtgcagtgatgaagcacatgacttaagagaagagtagcccaggctccctgaacttgactgcacgttgcagaaccacaccccgctaacggccacaggaaaggaccccaatggtgaatggtataatgctttatgcagatttcataatgcacaggaataagaactgaaaggatgcagccctgaccaaggtagtttctttctttttttctttctttttaacttacctacaattcagaaaattcctccttactgcagggttcctagcctattccacacttagagtcaagtggaaaataaattaaaaaggaagaaaatgttttgttgttgatacttaacttgattggtacggggacatctacccaaatggtgagctagggtaggactccttcaaataaaaatgcacagtaattcttcttgcaggcaactttaggggtacacagctgaggcctgagggatagatacttgtctatttaacttgcaatgaagaaagaaacacttctttcaagaaagacgcttccatttaagaggaaggtattgaaaatgcttccgaggccaggtgtgattgctcatgcctctagtccctttgggggactaccaaaaatacaaaaattagccaggcatggctcgcatttgtagtcccagctcttcaagaggctgagatgggaggatcagctgagatgggggaggttggggctgcagtgagcagtgattgcgccactgcactctagcctgggtgacagagcgagactctgtctcaaaaaaaaaaaaaaaaagaaagaaagaaaagaaaagaaatgcttacgaaatgatatcaagcaaaaaaagagggcacaaaattatatgtatgtgatatttacttcattgtatacacattactgaagaaaattatggaagaatatataccaaaacgttaagagtggctgtctctgagtcataagtttacagatgattttaatttttcttcatatttttctacaaagtgcatgtattattattatttttactatatgtatttattatgtatggcaagaatgcatgaaataaatatgtatagtaaaagtttatttttattatatattttattatttttaatatatattttactatttaagtataactaattagatgaggacaaaagggcagacctgtggtgactccagttacccttcccgtaactacagaggtgcccagtcacctgcttggttatgtcaccctggggagtaaaagaatggtcttcctgctcctgcctgactcaccctatcctgccccagcccagtgccacagaaacatacttgccaagggacatcaatgaaagcagcagcgtggtgcacctcccaggggtcaggctgcacccttgtctcatgggcttctgcagcccctgtccccacctaagttactccttggggaaacatggccaagccccctggctgaatgggtggactgagctcccacagcatgacatcagctagggcgggctcccctctcagctgtcccctcccctttcctcccgcctgaaacatgatccagctgaaggactgattgcaggaaaacttggcagctccccaaccttggtggcccagggagtgtgaggctgcagcctcagaaggtgtgagcagtggccacgagaggcaggctggctgggacatgaggttggcagagggcaggcaagctggcccttggtgggcctcgtcctgagcactcggaggcactcctatgcttggaaagctcgctatgctgctgtgggtccagcaggcgctgctcgccttgctcctccccacactcctggcacagggagaaggtaagcagacttcgggaagcagcaggacttggctgaccatctgctgaggtggggcaggggatgcttcagtcctccgagggctgtggagaggagggtggggaacagtgcagctgcaggaaggtcagctatcttaccacctatgagcatgacagcatttgaggcatcatggttaagctagagagagttaggaatgttgagtcctggggtggggcaagagcggagcttgcaaagaagggagcagagaagtagcctggcgtatcagaaataaaaagacaggcaccaggagggggctcctctcctttttgtcctttccctaaactatttgaatgaaagctgcaagggaccttagaactcattgggtccacccttgcctgttataaatgggaatgctgtggcccagagagtggggagcggataattcattcaaggtcacacagcttgttagcagcagagtggggaccagaactagtctagtcctctttcctcagcttcactggttttgttgcatgagttcgttctctgggcctgcggttccccaagttcctttccaggactaaactccagtaacgcccaatttctctccacattcgctacacccatcttctcctgactcccttgaatgtagggtgttttagccacaaagggaccggcttccttttgctgcagaccatgttcattcccctctaggaggtttctctccctacagagctggggtggagcatactggggcacaattagaggaagccatccaggggttggacagacgtgaagagctctgggtaagatgtccttcctcccgggagcggtcgtttgggagtgctccgtgggttaagcaaacgcaagctgtaagtgatgactgtggtcgagggcttccttgactgagaagaaactctgtccctcctagcaatggtc

SEQ ID NO: 5509 - DNA, 6000 bp, Homo sapiens
tgctggggcatcaggtgccgtagggtacagggtagggacaggtgagcaaagccagatcatgggagggtttatccattagattgaggggattgccctgatctcctgtgcaatggagagctccctaagacttcagggcaggagtgtgtcattatcaagtttgtatttctgtaagaagcccctggctgctctatggagaaccaaatggagagagaaagaccagaggatgggggcccaatgaagatggtattgcagagatccaggttgttgctgacaaatgtctgtgcttggacagccggtggtggtggagagaaaggtgtggtatttaggaggcagcgctgtcaggatctggggacttattaaatgtgggggtgtgggaacagagaaatctagggtaactctcagccttgtggcttgggtgactggtggattgtggtgttacctactaagaagaggaagtaggaggaggagcaggtggcgggcttggtggagactacgccttctttttaggacaaggtgtttgtggcatgctgtgggatccccaggtagagatgtcaccaggcagatgtgcggtcataagtctgggcttgagctgtagatgtcaatgccacagcatgcaggtggaggagaatataccatgggcaggggagaaaccccccatggagggtaatggtcgtggaaagagcaacctggtgctctaacttcaggataagttcttttttcgcccctgaattattaaaatattttctgttaataaaggatgcattattaggtcctaagactagatttatctgaatgttaagctgaaaagaagaccccaaatgtctttgtgttttttggtgaagaatctgaaagcttcatctttctgctctgtagcagttaagatagaaaagctagtggagtgagagacctggttagccttggctctacctccagacagttatgcgaccttcagctagtcatgtatcttttcttgggcacagcttcctcatctgtaatagagcttgttctgcggtttaactatgataaagactgtgcaaagatttttgcaagccactgagccttacagacatgcaacatggtggctcttttcattcttgtaagatttaagaggaaattatttctcatcactgtgtctagggggtcacagagctgaggcccaagagcagcccaggacctgagccactgtcatgcttaaatgtagtctcggctgggtgcagtggctcacgcctgtaatcccagcactttgggaggccgaggcgggtggatcacctgaggtcaggagttcgagaccagcctggtcatcatggtgaagtcccatctccactaaaaaattagccaggcttggtggtgggcatctgtaatcccagctacctgggaggctgaggcaggagaattgtttgaacctgggaggtggaggttgcagtgagccaagatcgcgccactgcactccagcctgagcgacagagcaagactctgtctcaaaaataaatgtagtctccaggatccaccagtctttggggccatgagcagcttcactcagttcctcaggcctgcacgaactgcgtgtagttctgtcatcaaataaaatttacacagggtaatctgacacctatttagcagtctgcttaataattatggtgcagcatgctgatcaggcataaatggaaggcatttgaggtaagtgattgtatttagtagtacttttatatagcctaactggattattacagtttttttctccttgttccactcaacaaatatttatccactcaacaaatatttattaaggccgtataatataccaggcactgttctaggccctggggatatagtccaaacaagattcctgtccttgccccacctctattgagcttaaattctagtagggagacagaaaatcactgaataatcaactttatccataataagtaagaatgtctagcttctcctaagactgtgtttgctttaatctatccctgcaccaacacccatgaattaaagaacaaagattctgggcctgatttgccaacagcggagttgccttcacccccatcctttactctttatcttcctctgtcttcctctagcaggtgattgcttgaggccttccattcattgaacaaatatgtgctgtgcacctattatgtataaatagaccctggggatgcaacaggaacctggacacagtccttgcccttaaggagcacatactgatcccaggcctagacgcataaaggcaacagcagaggcaggaaaagtgctgctctcagagccatgcctgggtgctgatggctcacagagagaggccccattctggccatggcaggggtgagcagaggggtgttctttgggcagaagggatgccctgtgcacaggaagtgacaaggctctgcgtgtggatgaaatgttgagtgtgttgggggaggcggagtgtccctgaacaagatttttttctgaggcataacacacataaggaaaagtgcacaccccataagtttacagctcagtgatctttcacaaagtgaacacacctctgcaagcaacactcagcgtgaaaaccagagaacatcaccagcactggggagtcccctcgtgtcccctgccattctctaccctaaccatgaaactggacttccaacagcacagagtggtttggtctatttttacactttatatagacagaattattctgtctctagaatgtgtaatcttttgtaatctttttacactttatatagacagaattattctgtctctagaatgtgtaatcttttgtaccagtctttttttttgctaaatcttatatttatgagattcatccttgctgttgcatgtggttgtcgattattcattttcatttctgtataacattccactgtgtgcatatataatgtatttctccatcgtgctgctggacatttgggtggtttccagtttggggaaacgaaaccaccagagtgctgctatagacattctagtgcatgtctttgctaatcatatacatgcatttctgcttgataaatacctaggaatagagttagtgggtcattaggctagatgtaaagctctagtataccagttttccaaagtacttatttcagtttacacacctactaccactgcataagagttccaatttgtccacatccttgctaacacttaatgttgtctttttttaaaatcattatagtgagtgtacagtagtttaaaatttcattttcctgatgcttaatgaggctgaacaccttttcagatgtttgtaagccatttggatatcttctttagtaaagtgtctgttcaagcctttgcccattttcctattggattgtctgtctaggggttggaggacgaaactttttttttttttttttttttttttttttttttttttttgagacggagtctcgctctgtcccccaggctgcagtgcagtggcacgatctcggctcactgcaagctccacctccccggttcacgccattctcctgcctcagcctcccgagcagctgggactataggcgcctgccaccacacctggctaattttttgtatttttagtagagatggggtttcaccctgttagccaggatggtcttgatcttctgacttcgtgatccacctgccttggcctcccaaagtgctgggattacaggcgtgagtctgtattaaaattaaacattttaatactactctcccaatccaggcacctgggattagcatatccaggtgctcatcagccgcaccctcaccccagtgaagccagcagagctggctgtcggcagaatctgggtctcagtgggggccaaggcacgtgctgccttggggagaggcagctccctgcaaggttctggatttgacatcagaggcccacccacctcaggaaggaggagagggattggtagaggttgggggtggggctggttttcagcggtagtagagcagatgtggaaagcagctgataacctgggaggtgtgtgtctgctctccatatttgctaggaatggaccgctcccatctgggccagggaggacctgacatttatgtagcacctcatttaggccagaccctgagcatggtggcttctccgatgttaccttgattcttctttagttcaactccaccaggaggggttgttatagtacttttacatgtgaggacactgagccgagacacagaggggaccttgtgaaggccacacaactggcaagtggaagagctggcctgaacccagtttcctctcacacctctcctcagtgtgcagtgcctgtgctgcgtttggggaaatggagtaaccctcccaactctcccatcccttcctcttctgctcacccatggctccaattccttaagggcagatgagggttttgtttgtttgagacaaaggctcgctctgtcgtccaggctggagtgcaatggcgaatagcgcaacctcggctcactgcaacctctgcctcctgtgttcaagtctgtgacacagggtcccgagtagctggaattacaggcatgcgccaccatgcccacctaatttttgtatttttagtagagacggggttttgccatgttggccaggctggtctcaaactcctggcctcaagtgatccacccactttggcttcccaaagtgctgggattacaggcgtgagccactgtgcctggctgcgagcagatgaggttcttcatttctaatgacacgccatgaatcatccaaccacagttacagcaacctgccccatgtcggtcacagagctgaagttagaacctgagccttctttgagcccggcatgtaaggaggaaagacaaaggggcctctccggctcctgggtgtcactgggatggtggggcagctgcctagctggagcctgggactcacgtgcccccaaccccctctctcgcagagttatgtcatgcccaggccagcagggggctccatgaggattcatagaagatgccccgcgtctcggcgcctttggtgctgcttcctgcgtggctcgtgatggtcgcctgcagcccgcactccttgaggatcggtaagtgtggcccagcttggggcagtgcccccacccactatcccaggtgtccacaagggacatgagagtgctgcacaggacttggggaagctgcccagcccgtgcactgtgccctccctgagtgtggctggggtgaacatgcaggtggtggtggtggaggcagctgacaggtgaccactccgatctggtcaacctgctgagctccccggccactagaataaagatgctgataactccctagtgcagtcaatgtaggttcagcctagcaggttaagaggcagctgtcggggaaaaaggagggtgaggatggccatggggactccaaatctagggctggagatgggagaagaggtcccttctttcctgtgatcagtccaagaaggcttcctggagagagtgctatgtccacaacttggaagaagccaggagtctgctggcgtggcctggctgcttggaagggcccttgacattgggtctgcttgctgtggcctggctctgagagggagggcagggtcatgtgagtctctcccttgccttgttgctgtgggacgcccactttaggtgtgggcaggcgggcttccacctgagccctcagcatcccatccctggaggggcgggtctgggaagtcaggtgcctcctccctgctgggactgaacaagacttgtcaactgcaggttgaggctctctagatcctggttcctggggacacagccagccacagggacaaggacacagttcagtccggcaggcgcagtgtggtcatctgatggcccagcaacagagaacccatggaattaggacagatgtggggtgtcggggatcaggggtgtctatgtgtacatcgggggatggggattagtgtggacaggtgggtggggcacagcagtgacaaacccagaaaggtaggttgatggccacaagacgacccatccaacagcagggccccaagggtagagttaagtgacagcccta

SEQ ID NO: 5510 - DNA, 6000 bp, Homo sapiens
cctccaatcctagactgtgcaatacagtagctgccagccatagtgcctacttaaatgcaaattaattaaaatttaaaattccctttcctattcacagtagccacattacacctaggcagtagccacaatgccacattatacagacaagatatcaggcattttcttcattgcaaaagttctgttgggtggcactgcacaataatctcagctccacctaaactaaccacaaactgactaccagcctcaccacactctcagctccttgaaggcaagttctgtatttgtcttgtcatttttctctaagtgcagaacctaccccatatcctttctttcatttgacaaatatttattgatcatctcctatgtagcagatgctgtgcttagcactgctaaggggcacccagaggtgaacaagacaaacagggtccctgtcattgcagaggtcacaaagcacgtgctccataagtcttcactgaaatgaataaatgaatgaatcatacacagacaacccccagggaaatcttcacaatgattttcataattctccccaactcagaaattcttaatacttgctttcaatctgcagaagaaaatccagatgccacagcctgggatatgaggctcttctgagaggcagagatgcgtggttaatgtcttcgtttgttagggctgccataacaaaacatcactgacggggtggctcaagtagaaattgatttcccacagccctggaagttaggagtccaagatcaaggttgtcaacaaagttggtttctcctgaggcctctgctcggctgggagacagctgccttctcctagtgtcctcaaagtagttcctcttcttatgaggataccagtcagattggattaggactcaccctaatggtcttagtttaattaattcttttttttttttttttgagatggactcactctgttgcacaggctggagtgcagtggcacgatcttggctcactgcaacctccgcctcccaggttcaagggattctccttcctcagactcccgagtagctgggtctacagacatgcccagctaattttgtatttttagtagagacagagtttccccacgttggccagtctgatctgaaactcctgacctcaggtgatccacccacctcggcctcccaaagtatgagattatgggcatgagccaccacacccggccccttagtttaatttaatcacccctttaaaggccccatgtccaaatacagtcacattcggaagcactgggaatcagggcttcaacatctgaatttgggagagacaccgttcatctcataacaattagaaatatgatcttggaaactaacaaaactgggttctgctagcaggtctgaaattcctgccagtgtgaggggacttgacttgtctgagcctgttttctctccggagaaaggtgctaaagctacctccctcccgaggctgtcgagaaaattacaagcaattacttacgtgaagcatcgagcagagctcagcacatagtaggcactgcgttaattacagccactggcatcaccactttaccgcccagatcccccagcagcaacccttccctttcttgtggtccctgagcaccctgagccttgcctgcccaagccttgatttccagcccggctccttgactcctctccctctcatcacattcaaaccttagtcttccttccctaagtccttcagaccttccttctctgcgtagccttgccgtcagaagtcagtcccagctcctcttctccgagctgtgttagcattcctgtcaattccacaccagctcccaattaacacctaggaattaaaatcctatgctgttaatttgtctgctgacttccccccacccgcagacatgccaccttccctgttagatgtgagacatttgagatcaaagcccaccattataccttttggtctctctcatagcacctatcaaagtgtctcaaacatagtaggcctttatcaaccaagagagtgtgtggacataaaaatacatacagtcaacattcgctaactgagtaggtgtaggtgtaggggtgtgtgtgtgtgtttgtgtgtgtgtctgtttagcattttaaaagccatgggaaagagaaacaccaaactcaggtggctggttctctcctgagggaagaggaggtaatctcacatggatttggcagtgttggcaatgcctggttttgtttttttaaactgggtagcagctacagtattatgttaaatattgcaaaataatatgtccttactcgatagatatctgctgtttatggacgtatgaagaattctcctgacatgagaaaaaatgcttaaaatatttgttttagaagctatttagttaggatttcagagtataactcaacaaactcctttaattaatattttatctaaaaggaaatatttatgagacattaccaggctcctaatgcaaatataacttctataaataggagaaaaaaataattttctgcaagtcttatattctaaagagaacatctttaattgtgaacccatctcccgctcgatgaaagaaggtaagagaagcagataaagagaacagaagaagtgaggctgtactctaattaacagtgataatacatacacattttctgttgctttcaagcaccgcctcagcaattttcagacaatgaaagacatacttagcaccttgtaccgctccctgagtagttcttttattgcattgctatcctcagatgttgtctgtgctctttgagaggcttgggcctctcaaagctcctccaagttgcaacaattgctcaggactagaatccccaaatttcgcgtttttcagttctcaggtgagacctggacacaaatttttctgtctcccgatccaaggtcccatcactgagaaaatctttgcaaaacagtatttcccagagcaccctatattttgctttaaagtcagtccaggtcccctgacccccaccccgtaatggcaaaaggaatatcatggtctttatacctaatccaaaagcaactgctgccccaggacagagcccctcctcagggctcagcagatgattatagtgtgtgttatctggacctgagaactgcacagccaaagcctctcccaagaactaggcaattagggaattaagaactttctccacaatagtgttaagccctgaggtcaaacaacatatggtgcagtgcgtgagcacctaggcaagctgagtcccctaaggggacacagagctttcctgttagggcctgttgcagccacatttaacaatcaccccctctacagagagaagaggggcaatcaggaggcccactctggccggaccgctctgtgctctgtcccaggggagggtgcctgggcaacgggctgtgtgtacgctggtctccgaggcaagaggacccccaggccactgttagagactaagtttccctgtcactgtccttacaggagaggatggacttggtgccctccagtattagtgacaagcatttttctcattgcaacgtaataaaccagttttctggtcgtagacatcattcacctagcacttgtgctaggtgctagggcaccccacgtttgaccagctgtgtctgccctgagagagggggctggcagggggggtgttgaccccaaaaggctgggtaacggagaggggccagaaggaacaccaccgggtgagaagggccaccccgaacagaccggtcctcagaggcacctgccggccctccccagacagcagccctccctttcagcctgccctggcagctgcctttcctacggcttccacgaattaaagaacacactctggtcatcatctgtcctcaaggcaggtaggaatccaaaagggagagccgggaggtggcgcggaggacgccggctctgcccacgcctgggcaaggttgagctccgttccctccgggctgctcccgcctcctgtccgtgcagggcgcgtttccagccatcgccgcccagccgccgccgcacgccggggagagatcgtccggggtgagcagcgagcccggggacagctagcctgggtcctgtccctggacctactccccctgcagctggcggatcaggcccccggaccctcactccacggcgggaatcagagccgtcgggcgggggatgcagcgcccagactgtggctcccccgccttcccaaaggaatccccccatctgctccatccctctcgggaaacggcgaaatgctgccaaccgtccgcttagcgcaccgcggagcgactgagcagccccgccgaggctccgagccaagatttctgccctaatagtttctcccttctttctgtctgctccaccgcacccactaaatacgcggcgctcacacacggacacgcgtgacacgcggcgctcacacacaggcatgggacgctcacacgcgcgcgcgcgggtctccgtccctggcaccccgcagcaggggtgcagccgggggcagggggagccgggggagggcgcagggggccgcggggacgcgagcggagggctggatgcctgccgggctctctctccgccttcctcttccctcccagtcctgccgagctgacggcgtcccggatcacatggagcccccgccccaccccagcccgccccccgccgccaacgccggtggcccttccagtcgcgttactacccagagattcatttgtaccagggacggagggagagaggagagggaggaggggacacacacacacacacacacacacacacacacacacacacacacagagagagagagagagagagagagagagagagagattgttccagctgctctcgctagagaaagggagtgacccaaggggccgcgagtgaagggacaggatggcttaggtacctctgcccacaggaccccacaacagggagaggttccagctacagctcctccgtggggtcatggcaggggctggggagtcccctcaaaagccctgagcccccctgcaccgccgctaagggacaccccagaagttagcatcagtgggactcggaagctccgatctcaacaagtaagttgtcttcttttcctcctccatttctcccccagctcgcgggttctggagggcaggatgacaccctcaggtgtccatcacctgggcagcaggctttcacagggaacctgctagactgggagccaggggggataaggaaaagcttagggcaggtccaagtttaggaaattggagatctccgtggctgcaggctgccctgtgcgttgggagcccagccataaacaccttcacttctggcactagaccagggctacctgggggtgccccagatctcccagcagtggtttgagaggcaacagtggccaggagtgggtggggtgtggaggacatttttcacctggtaggactcttccttcaaatgggagcagggagggccaggatggggggcggtgcccccctcagccttagatccccagcctaatcttgctttctcttttaagtgtggccaaactggaaacacggccttgtgatttctgcccccctcgctgcccaagtcacttcctgcgtacctccctatctccttttaaagagctttcaaatggttcagaaaggccaggggtcaagcctgtgaggacagaggatagggaacagagaaggccggccttgtcattgctccccttctcttcaagtcagtgcttctccctgcagagctgttggccccctggttttatctgtgccttccctcaaacagggctctccaaccccaggggctgtggagggcctcaggtccggcccccaaagttctagggcctaccctgaacatcagggtgagcaacaccagcccaaaacctgttccaggagccttttcaaacaccagaagaagatcaacaggaacacgccaagtattttactctgtttcaatccttttaataagctgagattatcatcctcattctacaggtgaaaaattgaagcccagagaggctgtgcaatttgcctcaggtgcacagctcataaagggagattctctcct

SEQ ID NO: 5511 - DNA, 6000 bp, Homo sapiens
ttcaaggtaggtagaaaatatgtatttcgcatatgaaagctctgctaaaaactgattgtaaagaatactactgcatttggttgtggcaattcctgtcagagaatgggggctgttttacaaaacgttgtgaatgtttatctgtctccatagataacttttggagaaacatttctttttaattttttaatatttgtatttgaatatttatttctgtctctaaagatggtgaaaatctccctagttgaccccatgaataaatgctataatttacttaattggggactctcacatgacaggttagttctttgtgtttaaaactctctaataggaatttattttgtgctctaaatacattgtataccttacacaggataatatatagatttatgtcagtgtttgcttcatacgtttttaactatctgagtttatattgtgttgtcatccttctcattaatgagaaaaattaatctttctggaatgactctactggtttatttaaagtttgctgcgtgaaataaaattcatttcaagtttcaggccatctatctattatttttaaaactttcattttctgctgtgtaacttaatgaggaatgcctcattttgtacactttgatctgaaattttaagatgttaattgacaactcagaaacctcacatattacaggtatgtaagcatgttttcataaagcaatatcttctatgaatattacttaggggatattattgagcatttaacttacttgaatataaatttcttcttaccactgataacaaataccagctttcttgaaaaaaaaaagccataatattgtgataatgaaatcgtttttgtgattttaaagaaatagttcaggtactttatatactatagctagaaaatttgagtgattggtactttttaagtctcctgataatatgttcacttttattgtggacttttaatgttatgaggtctaaaatgttaatattaagttgactttttaataatttataagtccatgccaaattgtatgagtgtttttttggttttttatgtttgttcattctgtgtgtgtgtgtgtcagcatccaaactggggcttttgttctttttctctatttcatggatattattttgtcatttagattaaagatatgttggttttgccaggtgtggtggttcatgtctgtaatcccaacactttgggaggccgaggcaggcagatcacttgaggtcaggagtttgagaccagcctggccaacgtgacaaaaccctgtctgtactaaaaatacaaaaattagccgggaatggtggcatgcacctgtaattccagctgcttgggaggttgaggcacgagaattccttgaacctggtaggtggaggttacagtaggccactgcattccagcctgggtgacagagtgagacgctgtctcaaaaaaaaaaaagtattggttttatcacattaaatgtggggctgtatttatatctactatgttatatatatgtgtatttttttcaagtgaattatatagtattcatcctagttcttgctgtttttctgctgaaaaacagattgctaaggtataatactgcactatataatgaagaggtgacaagggagaaaataagccattattttataaaagctacatacatacagtgggaaaaattaataaaaatgaacagtgcatttttcattattgttgtttcattgtcagtaacaaatactcaaagctcttcttgatagctgtaacatcagtaactttttagtgctgtttttattcttttttttttttgaaatgggttctcactctgtcaggctggagcgcagtggcaccatctcaacttactgcaacctctgcttcctaggcttaagcaatcctccctcctcagcctctggagtacctaggactacaggcatgcaccgctaccaccacactcagctaattggagctctttttaggtagactgcagcagtatttagggttatttgagtgaaaaacattaaagtaaaatagaaaataaataccagtgaattgatttttttttaatgcaaagactatgaagtctgttaaatgagtttattttagcctcattcatggaaaatctgcccaaggaagaacttttagagacctcctgtcccatatgcttaggaacatataacttaggacacttaaaaagtatgatttgactttttaaaagtgttactttttgaattcatagtaaattaattggctgagaggttttaaaaagtaatagcaagtattaatgagaacttgccttcagttcaggagagattcaaaagtgcactgttatggaatagtttagtatccacgcatggaactattagaggacaataaggcacttaaactatggtaatgagttataaaataagagttcagagaaagaataattatcagcttgagtaggtgaaaatgagacttgaggtaatcctggatgattagagtattaggtagatggaggacatttctggcatggatcttcagattaccttgactggatctgaagttggagctctgtggatagtattattgttcccatgtggcaaatgaaaaaaaacgaaatgagtaaacttgcccaggaccatccaacttgtaaatagcagagctgggatttataaacaagtttctcattgttttctttttcaaattttacataatttattatggtatattttaaatacatgcaaaatagaacagatgtaatgaacccctggtattcatcacccagcttgaagttaccaactcatggctgattttgtttcatcatgcctctcctactctcattccttttttgaatattgtgtattttatttaggtatgtttgagtaaaagaaaacaagactaaacactggctgatgttaggggtttattattcttttaaataagaaatccagagataggcaatggcgggtgcatgtttagtggcttaaggatgttagggtcagaaatctcttattttcttggctttcctctcattatcacaaggtggatattgtagttccagatatcattttcactttctagacaagaaggaaaaaatggaaaagggcttcatttatatcaggaaattaaatttctcagaaatttccagcagatatctgcttataaaccagtcattggctagaatcatgtcatatggccatctctggatcagggagactgagaaatatggtttttaaattgggcacattgtcaccttgaacagttggggatttaaatctataaacgtaaggaaataagcatactttattgtttagtttttatagctaatctaaattttgtcttgttgaaattttgtgttttgttttgttctatttatgttttggaatagcctgactttttctcgtcttgtacttttgatttttttccccacttttccttgctggctaggataaaaataaattatttgatttataaaagtaacagcaacagttactatctaatgtgtatttaccattaaggtttgagagtttgagagcattgccttatggtttctgttctatctaaacaactttaggtactttaaaaaatcatttaattattatattttatttctgatcattttccttcttttttcaaaagattaaaaaattttaaaaattggcacataattgtgtatatttatggggtacctagtgatatgtgtatcatatagtgatcgtatcagagtaagtagcatgtccatcatctcaaatatttatctttttttgtgttgggaatattcagtaaaaggtgctttcttttttaaactttcttttgaatgtagatgtatatctcttttaaaaatttgtttacagttaaagaaactagtctgaacatggatggacttttagggtgcctatgatctctcagcaggtctatatgattgaatttgtttaaaatttactgaattggtttaaaattagtttaaaaattactgaatttgtttataagttgctcaacttgtttctgggtgagtagttgtatagttatatatagagttgcatagttatatacttgtatgatatccatatagaacagtttggtagcctgctgaagatgttaaagatcatttcagttgaaatgtatttggcctgaatttgtgacaacttctttttaaattatgaattagaggagcttttgctatttaaaaaagaaaaagaaaagcactttttctgtataagaaggttaaaatgtctagatagatgatacactaaaagctcttaaatatttgaattgggtggaatatgaccatataaaactcaggtctgcagtccactcaggttactaaagataaatgcatcatacattcagtatagactatgccgcaaggtttcattcccacatggaagtacgcatgctcgtttctcctgagactgcataaagtctgaacattccagtttcccttttaagtcacttcatagccctagcagcagtttagaaatgcaaaagtttggttgctttaaagaatagttcttgagtggattcttaattaagtacaataatattttctctttgattttaaagagctttactgcccagaatggatacacaataaaattttgaaaggaaaaagaaagttagctgtatcccagttttctaaaccctggcaagctggcagagctagaattagctttacagatggcatttggcaacatatctacatatctctaagccctcaactcctgcgttttgttatgcctgtctatcaattacaatatccaatcactgctcagagatggagaaatgggacgatcacagctcacacgatgctgttttgttagaaacgtcagtgctgcacaacccacggctgagtcagtgtctgtgagaaaataaactgaattaatatgtagagggggttgtatctctgaatatttaaagcctaaatattgcaacagcattattacacagtagagggaggaagctaaaggaagtctatggacaggtgaggtagggggagactggggaattttctgattgttcagaggaatcttgaagatgatggaaatatcagatgtgctaaagtttcctagtaatgcccaaggatgctgacctggctttcagtgcttcattgtttgaaagagcagagtccctttatactctgatttcaaaatttttttcttgtttttgtgtgtctaccttggcatatactaaaggaaggtgtgtattcatttattacatgatatctctgggttataattatttacatatatgaatttgaaagaaagattgagagggatatgtgtgacctttgtttcattatgatcatttacatgactaaagataaagatcatatgtctgattttcagtttaatggcaagttacttaaaataaatgaaatatgtttttattgttttcgtgggtttgatgctttgtgttttatttcaagtaacttgagaatgcattgtgtttggtactgttttttatgaatatcattaaaaatttatttaaggagagagtaattttgcaataatatttttgatttatttgaaaataaaattcaagataaatgaaataattgaaattttctaaagaaggaattgaatatatttttacatttgaatgaactaaggattaactgaaccatttatatatagtactttacagaactgaatgtacttaaatgataaagctctaattggttaaagtgactttctttcaagtcaaagaacccagaaactgaatagatgatctaactactgccactgaggttttggattagtgagtataaattttcaaccagacaaaatttctaaataaggataatggtttttcctgtgagattttaaatcttaacaggtgatattgctcactttattaggaaattttacaacaatttaaaacattttgactaatggtttttttccttctctctttattacccttatcctgctgatccttaatttttttggacatttgggatatacagcattttacatttactttgtttttaatgtatttatatggtttataacattctttccttgaagtgtcaggaagttcttttaatttcc

SEQ ID NO: 5512 - DNA, 6000 bp, Homo sapiens
gggacaggactggcctgttgtggccgtcatcagtgcacagcccctgggcttgcctggtcccagtaatcaagaaagaaccctgaagcaggcagttcagggcaaggggcctggagggcatgcagggagcctgggttgcaggatttggggtggggggttttgcccctgtgcttccctcagacctcccctctccttctccaggttccaaggcctgcccctgtcccaaggccttatatgttaggctggcgttacttctccataggaagtgggggaggggttgtggagggtctctgagccttgaagcctggaggtggggtagagttgggacttggagaggagagaagggtggtattagcagatggagagcttgtagtcacatccaccccaggaaagtgcagtccccacagtgacaggacattctggccacatgcctcatcctcctcctccaagccgcaggagggccaccctcagctgtggcccccaccgcgggtggtattcccaccatcctgacccgccccctcctgccctgcccagcatcgagtgcacaccatcctgagtgcagacctggtgatcgtcctgaagcggggtgccatccttgagttcgataagccagagaagctgctcagccggaaggacagcgtcttcgcctccttcgtccgtgcagacaagtgacctgccagagcccaagtgccatcccacattcggaccctgcccatacccctgcctgggttttctaactgtaaatcacttgtaaataaatagatttgattatttcctactagaggccctaagtctggtgggcaggggctggcggtggatggtgggttcagtagaaccagcctggctctgacatcaggcagaagctgtgtgagcaaaagcctgcttccttacctgtgaaatgaggcctctattagtcagccaggctgccacaacaacatatcacagactgggtggctttaaaacagacttttttctcacagttctggaggctgaagtctgggatcaaggtgttggcaggtttggtttctcctgaggcctctctccttggcttgcagagggctgccttctggctgtgtgctcacatgacctttactctgtgcacatgcatccctgctttctctctgtgtcttaaaaggacaccagtcatattggattagggccccacccctattacctcattaaaccttaattatctcctcacaggccctgtttccaaatacagttacattgtaggattaggcttcaacctgtgaatttggcaggacacaattatgtccatagcaagggtgatagcatttctgcaatgagcttatcagataaggtaacagatctccatacagcttggtctcctttcttctcactttcattcttgaattaaaatctggattaacactatttcaattgcaaatgacaggaacccaattcaaagtaacctaagcagaaactgaatttattgaatatgtgactgacaaggctaagaggtatactacttcaagcatggctggacccaggtgtttgacatccatctgggatgtgtcttcctttctgggttccattttcctcccctttcattatgacagatggccactagcaggtccagcttacatcctgccccaaggcaacccaagaggcaaaacagatactccttcccaatagttccagcaaaagcttgggagcaaatctcaatgcaccaacttggatcacattcccatccccaccccactgtgatcagaggggtggcatacactggctggctaggcctggatcatgtctccatctccatccctcaagcaggggcattcagaagtggaaaggtggtccttcagagggaaagcacagtgcatgagtcacaggtcagccaggtggtgtctgggagacgctggagcccagacaccagggagactaaaacagcagctgtcctgacttcctctgcatcacgaaacaagagtgcacacctgcccttggccaagaaatggcaggtgctcatttacatctcattttatgatcatttgcatatcatctgcagtactggctgcaccaagccctgaggtgcagacctaagagtcttgaacctgcatcctcttggctgcaaggggatcatagaggcacaacataagaaaagcccaccagttatcggaggcaggtccagtgcagacccctgtggatgttccaggagccagagaagctcggaaaggaagagctctgtaaagcctggcagcctgcctggaaaagacaaaatttgagttaaatattgtgggggatagggattggttaggcagaaagtcagagaaagggttggggtggcaggtagggacagcaggagctaaggagtgatggtggaagtgtgttaagagtgttggttgatcagggaggtgggagagagattacagcagtggggagggcatcatatcagagagccctgaatgccagagcaaggagtgtgggctatgcccatggacaaaaagggagaagggttttgagcaagaaagcgacttgacaagttcagtatttggtggagatgactataagcaagtgcaggatggagcaaaaggggaggctgagcctttcaggtgggagactcagcctctcagaagggtgagcagcagggagggaggtaaggcctcaaggctgcaccaggaggcagaacccagcctttccagctctgagatttccccaggggcccagcagcttcctccactgtgagatctcccaagagcagagccggggaactgaaagaggactccacaagcctaccactgctccaaagccaccccacctcaacagattgaagggaagtagcaggggcagggctgggcccacagtgaggtgttgcagggatgcccaaggtcatcctggcccaaaatccctgtataacatccctcatggcccaccgacttgatttgggtaccccacagatgtggctcatctctggttattgttattagaactgactcttgcatatgtgaaaccaaagcctgcctctgttccacttagtgtcctggttctaccctttgggccacaaaaaactactagttcatcctccttcaaggccaggtgtttctgcaatagtgcccaaatccctgggggactttccttttctgatggctggacagttgtagttgcctcagagatttccccatgtaaccctgtctccttgagcttcccactctgctcatctcattttaccctccccttcctagacactgcatctttgttaatatagcccatgatcacacccatcctttgtagcggtgttcgctctgcctgcaggtgggtagggagagaaaggaaaatccaatataaaatgcatatcttgcccccactgtggcccacagccacactgccttttccagaccctgtctcaagcccccactccaacaaaatggccgcagatggtcaggggttcttccataaggatctgagccacagacagcggtaaagccgttactgttccaacaacagagatctagcaggctttccctcccagctgagaacccgggtccatgccacagggcagcctcaggctgatgcctgaacagaaacaccaccatgccgggaccaagagcctgggtcccccagtgcccgaggcagccctaacacactgttcaggcctaaataccacccatgacctaacgtggaagaagtcaggtgacaggtgtgagaaagtgtaaagcaagtggcctcggctcaaaccttctttaaagtagggccggaatggctgagaagatggagccgcccaggctgccccacagcagtagcaggtgttaaactgtgctcctttcctgccgaggccttttttttttttttttttttttttttttttaatgagagggagtctgagcttccatcagattgtcaaaggattcaagactaagattaagagcatcccccaaagagaagcagctgcaggttgagaagtcctcggaccgcctaatttccgccagccctgggattggtggcgccgcctctcagcgcctcctttcccggggaacctgcaaacctggcgcggccgagaggcggattactgacccaaatacggatggggatattgggggaggggagccagggcgacagggcggcggccccagactgggagggcgggtcacagatccctcccagccccccactttcgtagagcgtgggcaggaggaacctctgggttccgcggatcagaaaaactccaaaggccgggttgtgagtcccgggaggggaggtggagggcgggggcggggaggggcgcgggaggggcgggggcttgctccggccccgccccctgcgctccggtgcaggtcgggctccccctggcggtccccggccccgttcctctcctcgtgcgcccccctcccgccgtcctagacccctgcctagcccaggtcggtctccgcggacccacggacggacagacagacgggaggacggccagccgcgagcgcccgggcggcgggagggggcggggaggcgacggccgtggcgtgaggagcaggagcaggtgcagcggcggcggcgggcggggccgggacccggcgcggagcgggagccgcggcgcgggcgggcggcagggaccgggaggccgcgactcggagtcagccccgccgggtcgcgcgcaggtccggggagccgcggttgagccgggtggggtggtgactccagagaacgcaggatcccaaggagacagagaggacgagagctggagggggatccggaaagcggcgggggcgctccgggaggggtggagtaggacatagggggcgcacctggaggagagacggggcgggggtggccaggacctgagctggagcctgggagcccgaaggccagacaggtgaggcgggagacccggaggtgggggtgaggtccggttagtgggagagatccggaggtgttaagttctgagctgggctgggaaggcaggctgggcggggagaagggctcttagcgggaggcccaggggtggtcagctggtgggggaagctgggggaggacgcagggccaggtggagagccggcagggttgggggctccctaggcgccaggcaggtgggctcaagggtgaggctgttttttttgttttgttttttgtttttgagacggagtctcgctctgtcgcccaggctggagtgcagtggcgtgatcttggctcactgcaacctccgcctctcgggttcaagcgattctcctgcctcagcttcctgagtagctgggattacaggtgcgcaccaccatgcccggctaacttttgtatttttagtagagatggggtttcaccatgttggtcaggctggtctcgaactcctgacctagtgatctgccctcctcagcctcccaacgtactgggattacaggcgtgagccaccgcgcccggcctgaggctggtattaagaagtgaagtgggacccaggtggaggtaaggaagagtctggtggggagttatctcagaagtgaggccagcacaggctgagtgcagccccagggtgagaaggtgcccaccgagaggactctgcagtgaggccctaggccacgtccgaggggtgcctccgatgggggaagcccctccctgggggtcaccggagccatgctgtcccgcaagggcatcatccccgaggaatacgtgctgacacgcctggcagaggaccctgccaagcccaggtaccgtgcccgccagcggagggcccgctttgtgtccaagaaaggcaactgcaacgtggcccacaagaacatccgggagcagggccgcttcctgcaggacgtgttcaccacgctggtggacctcaagtggccacacacattgctcatcttcaccatgtccttcctgtgcagctggctgctcttcgccatggcctggtggctcatcgccttcgcccacggtgacctggcccccagcgagggcactgctgagccctgtgtcaccagcatccactccttctcgtctgccttccttttctccattgaggtccaagtgactattggctttggggggcgcatggtgactgaggagtgcccactg

SEQ ID NO: 5513 - DNA, 6000 bp, Homo sapiens
attgttgaagttcttagctatgaaaaatagtaatgataatgacaaacatctttgatttcttaaattaatggaaacatctctggtgtttctccatgttgtttttatctaaaatagttttctctgccatgttaaaaatgtgtctgttactcttagttttctaagctttttcttatttccttttaaaaaatgaagaatagatattttattaactttttggatccatggagatgatgattagtttttgaattttagattttttcttacaggatcttagtgttcacttaattttccataagtatattaattttccttgtagtatacgtggaaaattgaggtccaggttgtatttgaacatgtccagtgaaagaaaacaaaaacaaaaacaaaacaaaacaaaaaccagcaaaaacaagccaaaacaaaaaaccaaaagcagctcagtccattcttggtatgtcttcatttactaaacttgggtgacattgatgtataaatcaacaatcttttcaatcgtcttctaactatttatgaatcactcctttgttacccagttcttatttttcaatcgtgctgtcaaacatatcacacgatgctcttggtaaacagtttactaaaaatgtcccaataattccatcaaaagagatattaacataacttgttctctaagtgaaaccatattaatcacaagtgcttacaaaataaccatatgataatgttagaattttggacaacatctatgtcaagctcaaattagagcaaaaatgaaattagcaatctgtagattcttctatttgtttctgatggttaataacattttagctgcaagacagatactaaatgtaaagtattataacccctttattttaaaaattaagaaattgaggttcaaagatatagcagcacctgctcagattttactcaaactggagtttgcagggcactttcattcatagagaatcagcagcccctctgaagcttctgaagtgtttctgttttcacccggttgattctacatgtgataggagtcagggctcagggtttccatgctttaaaatatccagatgaaatcacgactaaacttttatctgtacttctggccaaccaaccccaaactgcattttccagagagactcctatgttagtggttttccatcagcaacagcaactcacaaactgcagctttgtgtaacttttgagcttcttgagttattaagcatttaatgttttctcaaccttttgcttctagtggcaatttcttttcctttccctttgggctccttgcctgagacttcctagagcagcggttcccaacccccaggctatggactgctatccatctgtggcctattaggatctgggccacacagcaggaggtgagcagtgggcaagccagcgaagcttcacctgtatttagtatttacagctttttcccatcacttgcgttaccgcctgagctttgcctcctgtgagatcagcggaggcatgagattctcctaggagcatgaaccctattgtgaactgtgcatgtgagcaatctaggttgtgtgctccttgtaagaatctaatgcctgatgatctgtcactgtctcccatcacccccagatgggaccatctagttgcaggaaaacaagctcagggatcctatcaagtctacattatggtaagttgtataattatttcattatatataaaacaatgtaattataatagaaataaagtgcacaataaatttaatgtacttaaatagtctccaaaccatccatcccaccccacaggtccgtggaaaaattgtcttccacgaaactagtccctggtgccaaaaaagttggggaccactgttctagaggacaaccatttttctttactcatttttctcctatcagcttttcaaaacactgtgttatatatatattatatgtataatatatatacacattatatatattacacacatgtatatatgtaaaatatctgtttttgtaaaatcaaactaataatcaaacagtgcagatatatataatgaggcaaaggtcctctctcattaacatctcttcctctgcccacagagacacataactcaccttcatcctcacatctcagaattaatgactgagtgtttttttatttcaatagcatgaacatactacataaacatacataacctataattgcatagcaatttccaactctgtgagaactatcagtcctgtgctcacccaacaattttttaactttaaaaactattgtttctttgttcactcagctttcttcatgactccagatctactcaatacttccatagttgattcaaaaattatattatttaatcgtattttgtctttttaaaaattggtttcaccatgtttttaatgtaaagtgataaaactgcatagataactatataatgtgggaagttagagattgaggcgtaattgtataccagcttactgatgaaaaaactgaggcagagagagatttaatgacctctctgaaatcatgtaacttcagttagggaagtggccgaaataaaaatccaggctttgagacttctgatctaatgattccacttcatcatgtcataagctctttcagaatcttctaacatttgtacaccaccttattccttctgggtactcaataaatgactgggcttgttgttctagtactcacaataattcaaaaaaaaaaaaaaaaacagaggaaaacatgtcttaccacatgataaattgatgtcagaataagtttactgtagtaattttttcagtgtgaaggttgttacctgtgaatgaaaaacagtgtaacaacagcaaaataaattctgtctcagtttttgttttttttctttttatgtgaaaggttaacacttcaactgacactacaaatgtttattaatttggctttaactcacagaatttgaattgggtagaaaacctttgaatattacttttcccatgaatgttttccccatacttggtgttgccaaagagattaccttggcactgtttaactaaacgtttattgattaattcattcaagcatcaaagctaatgaatacttacagatagcagttgccacaaacaaattttaggaagaatatcttattgctaggtatagtaactagaaaattataagaattttaaatcatggctccacatgttgaaagatcaaaaaggaaggctgttaaatcagaaagaacagacttcagaatgatgcaggttgtttgtttccccagggaaaatgttctttccagggccaagagcattttcttattttttctatattccttccatccatccatccatccatccgtccatccatccatccatccacccacccacccactcacccacccaagcatgcatgcatgcaccctacacacctgtgtcaaatacgaagctggatcctcaggacacagtggtttctgctctctctgagtttcagttctaaatttaaaggcaaactcagaagtttctaaatgtgtgagctcttttcccttctatcaaatcaattgcattttcccacacttccaacattcattttgttgtccacctgttcatgggaagcaaaggcacctttgcagacagatttcagtctggctttctttcatccaattgcaatgggcctctgatcttttcatggctggctgcttgccatgcatgtctcaacttaacgagcacctccttggaggggcctcttttaaccatctcatctgaagtagtcattcaccagctgccatcacatcaacctgttttattttcattgtagcatttgtccttgatattttttcatttgcttatttaattggtccccctttctgccacgaaagctctatgagggcagacaggtgcctcatctgcttctttgcctccgaattctgaaatgatttgaaacgcagttggcattcattaaatatttgttgacttaatgaatggattcttaattggctactactgcttaaaggtctacaaatactgattcatccttgttgacaagtttttacttctcacacgtatgcatattaatcagaatttaaaactaagtcttaaaaataaaacagcttggaaacgtgggaaacatctggcagagaaatcattcttgcattcgcagtgacggaaggaaaattttttctctgaagtaagcaggttgttggcctctttatcggtatcattggaaaatgcttgcctatttttgttggttttctcaggaactgggaacatctggcgtttggaacatagaacgttgttcatttttaaagcagagtcataataactttatgagttgagggtaagagagaaaatgaccaaagaaaatgaaggcagtctggagaaagaagaggctcgtgtcccttttaaggaacaggtttccttggctctttgagagtggttcttaaaggaagcttcctacgaagtccgcagttggtatccttactaaatgagccaactaaatagtggaggggaaaaaaagagtgcgtgcctggctcctcctagttcaggctcataccgcctcctgaaagttgtggctacaggacaggctttggctgctttctagaacgtcgctcggatccctttaaaggtggggatcttgacggagagtgcgggggatgaaggcgggagctgagggctggagagtctctgttgacatagtaactcttcagctccgtctcccttgctctccgctcttacgcttcgctaccaccagcggccccgcctgtgccctctctgcccgggcgccccagacgcatcctcgcggggtctcctcggcctgacctgctcaggtcaagatcctctttgcacccccttaagtggtgacttttccccgggccagtgggcgagccacttgcggcgggcgtctgcaccccctgcttcaccgtcgtcccctgggcaccggtctgcccaggtccagttcggccgctgacgcgaaccctccgcaccgggtccccgctggaactgcccactcggctcccccgggagcggggcccaggccagtcgggcgttcccgccatgagccagagcccggcgttcgggccccggaggggcagttctccccggggcgctgccggagccgctgcgcggcgcaacgagagccaggactatctgctcatggactcggagctgggagaagacggctgcccgcaagccccgctgccttgctacggctactacccctgcttgtgagtgccggcgacgcggggcggatcgggcgcgggctgcgcggagggaggttgtgcgctcgcaggagtggccgagtccgtccgcgcgcgtcctgaacccgcgtgtgtacctcctaggacggtgctgggaggtccgcgagagccagggctgggacctgagtgagtggaggggcgcgcggggagtgggggaggcggggttgtctaggtttgctcctcgtaggtacgcatggatatgtttgcccacgagagtgagaccgcatagtaacaccaccattgcaggtgattagatgggtggtcgatttctccagaccccttcatcctgcgctctacaagagacaggatcgctacgtaacaggcgggatctgaacagggggctgattcagatgtgcgcccgggtgactcttagcctatgtgggggagagatgactagaactccaagggttggagctgcctgggtgctgggtgcgcccggcggtctccacgcttggcttagcgtttcgggctgagcgctgaggtccttggaccgtgggacagccaaagttagaccaggacctctccccggtcctggggccttggagtgaagacagaaatagaaccaataggactctccaccggcggcgcgaaccttttcacccggggcgtctggggagacgagcctgttaggggctgggagactcacgggctatagaagtgagggcgtcgggtcgtttgtattgggctgtgggtaactgcaagcttttgtttatgaatctagggtatttttttttttagctgggtgggtggcgggaggggaggtagggagtaagcagagtggactccagaagaaaaga

SEQ ID NO: 5514 - DNA, 6000 bp, Homo sapiens
aaatgttggcatcactatccatttccttgtctcctcattctctgatggccgggttcctcttgtctctgttagacttgggttcatgttctgacctgtttgcagaccacctgcagtgtcctctgtaaaatgggcatctcacagcctgcctggctgaattgttgggaggctctaagcagctctttggaaccactgagaccctggaatagggtggaattgctgccaagtgtggagagtgggcaccaggctcagtgcaggtacaaacgtttaacagcttacccgacctgaggcctcaaggaggccagggacttggcaatctgtgctataaatgaagagaatggtgacacggccacatgctggccattcaagccatgtcagtggcatccggaaggtggtggagggaaggtaagagtaaccaggggtgggcttgctccgcgaggtcttcccggaggtggcgagcctctcccagaggtgagagggagtttggttactgggaggagaaaaccaagaaaagctggagaggaatgggctctgttgtggttcaagcctggatgtgagttctgagaacagtcaagaatgcatttctctccaaggcattcactgtgggggaggtgggtcaaatgggtttgcccttgtcaccagctggtgaccttgactctcagagtacattgccctttggcagttctcagaacctctgtgcaccatggctcaggccttcttgaagccaacacttaaggaatggaccctctggggcccacctccttccagccctgccttataagaccccagggacctggcacctgcaaccatagcaggaggcaggagccagcgttcctcaggattcaggacctctgagtgggacaaatggggcttgggaactgccactttccctgcccagtggccatacgggttatgcagctgaggactgacttgggcctggggtcatggctttctaggtgcttctggcttctgcttcattggagcccctttccagctgcaagccaacaccaggaggaactgatctggggacctggagttcaaggctgtaaactcccacaaaggccagagctggcggagctggagaaccccattctgggaagctggtggtgagggcctctgcctttgatcaccaggaaaacagaggtcagctggattccagcctatttcctccctgccccaccaacccagcaacgaccaccccaaatgactgccctgagacttaggagtcaggagacaaaagggaggcctgcctaggggagacaggggagatggaggcctcgccactgagggcacggtcccatcagctgtgacagtgctgacgcatccaggagtgggcactgcctctacctcccaacatctcccagagctctgggtcttgcagagaacaggagagcacagctggatgctcctttgtctccatcctggaaccattagacaaaggaggtttcttggttttgtgtggagaagaaagggaggctggagatgcagggtgagttgtggccagcaggatcataccagggcagggtgctcccagaggcctgctttagagatcaccgcaactggggactgagccaagggaagggattgctgtgagtgttcttgtctcctggggggctcagttcggagtaaggaaaacacagccatcagtttttaggaccttctctggccaaacgcttgacctaccttgcctctgttcccacaacaatactgcaaggtaggtgttattaccctattttacaggtgggaggagacccagaggggtgcccttgcccagggtcaggcagtcctcagcaaagtctcaggatgaaaggggatttatgcatgggtgtgtctggccctcagggtgccttgcgtggtgtctaggaggagagaccctcctgaactgagctgctctcaggaacatgggccacaggtggaagggccgcaacctctctgcaggagagcaggtgtctcagagaggggttccctgtccccagtgctagctaggacccatgacctgagctagctgggggaggacaggaaggaagtctgagaaggacttaaacatgagtgaagcgagaggggtgggacctgcttgacttaacaaatgcctgggcttcccccaaagaacaaacaggacaatttctgaaaattgctgctgggctggagaaggaaggggaggttaggggagtggggggatggggtgcaagaggagggagagagaaccccgagagggactctgggggagctgtcagcaaggtgagggttgctgcctctgtgagggcaaatcgggtcttgtgactcctcacagggcaggcgacagcatggaaggaggctgcctgaggcaagtcctaggtctgcctgcagcatgggagaagtgatttcccctctatcctgtccccatctttgcctgatttttgcctgggactgattcattcatttaataaaactgggtcccacgatgcactgttccaggcatgggggaatgaacaaacaaacaaaaatccttgctctcctggtgcttacattttagttgggagagggacaaacaagataagggaaatacataccttagttaagaacaagtgccacagaggaaaagccaggctgaggcagtgggtgtgaacattttatacagggatgtccagaatcagggctttgaagaaagccctgaaggcagcgtgtaccgagcaggaagccctgtggaggctgagcatttaggaagcgggaacagccggtgcggaggtcctggagggtgaggggtgtcaagaaggccagcatggctggagcagaaagcagggcggggaggtgggggaccagctcacaggtgcctagagccagaatgagaagggcttcttggctgggtgcggtggctcgcgcctgtaatcccagcagttcgggaggccaaggcgggcggatcacctaaggtcaggagtttgagaccagccaacatggcgaaacccggtctctactaaaaatacaaaaatacaaaaattactgggtgtggtggcggctcctgtaatcccagctgcttgggaggcttagtcagaataatcgcttgaacccaggaggcagaggttgcagtgaactgagatcgcgccattgcactccagcctgggcaacaagagcaaaactccatctcaaaaaaaaaaaggggcttcttttttggacacacaaagattttgcgtatcatccgagccctctctgaggattttgagcaggagagggagcaacttttaaagggaggggttgggatgggatggctttggtgtcctttctggttggaccatcaatcacaccgggctctgagatagagatgccttccttcacaacactggtggcgggcagggaacagagtgtgtatactggcggtgtgggtgggggggatttggctgagagctccacttttctggaccacttagaatatgtttggaccaggtacctctaagtctcacccagtcccgaggtttgtaaacttctctaaccccagcttggggaatttccactcagccgctctgggctgagtgggcaggtttccacttgggagcatgggacaggcccgcctgccagccgagctgttatccaccccaggacaggtctggccctgcctccagggtggtctggagggaaaggtgcagagagcctggagtcagggctgtgctcaggggccccagcgccgatctcagcccatcctgataacaaatagcacctcttagacctcctggtctctatttcagccctgagagggctccctgggacgtcatgagtcctcccctcaggacagggagtgttgcaaaggagggacagagaggcgggagtcagagtgaccagagcccgggtcagaggctggggccagagccagcccctcctaactctgcttctcagtgtccacgttggggtggccgtgccagggcggctacaggaacctgacggagaccctgtggtcccaagtcagccacacagagactgctcactgtggctttgctgtgggcaaggccttggtggccgaggaacagagactgcctgggcagtgtagtgggctgccctgcatggtaggacaccctgcctagtggcctgccccgcctggtggggctccctgtggctccctgctggcttctggctctgaccatgccctgggcctagcagtgttgtcttctggccattcccctctgataccaaccagcagcccccagaggactcattaggctgctggtgtctccagctgagccctctgaggtgtggcaggcaggcctgacatcacagcctgggtgagtcactgtgggctgggtgagtcactgcgggctgagtgaggggtcccagctgaggaaagggcaggccacaggagcggcccccatcacagctccggctcccagccccgcagctgctccccatctctctgccaactgccagaacgacacaggaagctggggccggtgcctcaggtgccacgacagggtcctggaaaccattcccacccctctgagaggctgcagctgtgcctcccagtctcaggggatgcctagctacagaccggggtcttgggcaggatacctccggccaacggcccagctggactggagggcagaggtgcagcggagtaaagctcaggggacccacacatgcccctaaaggtctccctcacatgccaccagcccaggggcctggggaagagtgggctccttgattcctcccggctcctgtacccttttcgggcaccctgggctggctgcagtgtggagcccctcgagggagagggccagggcgggggctgtggttggctctgctgcatctgacagcttgcccatcctcaagtgccaggtggaggtcagaaaatctcccctggctttcacgtgcatcccttgccccaacccgccccagcaagtgggcacgaggtaagggctcctttgccagcccctcctccctccctgtgtctcttcctgtttgtgggctcacctgaagtgtgaagagggggagtgccactctccatccaggccccaggcaagcagcacctccctgctctcctgcactcctggacacaaccagcagctcctgccatggacaggtggtacctgggtgagtcctctgagccccattcctcctccctgctcaggctctaacacaggtgccagccccgtccctttcaagtgcacccacaagctccccagaagtgcaggaaaagcagaaaggaagagaggcagaatttccaaaaaagagcatctccatacggagtcactggcctgctgtaacgtgtgtgcagagcatatctgagctgcgagggctgggaaggcagctgtccaactgcctcatttacttgtctgtccatccgtcccttagagatgcaggaactcagaagccaggctgctggcttgaaatcttggttcccctaccctctggccatctgacctctggcaagttatttaacttatctgggcctcagtttcttcctctatgaaatggggtgataataatgccttctttaccttctaaaactcattgtgatgactaaagaattaatttctggccaggcatggtggctcacgcctgtaattccagcactttgggaggccaaggcgggcggattatctgaggtcaggagttcgagaccagcctgaccaacatggtgaaaccccgtctctactaaaaatacaaaactagccaggcttggtggcacatgcctttaatcccagctactcaggaggctgagacaggagagtcacttgaacccgggaggcggaggttgcagtgagtcgagatcgcaccattgcactccagcctgggtgacaagagcgaaactccgtcttaaaaaaaagaattaatttctgtaaagtgcttgaaacggtgccttgcacacagagtttaaaaatgtagccatcaactagctttccctattgcttcctattcatctatctattgatcgatctatcatccatatctatctatctatctatctatctatctatctatctatctatctatctatctctctatttatctatctatccatccatctgttggtgcctcccc

SEQ ID NO: 5515 - DNA, 6000 bp, Homo sapiens
acataggcatgtaagacttgtggaagccacggaatggaattggttctcaccagtgggcttgtaaagtggttttgttgtgttatagttacacttatttcctgtgctcttagggtcttcagtggtcagtgccctccagtcagaaagcaccagtagtaccctgtatttgagcaagttggactttttgcagctatggagaactgcaccataaacaatcatggggcgtctcactgagagggttttggaaaggacttgcataggatctgggcatgtttcaggtgatgcggcgggggaggcttaaggaagcaatgctttgctctggattaggggctgttagggagtagtgatgattctatgatcaaatatgttgataattcttattatctaggtgagaagactgacatgagactaaagctgttctggggaaagaaacagcagacactcatcaggatggggggatattcggccattttgtggcttggacaatgtttgtgttttgttggtgttcagacatgattacagagtggccttgttttatcccaatccatcatgatctgagtggcctggtctgaggctgatgatttgtgagattgcttgtgtttaacaggagcaagacccagcctcatgtgccaggagaaccaagacctcgccggtagtacgaggtcaccttccagtggcctgcttttccacagatccaatcctagttaatcctaatcctagggtgagagaagaacagcatcaagcctcggtaccgtcgctctgttcagccttgccaaggataattctctccctctatcctgttcccacctctccaagacaagtcttttgccctgattatagagaaaacctttataaaacatgtttgtattttccagatcttctgttgcgcactgggaggatgggctctgaagctagcatagttgatagaccagatatgttgtcagaaccttcatcactctcacggaagccttttcctccattggctgtagtctccaatatggcccatttcgctccaggaggtagaccccgattggcctggaccagtgacccctgattaaactgccatgctagtttgaaatttgggaaccagttataataattgtagctatttattgcataattactattttctaggaactttacctatgctattgcatttaaatcatacaacaatgtttgagagtatattatagccatttcacaggtgaggaaactcacctgtatcagcaaaggtcagtggtttgcttagctcacctgactcttgggtggcagagatagggttcaaatcaatgtctgtgctaacccgagctagaagcccgtcgactctgccatgctgcccctagctgttacctcttctgggaacattactggccaggatctcctatcttctcctgatcccctgtgcacaaaaggacaagttattcagaaagtgatactctggatggctggcccagagacgcctacagaacacagtgtgcctcctgagagtaccaacaccatcagaccttgtgatgcttcagccctttttccccaagctctcttctctggaaggagggaggcacctaggaaggcccttgctgtacacacaccctggatacagacacactctggttcatagcagtggggacccaggagtatgctcaccctacaaaaaagtagggtattcctgaagtgcattcccaagtctagcctggaagagtcctgaagctcagatgccctcttctatgcccatgaggccaggaaagatggtttctaccagccttgccaagttctatctaaaaagagcccatgctgttcccatgtgagctgcctgatagtggtaaagacatcagagataacttctctggcattaccgaacagaagggaaatgccactctctgtctactacaggttctggatgtgataagtgtagtctgtggagctagatggtttactgcttctcggggctctgaacctttgcagatccagcagggtggtgatcctccaatagcttgagatgattttcatagaaaacaggaagtcctccacagcagcagttagatgcacttgttttccttccttagcaaagctgagtaagaatacaagcccaacacccacccaaccttctgggtctcctctttgggactgccttaacatcgtgtcctcaatcatttcaaggcagcaaacctgccacattacaattcttgaattacttattcgtgaacaacttgagagcagggactgttaccttgcattgtttcctagcatagcacctggtatatagtagatgctcaataaataatgtgtttgtttaattatattgattaagaaggaaggggctctgccccataatcccattcaatcattgcaatggaaaatcctcaagaaatgtttccagattcaatcgactgttgacaaagcagtaattttttcatagaaacgaatttcttctccatcacggttagaaagggactagagaaaatcatctgacttctcctctcaggccacatagctcatatttcctacctctaatctgaaatcctgactctcagaaatgtcctaaagttacctaaggatgtgcatgagctatgagaggtttggctgaaaggcagactgcaataagtgttttttttttttccatttctatagaggaacaatagacttttaattctaaatcagaagcggtaacagccatgcctattttccctttcccctctttgacatagtggctgtttgactgctgagcaggctggggtggtaagtgctgtaagaaatcccaaattctgaatgaattgttctcaagtggatgtctgtggaagaagagcttctgcacctgggttcatcagattcagtaaggaccacaaactgttggtccctcccttaaaatgagcacatgctgattaaagtagatgttgcataaaaatgaagcacatatttttatggagaaaaggaaattcaggaagaaaatatgtttgctttcaagaatttgaagggctgttaaatggaggagacttcagacttatttagaattttaatgagatttctctgaagcacaactagaacaatgttctttataacagtttctcctttcgttctatgaaaaaaacctgtcaaatggtacaccaagtgcagagtccgttggccctagcttgcctttgcagcccagtgtctcactgaggctttctatgctccattatttgcttacttggaacttctttcagctcccccatgttttctttccttggttgcccctgcctgggtcacacagaagactaccctgtagtgtggttagtagtgcacacacaagacatctccattagagtgggagccaccagatactatgtgatataagtgacagtaagctcattgattttatattctcattgattaatgtatttatcatcattcagcaaatatttatagagtttctactatatgtgactctaactcatcttcagggcttggcctcagggttacagttctgctcatcaaaataggtgctccccagagtgctcccactgtttcatatcctggcattcatcactggtcatttcatagattattgacacatttgcaccaccctctctgctgaaatgggagttgcatgataacaaggactgagtccattacttctctgatgtctagcacaatggtcagcacacacagtcaacattgggtatcaacatatcatcattgaatagtgattgataaataaattaatgtatacataaatgcaatgagttttctgccagttgaagtatgtttgcaaagaaagggtggatccccagctgatggggatctttttaaaaagttattctttttggcattataccaaccatgctcggttgtggttgatttccttagttcacttccccattagactatgaactccttgagaacaggaagagttctatttgtctttgaaatcctacagaacaagcatacaatcagtgtttgggaagtgcacaaaatgtctattttctgagaatggattgtttatagaacaagaatgctgaggcactaaagaaaaagtggcagtaatgtaatccgcttgttttgccaagccactaaaaataccttggtaaatattagctaatgtgcagccctttgcttgctattaagatttactgatttcaatagaaaggaacctaaaaactgagcatattatataacccagacaccagggacaatctctaatcacctaagagttcataaaatacatattggctctgtctgtggttagattaaatgccattatctaaaaaaagtaggatctgtgcaataataggtctgccatgtgaatgacagttttggttagtggatgaatttatcctgtatcattgcattctctaagaataatccctctcactctgaacaaataaatcaatagcattggctaacccagtgcatgtaaaaaacaccttcagtaaatgccaggttttcccgaataataaagacttccaacaataaagacttcttttaagtctgtttcttacataactgttgtatggagagattaacatggtatcttgtttcttcctggtgtgatcttacttttgtcttgtaaatatgtacttatgtctgtatgttcacctgcatctttgtgaacccttggaaaactcagtatttcagtgggtttcagagaataggccgggagattgatgataagtaagtgtttccggccagttgttattaggcacaacttttaggagaaacaagtgagcgatagagcgtggccaaggagaggaaggcaatgctggaacccaatccatgcctgctgcccagagaccttagctgatggcttgtcatgtcttagcatgttggtattcaagccatgtgatgttggaaagaaaaaatacctattcagcttggggcttggtctgagaacaaccaattgccttggtttaaatcacacgactccactatcaaattaagtgtttccaagtttacacaaattagcgtcagtccactgactgtcgcctacaataaattaggctgagtctaaaagaaatcagtctgcatagaaagaccaacaaccagcaccacttccttgctttttccagccatgaatgcttccagtcggaatgtgtttgacacgttggtaagtggaggctggggaaatcacctctctggaaagccaggcagataatgtttcatcattaatgcagtcatggaaactcaacgttattcaagtgatcaatcagggggtacttcttcactctacagaaatcttctttacctttaaaagtaaaatgaaattaagggaggctagaggagcagggtgctgggaaaaaaactcagaagttggtgtgttaggagccatctctggaattataatgtatgacaaagagaatgtggattcaattgataaatgttggttttagaatttactatttgagctgagagtcactctctggagagctgggtaaacagtgtgaccctgaatgcacctgggagagaggtcagtccacatgggtgtagaccagggtaaaggatgtgtgtacaaggaaaggagaagaccatttccttctctgtacctcacatgcaccatcccctaatcctcactggggacttgaggtcagtgagggcagtgtgggatgagaggagggccctcttgactatgtgcattgctgtttattctcttggcagcattttctttttttatgtctttagaacctgccctcaacatttcaaatcaccacagctgtggttttctcatcaccgcttcgacttggcgttggcttcttgtgttttcagctgggttaaggccttgaacaagacactgtgggatatcactattatttaaaatgtatcactcagttggtttcgcttcctagttcttacgaataaacacatttttcaagggggattttgaaatctattttaaaaacatatttgcatttaatgaaaaataccctgaagacattgcggaccagggtgggcacaccttgatattcttgggcatgggggaggaggtaatctagcgtttatgactttgggtttcaccactgtcaggtgtttatg

SEQ ID NO: 5516 - DNA, 6000 bp, Homo sapiens
agagacgggattttgccatgttggccaggctggtcttgaattcctgacctcccgtgattcacccgcctcagcctcccaaagtgctgggattacaggtaggagccaccacacctggcctggcctgtagttttattggctaagtctggtagccctagcatgggtggagaaggctgtagctgtggaagcccagccagtctgcatctgaggcagggaaaggcagctaaggcagcctgccgtcagcccattgacctgacagataggggccaatgtggcttactcctcatctagcctacccttgtgccgtcctctccaacatccatccacctgacagatggatgacccttcctcttccccaggggttgttttgatgagtagatgacatttctaaagagcgcttagtgcactgcctgacacctggtaagtggtcaagatggggagaactgattgtttctactattctttccctctcacagtggccaccgcagcgctaaacacggtcggtcggcattcagtgctcgccgtggaagcgaaccgcaggagcatcctggggcagcggggagttgctgcactcacctagacaggcggcctactgtgacttcaggcaagtcattttccttctctgtgcctcagtttctttgtctgcaaaatgagcagctggactagaaacttaccattctttcacagcacgtcaaactcaacatgcccatttgagctgaagacactgaggctactcactgggtgtgaacctttgacagcatccaggccctgcacagttgtctaggagaagcctgacccatgatgtcctttccgctacccacctgccacgagccccagttctgagctggaggggtgggggtgggtggaaggtggatagtggtcagtgcctcacctggccgactgcagcctggcagagtccatgggggacctcgcagcacagtggatcctcttgccttgtgtctctagttggtccagctctggtctattccatgctattccgttgtcatgggcaggactgggtttgatgaagttggacctaggtgtatcccagcctctcctggtttctgtcgtctttctgtggtgcccagggcttatgtttctatctctttgaatgttgagtttactccgtccttcagggatcagggctgcctgagctcagggtggaggtgctgttgtctgtctggcttccgggccctggactggcagtgtcccccagcacccctgtccagctatgccaagccccctccttttctttcttggcctctgccctatttgttctgtgactggcccaagagaggggtgtgggctggcaggtgtcccacataaagcctggaggcagcatccaggcctggctgacttaccccggggccccctgcctactgcccccagccaagctgggtctccttcttcctgcccagctgaggcagggcctagaagggcaccgaggcaggccctctgtgatgctcctgttgctatggtaattctagatgagaaggccatagcattctgtgtctggcacccccgcgcatctccccagctctgccctgctgccccaagagatggctctctgctggggagctcgagagcttggaatctgctgcagtcaaagtttcttccatgcggccaggcacagtggctcatgcctgcaatcctagcactttgggaggccgaggcgggtgaattacttgaggtcaggagttcaagaccaacctggccaacatggtgaaaccccatctctactaaaaatacaatacttagccggaaatcacttgaacccaggaggcagatgttgcagtgagccaagatcatgccactgcactccagcctgggtaacaaagcgagactccgtctcaaaaaaaaaaaaaaagtatctttcatgcaggccccatcctttggacctcccttcaaccccaagagagaccactaccctagcaggtaagactctacctctcagaaactgacctttactgtagagctgatagtgggaaagggctcaggatccaaaatcaaaagacctagatcctagtctcaagccatttatagctgtgtgaccttggacaaggcaggccttgagcttcagtgtcctcctttgtaaaatgtggataaacatgcgatactgaatcatccttcaggaatagctctatgactttccgtaggttgttcccctgatgtgtaatgctcttccattcttctcagctccatgaactcctactcatgcttcaagacccaaccgaaatgccccattgtctgtaaaaatttccctgacctctgtgcacttggcacagatcttaggccttgccattctgtgttagagttgttatttaagtgtttccaaattttttgactatgaatacgtacaggcaggaatcagattaggctcagttctggaaggagaaatggtttggcgaatattttctttgcggaacggaaagcagaagagggcgaccttgactgggttgggtgccatctctgcaggggtcaatcctgggactcttgttccaggcatggcttgggtcaatcagcactcatgactttgctgtgtgcctgagccgtgcctggctaactggggacattttcatagctgagacccagtaggagagaccatgacttgtgccagggtgtgcctgtctcagctctggggcagggccaggagcagctgctcatgggatgtctctggggacatgctggggcctctgggaggggaagggagactggccatgcactgtctatggtcctggtggtactcctgggatattgccaaggagcctgcggttcagggaacagggaggagggactctagtgtctccaactccctctcatggctctatggctgctggtcggggtcagggagatgaagcagtgccagctccgtggtctgcactgatcctgaccagtgaaccaggcttccccagccagagccagctagtcaagcacgctctctagtggccaccacagggaaggcaagaacttgtctccacaaaggcaggattttcatttattccttcagagagtacagaatgagcatcaatgttccaggcatggtgccaggcatgtgtgttaactttagttaaaacatacttattggccgagtgtggcggctcactcctgtaatcccaccactttgggaggcctaggtgggaggactgcttgaacttagagctcaataccagcctgggtaatgtagtgagaccctatctctataaaaaaaaaaaaaatagctgggtgtggtggtgtgcgtctgtagtcccagcgacttgggaggctgagatgggaggattgcttgagcctgggaagtggaggttgcaatgagccaaaatcacacccattgcactccagcctgggtgaccttgtctcaaaaatatagttatatatttacttatatatttatatgtataaatatatgtgtacatacaaatatatttgtaatattatagacatattaatacatatttacatatgttaatatataaatatatataatatatatttatcatcttctaaatggaaagctcttgagtttcaggatgtgttggttgggaagggaatacaggatagggaaataatccattaagcaatgactcagcacaggccataaaatcagaatcacctggagaacttgaacaatcccaacacctggggtccatccagaccaatcaaatcagaattcgtaggggtcaggcacaggcaccagtggtttggagagttgacggacacatgtcccatccatcattctcattcggctgccaaggtaggcatcgttgtcccattttgcatatgaggagactgaggctgaagtgaacctgcttctttccccatatcagttgaggacagcgatggggcagcggggaggcagtaaatactcctacaaggctgcctctaaagagagtcttataataacaacagctttattgtttgccatgattagaaaagtattcaaggtcattgcgaaatagtgtttttttttctaggcagataattatataaaggcaaaaatggtgtgtgggggtgggggacaaggggagggagagcattaggacaaatacctaatgcacgcaaggcttaaaacctagatgatgggttgacaggtgcagcaaaccaccatggcacacgtatacctatgtaacaaacctgcacatcatgtatacctatgtaacaaacctgtacattctgcacacgtatcccagaacttaaagtgaaaaaaaaagtggtgtgtagaaaaatcacctgcaatctcagcatagttaacgcttagtacatttcagagagagagggtgacaggaaagggaggatgagagtgggtttaagacacaaggtcatattataaaatcagggcttctggaagtttagtcccaaaaccacacatctcataatcccctgcagtgcttgattaaaatgcaacatccctaaggccacagactcagactctggagaaagatccagaaaactgcccgtttaataaacatttgggcgattcttacggcctctaaagaccaagaaccactgctgcctagagctctgctctcttcattgaacaatacaagaggagtgtgtaggtagacacccaccacttccaacagcttaggagagcccttgagtatggattgatgtattaaaatttattgaatcacatgctgagattttcaccagctgcccgtggggatctgggcatttattcccatattgcactggctggctggaagccagcagcataaactccagggctgttctgtcaacccccaccagactcacccccctccaccagccccggcaggcttctccttccatctctctgaagcaacttactgatgggccctgccagccaatcacagccagaataacgtatgatgtcaccagcagccaatcagagctcctcgtcagcatatgcagaattctgtcattttactagggtgatgaaattcccaagcaacaccatccttttcagataagggcactgaggctgagagaggagctgaaacctacccggggtcaccacacacaggtggcaaggctgggaccagaaaccaggactgttgactgcagcccggtattcattctttccatagcccacagggctgtcaaagaccccagggcctagtcagaggctcctccttcctggagagttcctggcacagaagttgaagctcagcacagccccctaacccccaactctctctgcaaggcctcaggggtcagaacactggtggagcagatcctttagcctctggattttagggccatggtagagggggtgttgccctaaattccagccctggtctcagcccaacaccctccaagaagaaattagaggggccatggccaggctgtgctagccgttgcttctgagcagattacaagaagggactaagacaaggactcctttgtggaggtcctggcttagggagtcaagtgacggcggctcagcactcacgtgggcagtgccagcctctaagagtgggcaggggcactggccacagagtcccagggagtcccaccagcctagtcgccagaccttctgtgggatcatcggacccacctggaaccccacctgtgagtacaaggtgccccaggtggactgggctggggctttgaggccttcagggttggatggccatcttgcgtatttgtgtgggatatgcacacacaggcagcacatgcgcaggtgtgtgggcacctgtgtgtctgtgcaaatgccctgaggtgggaatgagcttggtgtgcatcaggcacagccagccagtgtggctgcagcaaaacacacagggaaagaatggagggggcatcaatcactgcttcagtaaatttttattgagcgccttctacgagaacacaagaggagcttccattctgaggaggaaacaggcaggaaacaggcagatatcctgtataatttcaagtagtgataagtgctctctagaaatatcaagcaaggtgaggagacacagagcaccggtggcagtggggctctatttccaggttggatggttgggaacatcctttctaaag

SEQ ID NO: 5517 - DNA, 6000 bp, Homo sapiens
gccttgcgtaccaccctcttctccttctacttccgagatactccccgcgccaaccgcctggggcccttgcccttctggcttctctactgctgccccgtctgcctgcagttcttcaccttgacgcttatgaacctctactttgcccaggtaaccaactgtggtcccgggtggggggcgggaggtggcaagcctcaaggacccacaggagtgaagggcatctctgctcctaggtggtgttcaaggccaaggtgaagcgtcggccggagatgagccgaggcttgtaagtactcgggacactggtgggctcagcctccaggtcaggggcaggtgacagtcccatgtagatcccttcccacctctcagggctgagacaaaggcaacccagggaatgtctgtggaagatcttggaaaagttaaagcacctggcgcagatggctcagcagaggccttgcagatctgcaaggcacaggaataggaatgcttgtggtagtgtgagggagagggccccagtgtcatccaccatggagggcgagctggaggctccagcccatggaagcaccaaagccatatgcactcctgggtgacctggggccgcaatgccctcgtcatttgtacagtgtcttacggtttataaagagctttcccagccatcttttatttgtacaatttccctgagaggctactatcctcccttgagagatgaagaaactgaggcccagccaggtaagacagcaggatcaaggtcgcagagctggggctcagacagagacttctgactccagttggtgcaccttccgaagtaccatggctgtcagtcaccttctgacctttttgggcctcagtttctccatctgtaagagtggaggaacagggctcagactggatgccctgagttttgtcgacattggggtttcctgcaggaggtggggcaggtggtgagtgctgagggctgttgagggcccgcgctgactgtgctgtggctgcaggctcgctgtccgaggggcctttgtgggggcctcgctgctctttctgctggtgaacgtgctgtgtgctgtgctctcccatcggcgccgggcacagccctgggccctgctgcttgtccgcgtcctggtgagcgactccctgttcgtcatctgcgcgctgtctcttgctgcctgcctctgcctcgtcgccaggcgggcgccctccactagcatctacctggaggccaaggtagggctgcagcactgatgcccaggtgtcttttgggtctctcggcagcggttctcagggtgtagaggaagctgggagccttctctccctgagggtcctctgttgttacctgtgccaggggaccagtgtgtgccaggcggccgcgatgggtggcgccatggtcctgctctatgccagccgggcctgctacaacctgacagcactggccttggccccccagagccggctggacaccttcgattacgactggtacaatgtgtctgaccaggtgggcatacgcatgtctgccacctccttagtagccgtggcaccttggccccagctggcctgggccctgtcccactacccctttggcgtgactgcagactggcaccagcccctgccttcccacaggcggacctggtgaatgacctggggaacaaaggctacctggtatttggcctcatcctcttcgtgtgggagctactgcccaccaccctgctggtgggcttcttccgggtgcaccggcccccacaggacctggtaagggtctgctccctcttctgtggggccagtggagggggcggatgttgcaaatcctgggttggagtctggggttgggcctgggaggccagtgcaggacaggagtaagtatcgatgatggcttcctcccccagagcaccagccacatcctcaatgggcaggtctttgcctctcggtcctacttctttgaccgggctgggcactgtgaagatgagggctgctcctgggagcacagccggggtgagagcaccaggtaggagccgtggcactgcctcagtacccctgccctacccgcccaccccgctggctccatcaagctatgggggaccgagatagccgggtcttgccttccacccctgccatggcctttgcttccccatctgtactaggtgaggtcccctgggttcctattgctaaagcctccacctcttgcctagagatgtactttgtcctgggccccgaaggtctaggtcacaggggttctgttctaagcctgtcttcctcctgcagctcttgtgactgtggccctggtcactgtcctgagactgaccctgtttctctgctgcagtatgtcgggcagtctaggctctgggagctggtatggtgccatcgggcgtgagccgggctggtatgggggcagccagacgaagaccactcctctgctcttctcccaggtgccaggaccaggcggccaccaccacagtctctactccaccccacagacgtgatccccctccctcccccacagaatacccaggccccagtccccctcaccctaggcccctgtgccaagtttgtctgccgcttcttgcccaggatcctgggggtcgtggctaccccctcctctggccggctccttgctgctcctgtcatagtgagcttgtgccgtccccctaggatggggggcatggccctggctgccagatgcccacagcaccctggcatgacctgccacctctgcttccacaccggagccagctacctctcctgtgcctgccactcaataaacagtgtctgcgccccacagttgtgcacctgtctgtcatctgccttgtgttcctatcacttttgcctgtttggcctaaggctgaacagacactagcccttgaagtgggctgctaggctgggcaggggtgacttaccccatcaaggctggtgggctgggagaggaggggcctgcagtttgcaagggaaggagaccacacaggcctttgttctcaaagctctcctggcccagaattgccccactacctccagatccctctccacttgaacagttgctactctttcctcaagacctgcgtcaactgttacctcctttaggaagccttctgtctcctggtcaagggacatggcccctctgctgggccccacagctccacattactgattatgtggccattgaggttctttgttttgttttgttttttgaagcagggtctcactctgtcactcagactggagtgcagtggcacgatcatggcccactgcagcctcaacctaccaggctcaagcaatcctcctgcctcagcctcccgagtagctgggaatacaggcacatgccaccattcctgactaattttttaatttttaattttagaggtggggtttcaccatgttgcccaggctggtgtcgaacccccgggctcaagcaatccacccacctcagcttcccaaagtgctgggattacaggcatgaggtaccatgcctggcagcttctgagtcttaaccccaatggattagactttctggaggccctgtttccctatcaccaccccaacctggtctttaggagtcaggagttagtccagggcttgctggggagttggcgcagtgactgagcagcccccatcttcctaccagggcgtgggtttgcccagatgtacaggtggtcccctagctatgccctcccgttagccctcttctccactgtccttagtagcatagtcactgccctctgcttccatggccctggcaggtctgtctgatggctaggagtcctttgctggagggtctgtcccctgcccacataggtggttgtcccagcttttcagagttcccttggcttatcactgggcctgcttcaaaaccctttacttgggaccatcctgggcaccaggccctcagggcctccagagagggcatctgagactcatagagaatcagcttgaagctggacaatcactttttgttgaaataaaaactgctaacgtttgtggggcactttattgtgtgtgccaggctctgttttgaggatttctaaacactggcctccttaatgcccagaacagcaccccgaagtgatgattaatcatcccttttctgtaagtgggaacagggagactccagagtttggtaacctgttcaggttccctaccagtagcgggtggtcagcctcaaagcccaggctgaaagccatccagcatgagggctgaggaccccagcaggcaccagagggtctttggagaggtcacaggttgtcaagtgggtgagaacagggcggggcaagttcaggaccagccagggcctgggtgttcaggcagtgggagagtggatgctggcaccagtgccatgctgggatctgcaggcagcttcagccacagccttccggggctgatttctgggcatggaagtgagaaccaaaagctggggcagggagcaccctggagggatagccggggagcaggtagagggccaaaacctggagtgggggcaggaggtgctccagcagcaactcccccagaggtgggtcccaacctccacgtcggccaattccaggtggccccaccgggtttcccccacccctttgtcccgcggagcccctccctcatgagtgctgagcccaagggccaggctgtccccaggggcggagagttgcggacccttcccgatccggtaatgggcctgggagatgccagattagcgtggtgcctgtccggagagacgggccagctgatgcccaggtcggggccctgccgctggccacactgggctccggtccaaggctagaaggctggcccctgctgcaacccctctccggctcctctgccacccacctcccggggctggccggctgtggggagccaggcggccgcaggtaaacggcttggggcggcgccggcggcgagggcgctgcacggagggaagcgcggcgccggaggggttaaccgcgggaggaggggggcttctgccggcgggaggggggtcccagccccggcggccgcccgctccgcccctgccgcctccgcggcccagtcggcaccggcgaggccgtgctggaacccgggcctcagccgcagccgcagcggggccgacagtaagtgcggtgcgggctccggtgcgcgggcaggactcaggggcagggacgccccaggggcgactggccgggcggggtgcccacctctcgcgcgtgggcgcctccgggagtggtgtggccgccggtcccgccgcccgccacgctccgaggcgtcgctgtgcggacgcgggggaggcggtgggagcgagctgcgggcgctgcgcggtggccctgctgtctggcgtgtgcacgctagtgtccacacacgtgtgcgtgggctctgggtgccctggcgcggccggcacgcccatgggggccggggatgccggggcgtctgcggagagtgcaggtggggtgcgtgcgtgcagcggggcggcgcggcgctgcagcctcgggatggagcgtgggcgcgcgggtctttgtgcccgcgcttggcggcgcgtgccggggcgtgtgtgcgcgtgggcgccgccgcccgctgtctcggactgacagctgtctcgggggctgtcgccccggtgtggcctttgcggacccccgccccgctttttccgggaactgggcgtccccagcacccctcctcgcctgggtgcggcggccgggacccgcccctgggttcctcgaaagcccggcggggcgcgggggcaccctggagggccagccaggaagcagggcgaggcgagaggggacggagaagccgcggagatgctgtcacagccgcagcgggcgagcagggacccaccattcccctgtccccgccttgcgctgtccggcctctcctccgggtttcccttcggacgcctccgagccccctcagcctcctcctcgagggccagctccccgcacccccaccaagctccacacatttcctcgctcgccccgcttccccctaggcaggcttaggctctctttcggcctcccactcgccttcctttcccttctcggtgccctcctctctttcctcacccgg

SEQ ID NO: 5518 - DNA, 6000 bp, Homo sapiens
caatgaaaagaatcaggactccttattgaaaaggctcatactaaggctagggcaaggaatataaaaggtaatgtacagacagcttcctatagtgacaataaggctggaaatgttcagaaaacaaaaggatggacatatatcaatagctcctaatgtccaaagctggaccaacttgaacagcacaataaataacaaatagcatagtatcagactatataacccaaagtataaaataaacctaaattatcatcaatgatagactggataaagaaaatgtgatacatatacaccatggaatactatgcagccataaaaaagaacaagaacatgtctgtagcaggaacatggatggagttggagaccatgatccttagcaaactgacacaggaacagtaaaccaagtgatgagaacacatagacacacagagaggaacaacacacactggggccttttggagggtggagggtgtgagaagggagaggatcaggaaaaataactaatgggtagtaggcttaatatctgggtgataaaatgatctgtacaacaaacccccatgactcaagtttacctatgtaacaaacctgcacatgtatccctgtgcttaaatgttaaaaaataatataaacacataaatatacatgtgtccacactgatttaaattaatgactacgttttttcaaaatgggagagaagagacgatgcttcaatacaaaaatttcaagtaatttatgtagatactctcccctcgtggagagtaggatatagttagttactcacttccaaggaatacagtatggaataaaaacaaacaaacaaacagttaatttagagtggataaaatgtgcaaaaacactttaaccaactgatgaaggttaatgtcaccagtgacgtcaggggatatcatggattccattgtatgatgtgttgagaagagcatttcacctgtatggtactcttttctgaaaatccataaccccagtctgatcctgagaaaagtatcaggcaaatcccaattgagagacattctgcaaacacctatccagtacttatcaagctgttgatgtcatatgaaaaacgaagatgaaactgtcacaaaacagaacaaggagctatgacaactaaatataatgaggtgtccggagctagatcctggcacagaaaaatactctaatggaaaaactgatataactgtaaataaagtctggtgtttaattaacagtgacatacctgtgtcagtttcttatttttgacaaaggtaccagagtaatgtaagatgataacattaaggaaaactgaaattggatgaagggtacaggggaactctccgtagttaattagaaacacttatgtaaataaaattattccaaatgaaaggtttattattaaaaatatgggttggtttcctagcatcagatttctgatctaaagtacaaatctggtcattttgcccccttgcttataaccgttcattgtttctctgtctctatgagacgaagacaatgcttctgagtgagatggtgccgagccatctcttgctttgctttccagccgcacttccactacttcccctcatataacctgaagtctagttttaccaagcttttagcagtgtctagaaagacataatttttctccacttgataatccctacaaacacatagcaactcagttcaattttatttttctctctgtgagttctccctgaattccctcaaagtcagagttagacactctattttgctcacatggcactctgcacctcactctataagagcctttatcacattttggggggcaactcattattgacaagagttgccagttatgtgccagaactgtgttgaaagtttacttatatcctgtcagaaaagaaatgttaggtaatatatccaagtcaatacagctaagaaattgagggcctgtaatctgaaaccagttactaattattagtctgaaagcctgaggtctttcaggtagaacacactacctttctgaatgctaggattcttgtagtttacttttcagctcccagacccctcgtcactccttaaactcattaacacagcaggttttaataaagacagcccagtctctgaaatcagacaacttgagtcccatccttagttatggtttcatcacttaccaagaatataatcttgagaaagaatctaaatctttagttgggttacctaacaaatgcaaggatacctaaaattttctgtagatcaggtaatatatgtatggcttcagcacaataccttgcacattagtgagcattcataaacattaagagtcttctaagaatatcagggattttgttttgttcaactttatatctcaaacacttggagaataaatacacatcataggtgcttaatatataactatttgacatatatgtacatctatatacatgtatatacgtatataatatatgtatatatgatatttctatgtatcatacagagaaaatatatttgatacatacatttataaatatatgtgtatataatacagataaagagagtttaggtttagaaagtaaaatagaggttttaactacttgggaaaatagaaattaaaaacaactggattactattttggaaaaatatagttgtgtcatctgtggttatattagtccaggtgttatcatgacagttaagtggggaaaaaaaacttgtcctgcatctatatcaatgatgctattacatcatatgaaaactgaaatctttcaattttgagaagaattaaagttaataattgcctctggatcaggaagagcttcactagttacccaagcaagtgatgagtttaacagtttggtggattttgaaattttaatttaacttgaattttatgtgtcatactctattatcctttttcaagagaaaacagaatgctattattcacagccttgttttttaacacagaaaaataaaaaaaggaaaaatgcttcaaatttcacttgacttgcaagactaaaacttcacaaactaaaatgacaaatgtatgatttgtaaaatacagttacaattaggttttttttttcataacaatctgtggtgaaatgtaacgggaaagcagacacttattttaaagatgcaattttaaaaataaaattcaaaacttaggaaatagaaaagcactcaagttttagcagggattttaaaatgtcatctacaaactacaaatacaggtaatcagtgacaccaaataaagtattttgaaagagttaaggtaatgtatatttcaaaaagccgttaccaggctttctgtaagtcccttgcaagaattccactttaagcattgtagtctcaaatattatatcaggcaaacctaggcatttgctatattctttttaaaaatttaatggcagacatcaccctaggttccctaacgtttaaggagaacctctccttctaatgattctctcacacagcttattggaacaggagattgtatttactaactagatcaggaaatctcaaaccatacagaggaaatcagaaaccggtcactcacggctaccacagtgactgcttctgagtgtggttcaagctcagtccaggacaggcagatgaaaggacaatcttaaaggtgactctggagagcaagtgagactgtaaccccaaaactttctaggataattcattttcacttctacccagtcaaaacaactattgacatcatcactgaagtgcttaagtctacctggaggtggcgtggagcagagtgagcattccagagtcccagacaagaggagatgtgcacgaaacactatcttcctgtcagacacctgtgcccactgccccaagcactgcccctctggtccttcatcagcctttgcgctgtgtccctcctgctcctgcaatgggccacagcacagaaggaaagagtcctccggaatgggtgactgtatagaaagcaatcgaatctttaatcacttttcctactttacacttcacgcagttcttattcctatccctgcttcatgcctttccaagagaatgttagaggcctctttcaattttcatttctcagtcttttccccatcccgttcagtaccctaaacttcgtcagttatttaaaataaccttttaccccctcctccccttcccaggatgtttcaacttctctggctctcttccccatccttacctcctccaattctttcatcctggtcctggcctcttaaacccgccaggggctgccctttgcctgtcttttctcctcccatccctctctgaaccctttcacctcatccattcccttgtcaggctctccagattcccgggctgtttgctggtgagaaatctttgctgcagcgaggaccggagtcccccgcgcgcagcccagtggcagaagagggctaggctgagagggaagccaggactgtaggagagggaggcagcccgtcctcctcacgaacctgcaaggatgcggcaggggcctgggggcatggggaggtactaaccccccggagcccccgattggggcttgcagacctggcccgtgggcggattttctgcctagcgcagccgagaagcagaggtgccaggaaaaccaagagaggggcgctgggggtgcccatccccagagtcggtccctctgcgaaccgaggaagaaaagaggagggagtcagcgagtggtcagaagggaaaacctgacaccagactggctccggagcgtccgggagactggggcgctccggtgagcacccagggggtgaagccagccgagcggtgggcgaggggcgtgcggagggagtgcgcgctcgaggaggggacgccaggagggcagcgatgctccgggctggtgcaggcttgctgggggatgtcggctgatgcgagctggagagcgcgtgtggcggccgcggcgccagtgtttgtgtgtatgtgagaaagcaaggggcgagcgcgagtgcgagtgaggcaaagatagagcgcatgtctcatccctgcgagcagccactagacgctccaccaccatcttttgcatgtgcaacatttgcagccggacagaaaacctctcccagggctatggagactgcgggaaaaatctggcggctcgcgatggattgctaaggagaactagtcataatcttaaaccaccgaaacctctttccttttttttctttcttttctttcttttctttttttttttttttttttggttgattttaattttagcgccatcgtcttcaatgcttctctgaacagcctttaggaagagtgcgagagaaagagagagagcgcgcgccagggagaggagaaaagaagatgaggattatttccagacagattgtcttgttattttctggattttggggactcgccatgggagcctttccgagcagcgtgcaaataggtaaggtgtgctccgatggggtgtgcatgtggctggttgtagcagatatccgaaagtgagttaaatgagttgctgataagcaattcagggaaaccttcagcagttcccttcccctctgtttccctcctcttcctttctctcctttgcaaaaagacttcctctttagtgcaggttccgttggaatacacccagggcagcccacccatgcgttctcagcccatagccctatttccacctttacctatagtcgcttaagtaggattgaaataagttgggggaaagtcttcggggaatttggttgtattttatatgatatttatttccatccctttctctaaagcataaagtgatgtcgagtttgtttaaaaaagaaaaaaaaaatccacttcttcccattctggacgccgcagctttcttgctattacagaaagacactgtttgaggaaaaagacatttccacccgcacgccctgccgtttcttgctaccagttagcagattccaaagttagatccctttcctggaagcttctccccttttattttgttttcttcttgaagcttttgcccttatttctctacctcgactctgtttccagggacaccctccatccttggcttttcttgctattct

SEQ ID NO: 5519 - DNA, 6000 bp, Homo sapiens
ggcttgtaagtactcgggacactggtgggctcagcctccaggtcaggggcaggtgacagtcccatgtagatcccttcccacctctcagggctgagacaaaggcaacccagggaatgtctgtggaagatcttggaaaagttaaagcacctggcgcagatggctcagcagaggccttgcagatctgcaaggcacaggaataggaatgcttgtggtagtgtgagggagagggccccagtgtcatccaccatggagggcgagctggaggctccagcccatggaagcaccaaagccatatgcactcctgggtgacctggggccgcaatgccctcgtcatttgtacagtgtcttacggtttataaagagctttcccagccatcttttatttgtacaatttccctgagaggctactatcctcccttgagagatgaagaaactgaggcccagccaggtaagacagcaggatcaaggtcgcagagctggggctcagacagagacttctgactccagttggtgcaccttccgaagtaccatggctgtcagtcaccttctgacctttttgggcctcagtttctccatctgtaagagtggaggaacagggctcagactggatgccctgagttttgtcgacattggggtttcctgcaggaggtggggcaggtggtgagtgctgagggctgttgagggcccgcgctgactgtgctgtggctgcaggctcgctgtccgaggggcctttgtgggggcctcgctgctctttctgctggtgaacgtgctgtgtgctgtgctctcccatcggcgccgggcacagccctgggccctgctgcttgtccgcgtcctggtgagcgactccctgttcgtcatctgcgcgctgtctcttgctgcctgcctctgcctcgtcgccaggcgggcgccctccactagcatctacctggaggccaaggtagggctgcagcactgatgcccaggtgtcttttgggtctctcggcagcggttctcagggtgtagaggaagctgggagccttctctccctgagggtcctctgttgttacctgtgccaggggaccagtgtgtgccaggcggccgcgatgggtggcgccatggtcctgctctatgccagccgggcctgctacaacctgacagcactggccttggccccccagagccggctggacaccttcgattacgactggtacaatgtgtctgaccaggtgggcatacgcatgtctgccacctccttagtagccgtggcaccttggccccagctggcctgggccctgtcccactacccctttggcgtgactgcagactggcaccagcccctgccttcccacaggcggacctggtgaatgacctggggaacaaaggctacctggtatttggcctcatcctcttcgtgtgggagctactgcccaccaccctgctggtgggcttcttccgggtgcaccggcccccacaggacctggtaagggtctgctccctcttctgtggggccagtggagggggcggatgttgcaaatcctgggttggagtctggggttgggcctgggaggccagtgcaggacaggagtaagtatcgatgatggcttcctcccccagagcaccagccacatcctcaatgggcaggtctttgcctctcggtcctacttctttgaccgggctgggcactgtgaagatgagggctgctcctgggagcacagccggggtgagagcaccaggtaggagccgtggcactgcctcagtacccctgccctacccgcccaccccgctggctccatcaagctatgggggaccgagatagccgggtcttgccttccacccctgccatggcctttgcttccccatctgtactaggtgaggtcccctgggttcctattgctaaagcctccacctcttgcctagagatgtactttgtcctgggccccgaaggtctaggtcacaggggttctgttctaagcctgtcttcctcctgcagctcttgtgactgtggccctggtcactgtcctgagactgaccctgtttctctgctgcagtatgtcgggcagtctaggctctgggagctggtatggtgccatcgggcgtgagccgggctggtatgggggcagccagacgaagaccactcctctgctcttctcccaggtgccaggaccaggcggccaccaccacagtctctactccaccccacagacgtgatccccctccctcccccacagaatacccaggccccagtccccctcaccctaggcccctgtgccaagtttgtctgccgcttcttgcccaggatcctgggggtcgtggctaccccctcctctggccggctccttgctgctcctgtcatagtgagcttgtgccgtccccctaggatggggggcatggccctggctgccagatgcccacagcaccctggcatgacctgccacctctgcttccacaccggagccagctacctctcctgtgcctgccactcaataaacagtgtctgcgccccacagttgtgcacctgtctgtcatctgccttgtgttcctatcacttttgcctgtttggcctaaggctgaacagacactagcccttgaagtgggctgctaggctgggcaggggtgacttaccccatcaaggctggtgggctgggagaggaggggcctgcagtttgcaagggaaggagaccacacaggcctttgttctcaaagctctcctggcccagaattgccccactacctccagatccctctccacttgaacagttgctactctttcctcaagacctgcgtcaactgttacctcctttaggaagccttctgtctcctggtcaagggacatggcccctctgctgggccccacagctccacattactgattatgtggccattgaggttctttgttttgttttgttttttgaagcagggtctcactctgtcactcagactggagtgcagtggcacgatcatggcccactgcagcctcaacctaccaggctcaagcaatcctcctgcctcagcctcccgagtagctgggaatacaggcacatgccaccattcctgactaattttttaatttttaattttagaggtggggtttcaccatgttgcccaggctggtgtcgaacccccgggctcaagcaatccacccacctcagcttcccaaagtgctgggattacaggcatgaggtaccatgcctggcagcttctgagtcttaaccccaatggattagactttctggaggccctgtttccctatcaccaccccaacctggtctttaggagtcaggagttagtccagggcttgctggggagttggcgcagtgactgagcagcccccatcttcctaccagggcgtgggtttgcccagatgtacaggtggtcccctagctatgccctcccgttagccctcttctccactgtccttagtagcatagtcactgccctctgcttccatggccctggcaggtctgtctgatggctaggagtcctttgctggagggtctgtcccctgcccacataggtggttgtcccagcttttcagagttcccttggcttatcactgggcctgcttcaaaaccctttacttgggaccatcctgggcaccaggccctcagggcctccagagagggcatctgagactcatagagaatcagcttgaagctggacaatcactttttgttgaaataaaaactgctaacgtttgtggggcactttattgtgtgtgccaggctctgttttgaggatttctaaacactggcctccttaatgcccagaacagcaccccgaagtgatgattaatcatcccttttctgtaagtgggaacagggagactccagagtttggtaacctgttcaggttccctaccagtagcgggtggtcagcctcaaagcccaggctgaaagccatccagcatgagggctgaggaccccagcaggcaccagagggtctttggagaggtcacaggttgtcaagtgggtgagaacagggcggggcaagttcaggaccagccagggcctgggtgttcaggcagtgggagagtggatgctggcaccagtgccatgctgggatctgcaggcagcttcagccacagccttccggggctgatttctgggcatggaagtgagaaccaaaagctggggcagggagcaccctggagggatagccggggagcaggtagagggccaaaacctggagtgggggcaggaggtgctccagcagcaactcccccagaggtgggtcccaacctccacgtcggccaattccaggtggccccaccgggtttcccccacccctttgtcccgcggagcccctccctcatgagtgctgagcccaagggccaggctgtccccaggggcggagagttgcggacccttcccgatccggtaatgggcctgggagatgccagattagcgtggtgcctgtccggagagacgggccagctgatgcccaggtcggggccctgccgctggccacactgggctccggtccaaggctagaaggctggcccctgctgcaacccctctccggctcctctgccacccacctcccggggctggccggctgtggggagccaggcggccgcaggtaaacggcttggggcggcgccggcggcgagggcgctgcacggagggaagcgcggcgccggaggggttaaccgcgggaggaggggggcttctgccggcgggaggggggtcccagccccggcggccgcccgctccgcccctgccgcctccgcggcccagtcggcaccggcgaggccgtgctggaacccgggcctcagccgcagccgcagcggggccgacagtaagtgcggtgcgggctccggtgcgcgggcaggactcaggggcagggacgccccaggggcgactggccgggcggggtgcccacctctcgcgcgtgggcgcctccgggagtggtgtggccgccggtcccgccgcccgccacgctccgaggcgtcgctgtgcggacgcgggggaggcggtgggagcgagctgcgggcgctgcgcggtggccctgctgtctggcgtgtgcacgctagtgtccacacacgtgtgcgtgggctctgggtgccctggcgcggccggcacgcccatgggggccggggatgccggggcgtctgcggagagtgcaggtggggtgcgtgcgtgcagcggggcggcgcggcgctgcagcctcgggatggagcgtgggcgcgcgggtctttgtgcccgcgcttggcggcgcgtgccggggcgtgtgtgcgcgtgggcgccgccgcccgctgtctcggactgacagctgtctcgggggctgtcgccccggtgtggcctttgcggacccccgccccgctttttccgggaactgggcgtccccagcacccctcctcgcctgggtgcggcggccgggacccgcccctgggttcctcgaaagcccggcggggcgcgggggcaccctggagggccagccaggaagcagggcgaggcgagaggggacggagaagccgcggagatgctgtcacagccgcagcgggcgagcagggacccaccattcccctgtccccgccttgcgctgtccggcctctcctccgggtttcccttcggacgcctccgagccccctcagcctcctcctcgagggccagctccccgcacccccaccaagctccacacatttcctcgctcgccccgcttccccctaggcaggcttaggctctctttcggcctcccactcgccttcctttcccttctcggtgccctcctctctttcctcacccggtagtcccagacaggggctgagggccgggcagcggaggtaaggggaaggctggagataggagggggactgggtgtgtccagccagagggatgtctgtggacagtgcagctgggggctttatggatctttgggtgtgtaggggatagaggaggagggtgtgggtgtcaggccagctcagtgaccccagcatccctggttttgcccgcagtgacgacagctccccaggagccccccgcccggcccctccaggcgggcagtggagctggcccggcgcct

SEQ ID NO: 5520 - DNA, 6000 bp, Homo sapiens
catatacaccatggaatactatgcagccataaaaaagaacaagaacatgtctgtagcaggaacatggatggagttggagaccatgatccttagcaaactgacacaggaacagtaaaccaagtgatgagaacacatagacacacagagaggaacaacacacactggggccttttggagggtggagggtgtgagaagggagaggatcaggaaaaataactaatgggtagtaggcttaatatctgggtgataaaatgatctgtacaacaaacccccatgactcaagtttacctatgtaacaaacctgcacatgtatccctgtgcttaaatgttaaaaaataatataaacacataaatatacatgtgtccacactgatttaaattaatgactacgttttttcaaaatgggagagaagagacgatgcttcaatacaaaaatttcaagtaatttatgtagatactctcccctcgtggagagtaggatatagttagttactcacttccaaggaatacagtatggaataaaaacaaacaaacaaacagttaatttagagtggataaaatgtgcaaaaacactttaaccaactgatgaaggttaatgtcaccagtgacgtcaggggatatcatggattccattgtatgatgtgttgagaagagcatttcacctgtatggtactcttttctgaaaatccataaccccagtctgatcctgagaaaagtatcaggcaaatcccaattgagagacattctgcaaacacctatccagtacttatcaagctgttgatgtcatatgaaaaacgaagatgaaactgtcacaaaacagaacaaggagctatgacaactaaatataatgaggtgtccggagctagatcctggcacagaaaaatactctaatggaaaaactgatataactgtaaataaagtctggtgtttaattaacagtgacatacctgtgtcagtttcttatttttgacaaaggtaccagagtaatgtaagatgataacattaaggaaaactgaaattggatgaagggtacaggggaactctccgtagttaattagaaacacttatgtaaataaaattattccaaatgaaaggtttattattaaaaatatgggttggtttcctagcatcagatttctgatctaaagtacaaatctggtcattttgcccccttgcttataaccgttcattgtttctctgtctctatgagacgaagacaatgcttctgagtgagatggtgccgagccatctcttgctttgctttccagccgcacttccactacttcccctcatataacctgaagtctagttttaccaagcttttagcagtgtctagaaagacataatttttctccacttgataatccctacaaacacatagcaactcagttcaattttatttttctctctgtgagttctccctgaattccctcaaagtcagagttagacactctattttgctcacatggcactctgcacctcactctataagagcctttatcacattttggggggcaactcattattgacaagagttgccagttatgtgccagaactgtgttgaaagtttacttatatcctgtcagaaaagaaatgttaggtaatatatccaagtcaatacagctaagaaattgagggcctgtaatctgaaaccagttactaattattagtctgaaagcctgaggtctttcaggtagaacacactacctttctgaatgctaggattcttgtagtttacttttcagctcccagacccctcgtcactccttaaactcattaacacagcaggttttaataaagacagcccagtctctgaaatcagacaacttgagtcccatccttagttatggtttcatcacttaccaagaatataatcttgagaaagaatctaaatctttagttgggttacctaacaaatgcaaggatacctaaaattttctgtagatcaggtaatatatgtatggcttcagcacaataccttgcacattagtgagcattcataaacattaagagtcttctaagaatatcagggattttgttttgttcaactttatatctcaaacacttggagaataaatacacatcataggtgcttaatatataactatttgacatatatgtacatctatatacatgtatatacgtatataatatatgtatatatgatatttctatgtatcatacagagaaaatatatttgatacatacatttataaatatatgtgtatataatacagataaagagagtttaggtttagaaagtaaaatagaggttttaactacttgggaaaatagaaattaaaaacaactggattactattttggaaaaatatagttgtgtcatctgtggttatattagtccaggtgttatcatgacagttaagtggggaaaaaaaacttgtcctgcatctatatcaatgatgctattacatcatatgaaaactgaaatctttcaattttgagaagaattaaagttaataattgcctctggatcaggaagagcttcactagttacccaagcaagtgatgagtttaacagtttggtggattttgaaattttaatttaacttgaattttatgtgtcatactctattatcctttttcaagagaaaacagaatgctattattcacagccttgttttttaacacagaaaaataaaaaaaggaaaaatgcttcaaatttcacttgacttgcaagactaaaacttcacaaactaaaatgacaaatgtatgatttgtaaaatacagttacaattaggttttttttttcataacaatctgtggtgaaatgtaacgggaaagcagacacttattttaaagatgcaattttaaaaataaaattcaaaacttaggaaatagaaaagcactcaagttttagcagggattttaaaatgtcatctacaaactacaaatacaggtaatcagtgacaccaaataaagtattttgaaagagttaaggtaatgtatatttcaaaaagccgttaccaggctttctgtaagtcccttgcaagaattccactttaagcattgtagtctcaaatattatatcaggcaaacctaggcatttgctatattctttttaaaaatttaatggcagacatcaccctaggttccctaacgtttaaggagaacctctccttctaatgattctctcacacagcttattggaacaggagattgtatttactaactagatcaggaaatctcaaaccatacagaggaaatcagaaaccggtcactcacggctaccacagtgactgcttctgagtgtggttcaagctcagtccaggacaggcagatgaaaggacaatcttaaaggtgactctggagagcaagtgagactgtaaccccaaaactttctaggataattcattttcacttctacccagtcaaaacaactattgacatcatcactgaagtgcttaagtctacctggaggtggcgtggagcagagtgagcattccagagtcccagacaagaggagatgtgcacgaaacactatcttcctgtcagacacctgtgcccactgccccaagcactgcccctctggtccttcatcagcctttgcgctgtgtccctcctgctcctgcaatgggccacagcacagaaggaaagagtcctccggaatgggtgactgtatagaaagcaatcgaatctttaatcacttttcctactttacacttcacgcagttcttattcctatccctgcttcatgcctttccaagagaatgttagaggcctctttcaattttcatttctcagtcttttccccatcccgttcagtaccctaaacttcgtcagttatttaaaataaccttttaccccctcctccccttcccaggatgtttcaacttctctggctctcttccccatccttacctcctccaattctttcatcctggtcctggcctcttaaacccgccaggggctgccctttgcctgtcttttctcctcccatccctctctgaaccctttcacctcatccattcccttgtcaggctctccagattcccgggctgtttgctggtgagaaatctttgctgcagcgaggaccggagtcccccgcgcgcagcccagtggcagaagagggctaggctgagagggaagccaggactgtaggagagggaggcagcccgtcctcctcacgaacctgcaaggatgcggcaggggcctgggggcatggggaggtactaaccccccggagcccccgattggggcttgcagacctggcccgtgggcggattttctgcctagcgcagccgagaagcagaggtgccaggaaaaccaagagaggggcgctgggggtgcccatccccagagtcggtccctctgcgaaccgaggaagaaaagaggagggagtcagcgagtggtcagaagggaaaacctgacaccagactggctccggagcgtccgggagactggggcgctccggtgagcacccagggggtgaagccagccgagcggtgggcgaggggcgtgcggagggagtgcgcgctcgaggaggggacgccaggagggcagcgatgctccgggctggtgcaggcttgctgggggatgtcggctgatgcgagctggagagcgcgtgtggcggccgcggcgccagtgtttgtgtgtatgtgagaaagcaaggggcgagcgcgagtgcgagtgaggcaaagatagagcgcatgtctcatccctgcgagcagccactagacgctccaccaccatcttttgcatgtgcaacatttgcagccggacagaaaacctctcccagggctatggagactgcgggaaaaatctggcggctcgcgatggattgctaaggagaactagtcataatcttaaaccaccgaaacctctttccttttttttctttcttttctttcttttctttttttttttttttttttggttgattttaattttagcgccatcgtcttcaatgcttctctgaacagcctttaggaagagtgcgagagaaagagagagagcgcgcgccagggagaggagaaaagaagatgaggattatttccagacagattgtcttgttattttctggattttggggactcgccatgggagcctttccgagcagcgtgcaaataggtaaggtgtgctccgatggggtgtgcatgtggctggttgtagcagatatccgaaagtgagttaaatgagttgctgataagcaattcagggaaaccttcagcagttcccttcccctctgtttccctcctcttcctttctctcctttgcaaaaagacttcctctttagtgcaggttccgttggaatacacccagggcagcccacccatgcgttctcagcccatagccctatttccacctttacctatagtcgcttaagtaggattgaaataagttgggggaaagtcttcggggaatttggttgtattttatatgatatttatttccatccctttctctaaagcataaagtgatgtcgagtttgtttaaaaaagaaaaaaaaaatccacttcttcccattctggacgccgcagctttcttgctattacagaaagacactgtttgaggaaaaagacatttccacccgcacgccctgccgtttcttgctaccagttagcagattccaaagttagatccctttcctggaagcttctccccttttattttgttttcttcttgaagcttttgcccttatttctctacctcgactctgtttccagggacaccctccatccttggcttttcttgctattctcctctactgtcttttaatgggacgcagctattgaatttcttccagctaagcccagcctcaacactgcatcatttctcgtggactgtgcataaaacggagttaattaggctgagtccacgagctggaggaaaataaagttcatttcttctttctgatttccctcttccctgtgtggcactatatcccttcatttccgtattttaatgtaaatctcttttccgctcatctgcatgcatcttagagagagctgccctgaggtggctgatgtagcagtgtgctgg

SEQ ID NO: 5521 - DNA, 6000 bp, Homo sapiens
aaagaatggaaaactctccaggccctgttagacctgccagagctcctgcaggctttgcgcttccactggcacttaggatgaatgggtatttgctgctctctgccaggctctgggaatccagctaacaataagctgaaaagcatagataccctttgtggggctttggctctacacccagctctttccttgctggtttcggtgaatctccccaacagccctgtagagtaggactccatttggggatgaggaaagtggcttagaaaggtagatgttctgtccaaggtcacacagtgggtggcagcatgacctctaaagattgtgtgtgtgtgtgtgtgtgtgtgtgtgtgtgtgtgtgtgcgcgcgcgcgttatggagtcttgcttttattgcccagactggagtgcagtggcatgatctcggctcactgcaacctccacctcctaggttcaagtgattctccttcctcagcctcccgagtagctggaactatagacatgtgccaccatgcctggctaatttttgtatttttagtagagacggggtttcaccgtgttggccaggctggtctcgaactcctgacccaggtgatccaccttggcctctcaaagtgttgggattacaggcgtgagccactgcacctggccagaatttttacccataatattatactcaaaatccctgcaaatgaggacaggaggaatgcctgccccacccaccagacagatggatattctagtcacctgcttcctctgagccctgtgggccctagactctggctgcgggtgctgagccaaatgtatggtagaagggtcagtccaagtcagaccacacttgtgctcagagacctccagaaagctgctggacctacacagcctttcgctgacagagctgggctggggccacgctcagcactcagggaaagcccagctccatgtcactctgctagctggcactgcaacccaatcttcaacatggaggattgcagccaggtggcctctgtgctctcatcaatattttaaggctcagaactggagcaggggtgcttggtcctgggtgtgacctgggaggaggtgtgagcacagccttgccagggctctgcttctccagcccgtgagggaacccccactgtgccaaatgtctagtgcttcctgggccaaaggtgcttatggtgcagaaggacagaaggacaaggctcccctggatggggtcctgggtggagtcccaggtcctgctggcctttaacgaatggttttatcccctgggaagctcccttgccacctgggagatgaagtgctaatgacactcacctcactgctgcttagggaacttgctgtatgcagcatctttgaaagggctcaaagcctgctcctaccaggtgcttgacagtgggttcccccatcttggggggagtcagactcacaaagccctttctcagaacaggccttggagttggtggcagggctgaggcccgtgggtggaccccgaggaacccatcagcaggaaattcagagtggacgggaacttcccaatctttcctctatccctcctaaggcccatcacccaccctctgagtctgctctcagaattcagcatcaatcacagagcttttggataatttttttatcttatcctagaggaaaaggtttggtaattggaacaacctccaattacctgccatagcaagtttctctcaaactcgtctacttgtgcacagacattgacattttggttatcagagtgtttgaattatttttgtttaaaatgtatttttattttcctagcctctgttgcccaggctggagagcagtggcgtgatcatggctcactgcagccttgaactcctgggttcaagggatcctcccacctccggcttctaagtaactgagattacaggcacatgtcactgtgcctggccaattattttattttttgtagagacagggtctcacttgttgcccaggctcatcttgaactcctggcctcaagcaaacctcccaccttggcctcccacagtgctgggattacaggcataagctactacacccggcccaaattcttttcttatacgacactgtcttcccaagctgtgaaatgctacaagtgcatgcattattcatctccgaaaaccaaccactggcagaggcaacgccatgcaatgcactgcacgcaaccaaacggttacttcttgcatgctatgcattttgcatacattctctcaatcctggatgctcggggtattataatccccattttatagttgaggaaaccgaggctcagcccaaagtcataagttaataattgctgagccaggagctcactgattcattcattcagcaaatacggtctcactctgtcactcaggctggagtgcagtgggtgccttgacctcccaggctcaagtgatgctcctggctgagcctcccaagtagtcggacaagtgtaagacacaatgctctgttaattttttttttcatttttaatttttgagacagtctttttttttttttgagacggagtctcgctctgtctcccagtctgtagtgcagtggcgcgatctcggctcactgcaacctccgcttcctgggttttatgccattctcctgcctcagcctcccgagtagctgggactacaggcatgcaccacctacgcccggctaattttttttgtatttttagtagagatggggtttcaccgtgttagccggaatggtctcgaactcctgaccttgtgatccgcccacctcggcctcccaaagtgctggggttacaggcatgagccacctcgcccggcgagacagagtcttgttatgttggccaggctggtctcaaactcctggctcaagtgatcctcctgccttggcctcccaaagtgctgggattacagccataagccaccatgcctggccttgaggcaacctcttcctcccacagggaactgtgatcccataaaaatgtctgaggcttttcctaacaaaagccagcagatgccagaaagagttatttcaaattatagagggccactccttactttagtgtcccttcctcctggccagatttctggcattcctttgagattaccagactggtgccaggggacagtgggacaaagggcttgtcacctgggcaggccattggcatggccccacctccctgtgagccggtatttttagagaaagtccttggctcctttatccaaacggcctccccagattgaagcccttggcttctcagcctttcaaacatccagtggccggcctccgtcccaggggccttggtctctcctacctccctgcaggtcaacttccaggcctgtcgccacagcagccttacaaaagtcccctttcatttttatccttaaataagaccattttgcgtggagcaagttcagccaagtacacactctaaaagatttttgcggccgggcgcggtggctcactcctgtaatcccagcactttgggaggccgaggcgggcggatcacgaggtcaggagatcgagaccatcctggctaacacgatgaaaccccgtctctactaaaaatacaaaaaaaaaaaaaaaaaaaaaaaaaaaattagccaggcgtcgtggcgggcgtctgtagtcctagctactcgggaggctgaggcagcagaatggcgtgaacccgggaggcggaggttgcagtgagccgagatcgtgccactgcactccagcctgggcgactgagcaagactccgtctcaaaaaaaaaaccaaaaaacatttttgcttctggaagactgtgaactccccacatagaagcatttcctgtgtatcaggcactggatttcctaagcccctggcagcccaggaaacctcctgtttcagctcatgtcccataaaatgggatccataatttttatatgtatcagcacctcacttctaggaaggacgggagcagtgagggacatggggcagtgtgtggcaaacggtagcaggggcccttgcccctctaccccggcaaaggtgcgttagtcacggtcacaaggctgtttcctgcgggggatggggaggcaggggcagcgtccacaacgccagtagccccgtggcacgcacctttggcctgtgctctgggcagttgcggcggccccatggcggggatgatgcccctccctcgacggtccctgggcctccagccctgaacttctaggcccgagcatcctcagtaccacggacagggaaactgaggctgcgggaggcgtgcagagggctgggccccggtagccggcgtgcagccgggcccagcctggcccaccgtgtggcctcgagcccgtcacctcttccctccttcagacctcggtttcttagtaattcttcgggctccgcgttggacagggcgagacgcgcctgtggcagcgctgggaaatgttacaaaatcacacccactgagccccaggaggaggctgctcgcccaaggtcacgcggagagggcagtagcctccagacacgtttcctgcctgcccctgccaggcccggcctctgatgtcacggggcttccgaggggtccaaggaaactttcagctcccaaagccaaccccggggtcctccgaggctcaggagcctccctcgctcggcccagtccggctccgtcccaccgcggaggcgctctcccggcgccccccgcgcctcgctcccctctcccccttccctgcgaccgccggggcgccccctcgacgccccgcccccttcgcccaggccccgctcacggaggccgcagcgctctgggttgggggcggcgccgcagccaatggggaggcggtgtggcgagggcggcggcggttatgatgcgccgggccggcggacggcggccaatcagtggcgagcgcgagggcgggctgtgacgcggccggcgctcctcgtgcggcggcggcagaggagcgagtgcagcggccagcagcacatccccgctccacagtcgccgcagtcgccgcagccgccgccgccgccccgcgcgcccaaccgccgcggccccctgccccgccggcctgccagtgagagagcggcgagggggcgcccggccggactctgagcctagtcctctcgcgctgcggccgcccgcgcctcctcggccgcctgtcgggcatgaaaaccaaattctgcaccgggggcgaggcggagccctcgccgctcgggctgctgctgagctgcggtagcggcagcgcggccccggcgcccggcgtggggcagcagcgcgacgccgccagcgacctcgagtccaagcagctgggcggccaacagccgccgctcgcgctgccccctccgccgccgctgccgctgccgctgccgctgccccagcccccgccgccgcagccgcccgcagacgagcagccggagccccggacgcggcgcagggcctatctgtggtgcaaggagttcctgcccggcgcctggcggggcctccgcgaggacgagttccacatcagtgtcatcaggtcggtggcgccgggtctgggggccgcgggacagtcaggtgacgcggggcggggccggggcggggtccgggcagggggcgtgggccgggggggtcgggggccgggggagccggggccggggcggaggccggggaccggggaccgcagccggcgaaagccctccttctcccagccctgggtaatccaagggaagcgggttcgcggccgccgcaggccgtccacaaacaggcttttgtaaaaacgtcggtttcatgagaaaacgggtctgttctaggagaacaataccgttccatcacgaagtgcgtgtggtactgacgcttaagataggtctagaaagtctctgcggtttagggccttgaatgaaggtgttgtggctggctttaaaaacacaaaccactttttaacttttttctgttagtttttcgagttcgcgatttgatgtcttgttccctctccaagagtcattgttagtggaggagtagcattttctcatcccctaagagacatcactatagctgtgttactagacaaaggtgggaggcgtggctccta

SEQ ID NO: 5522 - DNA, 6000 bp, Homo sapiens
ctctgtaagtgctgggattaagggcataagtcactgtgcctgtctgagggaccttctaaaacttgcgctctctcacaggttttgaaacacattggaaaccaaatccctcgctaaattcatctcctagaaaagtatagaaaacaggactggacttgtgagctttgtaactgtaacattactgctaacttgtcccaatcagggcgtgagggtcaagcagatacagcatctcacctaggctaggtacctaggaagggagacagtgctggttaaggcagggctgagttgtgaaggaggtgaggcctacagccactccctttccttctttctgccctaattcccgctgttccactatacccaggacttgaaataccagctcttctcttcctaagagaggtatcagatgtggcagaaaaagggagcctgggttcaaatttatcccttactaacagtaagttagcaagcctgtttaactttaggcaaagcaaatagtcttcctttctgaatttcaatgcttaaggtctgtaaaatgggggtgacaataattctcgctttggcccacttcaaagggttgctgtgcgatggaatgagatagataatgctgttataatgttatgcaaatgtaaatcactgctatgcaaaataacttactgctatttccagaaactcctctttggatttaatttaatcaagagtgagaatataagttacttattctatgctctgggtgcatttgtattttaaacctcatcaattatcttggacgctttcctaactgaagtagattttggcaacagcaggagaaggagttatttctttgggggcaggcgggtatttctattttgcctgagctggtgaggtcaatggtagttatttggccaaagtaacatggaagagggaacaatgtttaccatcctaagggcagggaagtcccttttctgctttaatgactctggtctggttgcgtgactcagagaggcctgctttgggggagaaaacgaggtgggaagcagatggtggtaagaaaagatctgagattcaactacattggccccttaaccaaccattgccaccaggacaaaggtggtgtcacttctcaccttcatttaaatgcatgcatcctataaatatcattgagtgccaccatgtgccaagagtatgctgggcactgggcgtctagacttgaatgagatagactggttttgtcattctgctgcttgtagattaagaggaagatggagattaagcaagtgaccagagaggaagtatcaaaggctacaggggactagagccttagagtgagggctgtaacctagcctaggtgcctaaggaggctgctctgaaacctgaaggctgaatagaagttggccagccaggaggtgagcatgtgagaaggccacaggaagagaaagaacagaaagaagtcaaattaggctttggggagttttttcctcttcgtggctgtccttgctgctattttaaacatgactccacctggataaaaatgtaggacactgtgacctctgtgtgtttgtcctctacctccatctccagtggcctaagatgggcagtaggacagaggagggcagtttaaagtctgacaacaggcttaagactgttttatacacagctgtgagtctatcattacatttccgtgcatgttgattttcgtcatgatgctgggcagcatccgagcaaggccatgcaagatgggacagagggggatatggtactgtcttccatcctgcaccccaactttgatgttacttcagagggatagaggaagtggtagcttgtttacaacccagagctggttttgaagctgagaggaacacctcactcatattgcacgattcagctctaactcctgtcctgggtgaccttgcctgtggctgctcctatctcacaacccagtgggggtcctgaaggtttgggagtggtcagggctgaaaggtgtcttttcatttaacttatgaagaaatcgtaagagacaagatgatcaagacaaaaaattacataataatttggttgcaaagccaggactagaatctatgtttctaatgccacctgcatgcactatttctctctggaggccttcacacaaatttgcacagctattttatatacttacctcatctgatactctcagcagtcctgtgagattggtagggattaagatctctattttacagatgagaaaactgaagctctgaggaggtttggccaagtccccacagctagaaagtcaaccttctgactcagaattcagcgtgtcttccactgcgttctgtagttgtgcagcaggcacagtcttggggggttgctgattatctacctgagaatggtttggaatgtagataatgattagataggagggcttgcaaggagttaattaaccatgtttgaatattcttaccaattctctagcattcaagttgcaaatcaacatcaaaatgagcaagtagctggccctgccctactagtccttctgtgcaaggggccatctgaaccttaagccagcagtttgtgtgggcaaacagatgcccatcttcaaatccacacttaggagactcctgtctctgttttctgctgggactctgacacttgctcttgcagagaaggttctcattaaatatatgttggaaaaaccccaataattgaatcatctacaggatgttctcactttagccatattcccttcattttcctttgagggctaaatgggagtagagatatctttgctgctggtcctgagagaccatggggttgtccattcctggtaaggtgatgctgaccagacagagctgatctagatgaggggtgggaggtgacagtggttcagtggctttcttggaggatgcatgattgtttgaattattatttttaattgacatatataagtatataataaatatatatgttatatatatgagttagagctgaattgcacaatatgagcaaggcgttcctctcagcttcaaaaccagctctgggttgtaaacaagctaccacttcctcaatccctctgaaataacatcaaagttggggtgcaggatgaaggcaccccaataataccacactggggaaagtgtggtattttgatacctgtatacaatgtataatgaacaaagcagggtggttaacatagagaatgcatgatttgcttggtggggagaactggatggttctgtaattatgttgagatggacagaaagacatcatctgacttggggagaaaatcgggtgtgggaggaggtgggagagtgcagaacctgaggcagaggtccccagcaagtctggcatggggtagggtagggtggttgaatactggcttcagggagatgaggcaagctggcctgactctggcaggttgtcagtggtagtcctaggtagaggagggggctttgctaagctacctgaaaagtactagagtgggccggggtaggaatcgggctaccgtggcttgtcggagatgaggaatgtttttagaaaattgaactgaccatcccttccttcccctgaacagcagcttgtatgcaactataaaggtagtctccctttcagccctgcttgctgtgtctttattcttatcaaaaaccaggatctgagttcagagggcagtgaaacataaaatgaaataggaaaggttgcagtagtacatagactttggctgctcccactaacctgcaaaaaaaatattttccttgggcgtaccttagcagttccatggcagaagttttatctcctgtggttcagagagtttggctcgtcaagctgaatgtagggttaaagtgtgtcctccctcctctgtgggtgtttgcctagctcctggctgtgggttgaagggactggtaaatatgtctattttactgctgaggcagggtggctcagtgcttggtcaccttggagggatcataagcaagccgccgctggggccctgtgccacgcacaggtattcatgcgtgcgtgcaagcacaccctgtatagctgtgtaataattgtccaggtgtggtgcattctttgtcagatgtacccttgtttttactgcctctgtgcaggatgtttatttgctgtgcttcaggctggggcacgtagcttgatcaagggtagtttttgctgtggcccctgcaaatacgttgtggtgcccagagtagatgaaaaactgtgagtttcccaatagagcgggttcatctggactcttgttggttgcgttctaggagctaattctgtggctctggactcttccctggaggtggggatgaggccggggccggggggaggtggtcttgtggcgctactgcgggctgtgcactcaggaaagtggccacggtttaggacgacctcgacacgaccctgtataggacgcaactaactccagagaaaacgagcgagccccatgcaactcttcattcctgcagggagaacaaggaggtgtgcccgccagggaagggacgcacccccaccggcgctcgctgccttaacttccccatccccgcgccagggaggggccggagtcgccgccgaggccgccgagcgcagaaagtgcgcgaaagggacgcgctgcgagcctcacacgtgacggcgccgcgccgaaccgagcgggacctggcggcagcggcggcgggcgcagcggggcggcccggagcggcgcgggcggcctggagccccgggagcggcgcgcgcggtcccggcccagcggctctcctggcctcgcgctgcacattctctcctggcggcggcgccacctgcagtagcgttcgcccgaacatggcgacacggagcagcaggagggagtcgcgactcccgttcctattcaccctggtcgcactgctgccgcccggagctctctgcgaagtctggacgcagaggctgcacggcggcagcgcgcccttgccccaggaccggggcttcctcgtggtgcagggcgacccgcgcgagctgcggctgtgggcgcgcggggatgccaggggggcgagccgcgcggacgagaagccgctccggaggaaacggagcgctgccctgcagcccgagcccatcaaggtgtacggacaggtgagcagttttgcaacccgcctccctccagttttttcctctccctgcacttcctcacccccgcatccatccgttgcagtcgcctcctaggtgcaggcaccactggggacttcccggcttgcatttgtttttttccttcacgagtacaaccgtcagcacttgaatcgcattgatctttccttcttcctgtcgatttagtaaacgtattccaggtaactcgccgggtgcagtgcgtattaccccagggtgtgtgcagagagatgtagtttccggcaggtataggaggggtgcagcttcattttacatctggataaaaaacgggctttctttagtgtatcatcagttggcagtggaggcgagcaccctgcagttgcggtacacttacacagaacagcacgaggtgggggtttccacacttagcattattagcacaataaaagtgggcaaacctgaaagcttgtcgactatctctgtacagtcagacaagaggtgtgtgtatgtgtgtgcgtgtgtaaaggctgaatttttaatttttaatttttggcgagcgtgtgagatgctctccattccttcttccccacccttcaagatgctgactctcccacccccgtcaagataactttattttggagaggaatacccctcatggcacttggagatttgaaaggactgcaggaaatttggtgggcattattattctataagtgatttatttctacccaggcaataggtttattagatcataagtaacgtgaatttcacttttatggtcagacttactgcgaggaattgcagatggagtttgtaggttaggatcagcactggcaaaattaatttgaccgtgttattgcctcatgagactcccagtcctgcagttaagattgacatcagcaaaagtataaggtcggtgggggagaaaaagtaggaccagaggagggggtaaatacactt

SEQ ID NO: 5523 - DNA, 6000 bp, Homo sapiens
tcttgccccttcacgttcaccttccccttggaagtggggtgggggagggagggcactccttcctggagctcccagccttcattgtgccgacttcctcttcactgctccagccgcacacacccccttcattaaccactgcacagttggaataggttggaacatattaaataagatgttgctagagtttttttttttttctggcaaggaaataatgaaagaaatgtaaatacagacacgaatattgaattgttagattaggtttgcaagaaacaattgttctctggcccatcttgatgaataccctgtcagggtgaatgcctggggagtgacagagctttctagtgaagcagagacctggcctgcgccacctctcccgacaccagggagcaaccctgagcctgttgaggctcctcatggagacctagactgagggaagtccagtctgtttcctttgccaaaaactgattcctaggtttcattttcaagttcagacttaccctgggatttttaacatgaaaagtctaccgttttcaaggagactggcccctaccccagcaggatgggacgtggggcatggctttgccctagagccctggtggtacaaatctattagtgaatcatcacagagcctgtttgtttaagtcaataggaaggggccatgtttgttaggttataaatgccgaaacggctttgcaaataactttaaaaaatgttaaatgtatatggaaagttgtttttctccctcactctctttttcacttaagtgaaaaacctcataaaacttcatgagctgttaagtctgtattgtggtgtaggaatctcgtttgtatcacttaatggagcttcaggtaattgcagttcagagtgactttggtgccaagtagggggaaataattgcaatctcgttaattagtggtctgatttcacatcctcttatgtaaggcaagcaagtggtcttaagtaataatgctaatgaaatcaatgttgataccccaacaaaggtctcccttccaagagattatctaaataaccaacaaggcagtgattaggagtctaatgtaattaccatatttgcatgcacaaggcccttggtctatcagctcatggcaagtagtggggaagcaatcaggcatcacgcacatgcagaaacgtctcacaccagacaggcagtttgtgtagctgtggctatcgcccagctttttttggtgggtggggccttgaggagtcatctggtctgttctcctgccctcaggtgggcttattggtgggaactttgccttggcaggtgcagatgcatctgcaacgcaggctgccagatctacggatgttgctgctgtggtggtgcccatcttattcctgatactgctgagcctgggggtggggtttgccatcctgtacacgaagcaccggaggctgcagagcagcttcaccgccttcgccaacagccactacagctccaggctggggtccgcaatcttctcctctggggatgacctgggtaagtggggcagggagagtcggttcttcctcccagggctgacccccacgcagccaatgacttgattaggaaacacccaccttcagctcctcttttgaccctggaggagctcttcatcagccagcgatttgattccatgagttttggttaaaccattcagagccctcactttttaacttttaagttaaattaaaatgttgtattctctttgattgtgtagttctggcctgaaacagggagcttgccccaggccttgagactcccaaagtatcggaaaatcctcaagaatatctgacccctgtctcatccttcactgagctggaggtctgacatctctggagatcctaactcaagataaaaaataatgctttcccaatcagcttctatcaaaggagaccctttccatcttgctgtttctctttctggttgctagtgtaacctcaccagccattcttttatgtaccttaacacagtggtccccaaccttttttgcaccagggaccagttttgtggaagataattcttttttcactggaccagcggtggagggggaagggttgggggatgatttcaggatgagactgttccacctcagatcagcaggcattagattctcatagggagcgctcagtctggatcccttgcacgctcagttcacgatagggtttgtgctcctgtgagaatctaatgctgccctgatctgacaggaggcgaggctcaggctgtaatgctctgactcaccactcacagcctgctgtgcggccccccattcctaacaggccatgtactggtactgatggccctcggcccgggcattggggatccctgtcttaacacatagcaagggaaaaagtaagaagtttcccgttttgaaatctttgcacaatgaaaaccctaaatgctaatagagatagtaagatagtaatataataaagtgggtgtgttacgaggcttccccaaacttagactaatcactgtgaatgtacaagtttatttctttccgttaactagttacaattatatatctatgtttataaagacatttgtatattccccttcactgatcatatgatgttagctctgttccctttccttgtcagtttcctttcttgcctaataagccggcacctggactgccttgtgtgaatggggcggcttctttgcttctgccgttggaggcaacaggagtggacccatcagcataccctgcgatagtcactgagtgtcggtccacacttggtgacacaggattataccgggcgtcacaaggggacagctgttagtctgggaagctgtcctcaaaatgcttaaactcctcccagatccttttcctcagagcactttgggttcagaagagaaagcagacactgaagttcactgtgctagtgtagggtatagataactcaaactggggaacccaaactacccacttagcttttgagtaggtaataagagtcttctcctgagaagctttgttttcctaatttggctacgttcaaacgaccactaaaataaatgtgaggatccatcgatgggtagaaggtggccaggagggacagtgggaagctgggctaggtttcacagctgattatggtggctgcctggctatggcattgaccttctcagctagagggttgtggtagggttgaggggtgggtagagtggtgggatatggggtcaggtgaaaatgtgttggaactcaccaaggcctgactgttttgtctctaggggaagatgatgaagatgcccctatgataactggattttcagatgacgtccccatggtgatagcctgaaagagctttcctcactagaaaccaaatggtgtaaatattttatttgataaagatagttgatggtttattttaaaagatgcactttgagttgcaatatgttatttttatatgggccaaaaacaaaaaacaaaaaaaaaaaaaaggaaagaaaggaatgaataaactttgtagtaatcaactgtgaacttcaaaccaggttgattttagtaacccaattgctttgatttgacattaatgtagtcttacagggctgtgcttgctgggcatgcttttacgtctgtgagataatttcggttcagtaaattggccaatctttttatttttctaagacacagaaatgtatttaataaaaacctcgagagagtgatgggtggaaccccttctccttgaaagtgtgtacagatattccattttgtttggatatagtttataggaaagtgtgtggatgtattatggcggaaggtttctttatgttattttgttaatttattgggactctgtgtaaggccaggctttagtggtcattagacaccacatgtgttatgagccccttacccatagggttgggggtgggaagagaagcatatttttttgccattccggaagcaatccatttttattcacttgtgtgtcatgtaatggtctttggcaggagagagcactgagtcattgctggagttcagttcaacagagctgcagcttgggaagccctgtaagcccacagcttcctctcttatattaattgatggaattttactgtatgtgcctctgtacaagatgtagctttgagagctacaaaatgataacactgctttattacacactggtttcattgtcattgcaaaaacttaccctggttgtgggggagagttctagatctgtgccatgatccatacactggctaatagagtacataatttttccattttccattttttgtttttacttactactgaaggatctcagatgtaaaattatgtatttggtttgagatggccacttattgtccttaaaaatccatactgatatatgcagtcattttgaattggacagtgccttctctttttttttctcctcttcttccatctccctcacccatgcccccacccaatctaaagagacagtgctgtacattctcatagagatagagaagatctaaaaagttgagactactcaatccagttaacaacagcaggagcactagagtttgttcatttattctctctgtaaaacaagctgtgctttttttcttctgcctttaaaatgccacccgtgtattcaaaccatggccacttgatacttatgtagaatccatcgtgggctgatgcaagccctttatttaggcttagtgttgtgggcaccaatgtcgagcatcgttgtgacttgtgctgtatgattctcactgaagaatttcctttcagccaagaagcagtgaggtctgggaatattccaaagtcatgtctctgaatatgtgtccttgacgtgcaagctttgtaaaaccccatccccgcttaggtgcgaggcatcaccttctcacaagtgtttagtttcttttaaccacaagtatcattcttgggtgataatatagtttcattctacttagggattgtttagaaaacaaagaaagagccaattaaattttttagtttttgaaatttttatttatatgtatacttagatgagtattttaagctgtcgacctttagtttgccatacgggtaggactgtatttcatgttaacaactggtggtaatgataagccttcttctagcgtattttctcttctttcctgtcactttcctaagtttttttttttaaagactggaattttttttggctttatcttgtcttaccgtagagatttgttcaaaactctaagccctaccacctcccctttaataagctctttaaatagttgaatcattaacaacctggtgggaggcaagtcatttaattgaaccactaggaagtgtattttcttttctttttctgccaactttttggtggcatttgtaaaagctgatataaaaggctctgagatgttattttcagttattccataggcaagcctttttacagagcatatgtctccagttggcagcttgagatatttccgagcatccggttctagctaccagtgcctcccaatgcttagtgcacagtactgtagactggccatcacccctctccttggaaaatgccactgtgctgtttgaaaaaaagcagccttttagggctagagtattttatataaacagaagagctaagttcctgaagactaagctagatagctgcagctatatgtaaattgtatatttttatgaacttttgaagcacacactcctgtttccctctgtgtagctttgtggggatttcatgtatatatgctgtctgaaagaatccagaggttggagtgccaatagaaaatgaaaacaaatgccttgtactacaggcagcctctgaaggtgaccacataactgtcttcactgtgaccaatcggagtccctgcttgcttgtgaagaaggggcttttgtaccttgttggagatgccacctcagaagttcacactgtgcaggaaaaaggttttattctctcctggcatacattagaatgtcagatgcttgcatccatgtggaccacgatgggcctctaaaaattggtgggcagggggtttgcttatgagttttctctggaaaccgattttac

SEQ ID NO: 5524 - DNA, 6000 bp, Homo sapiens
atgggtcataattacacgttcaccgtccaagcaagatgcctttttggcaaccagatctgtggggagcctgccatcctgctgtacgatgagctggggtctggtgagttgcgattgctgcccgtttctgtcttcagttctagggaaatagcaagaatgtcatatggtttcatgaccatgtgtctttctaaaacacatggaagatattctcagcttaaaagaaaatcatttatatatcagtttggtcaggtagtgatgtatttaacaaatacttcctgagctgaacatggtacaggaagctgagattacagggggaccggattctgaacataaagtgcaagaaaggcaaggctttgtttaaaaagggaaactctaggttcacaagagtttcatttgttttttgtgggacttctcagcacctctaacatgctaatatatcctgtggatctccaagccagtagatcatctccttgtcatggattttacatgtaaaatcatataactgattttacagtgcacacctctgccccgccccggcttcatcttagctctcagcataagcttaggactggaatttgtcctgggatctctgtcttatgtcttatgctgggccatgctagtgatggaagagaggacccttccgttcatacagaaagtctgcttacattatagtagtttggccaggatttcaacaaatgttttgccactggtcttttttagttccatttactctcagccaagaactaaccagtgctcaagccaaaatcttgtgttagagttgttaaatgttccgtctcatagtgtttctcagggtgagatcttgtgcaatatttatccttggcaccccccactaagagagggaaacactgcctgccacttcccttgggagaatcttaacatattagaggttctaagaaggtcctacaaaaaccagcccaactcttgttgacctagtatttcctcaacagagccccatttttaggcaaaactaattggcaacctgtgaaatatgctttgggaaaaattcctgtgcagacccctcccggccacctttatggaaccaaggttgtcaggcagaagggctcttggccaacatcttgccccttcacgttcaccttccccttggaagtggggtgggggagggagggcactccttcctggagctcccagccttcattgtgccgacttcctcttcactgctccagccgcacacacccccttcattaaccactgcacagttggaataggttggaacatattaaataagatgttgctagagtttttttttttttctggcaaggaaataatgaaagaaatgtaaatacagacacgaatattgaattgttagattaggtttgcaagaaacaattgttctctggcccatcttgatgaataccctgtcagggtgaatgcctggggagtgacagagctttctagtgaagcagagacctggcctgcgccacctctcccgacaccagggagcaaccctgagcctgttgaggctcctcatggagacctagactgagggaagtccagtctgtttcctttgccaaaaactgattcctaggtttcattttcaagttcagacttaccctgggatttttaacatgaaaagtctaccgttttcaaggagactggcccctaccccagcaggatgggacgtggggcatggctttgccctagagccctggtggtacaaatctattagtgaatcatcacagagcctgtttgtttaagtcaataggaaggggccatgtttgttaggttataaatgccgaaacggctttgcaaataactttaaaaaatgttaaatgtatatggaaagttgtttttctccctcactctctttttcacttaagtgaaaaacctcataaaacttcatgagctgttaagtctgtattgtggtgtaggaatctcgtttgtatcacttaatggagcttcaggtaattgcagttcagagtgactttggtgccaagtagggggaaataattgcaatctcgttaattagtggtctgatttcacatcctcttatgtaaggcaagcaagtggtcttaagtaataatgctaatgaaatcaatgttgataccccaacaaaggtctcccttccaagagattatctaaataaccaacaaggcagtgattaggagtctaatgtaattaccatatttgcatgcacaaggcccttggtctatcagctcatggcaagtagtggggaagcaatcaggcatcacgcacatgcagaaacgtctcacaccagacaggcagtttgtgtagctgtggctatcgcccagctttttttggtgggtggggccttgaggagtcatctggtctgttctcctgccctcaggtgggcttattggtgggaactttgccttggcaggtgcagatgcatctgcaacgcaggctgccagatctacggatgttgctgctgtggtggtgcccatcttattcctgatactgctgagcctgggggtggggtttgccatcctgtacacgaagcaccggaggctgcagagcagcttcaccgccttcgccaacagccactacagctccaggctggggtccgcaatcttctcctctggggatgacctgggtaagtggggcagggagagtcggttcttcctcccagggctgacccccacgcagccaatgacttgattaggaaacacccaccttcagctcctcttttgaccctggaggagctcttcatcagccagcgatttgattccatgagttttggttaaaccattcagagccctcactttttaacttttaagttaaattaaaatgttgtattctctttgattgtgtagttctggcctgaaacagggagcttgccccaggccttgagactcccaaagtatcggaaaatcctcaagaatatctgacccctgtctcatccttcactgagctggaggtctgacatctctggagatcctaactcaagataaaaaataatgctttcccaatcagcttctatcaaaggagaccctttccatcttgctgtttctctttctggttgctagtgtaacctcaccagccattcttttatgtaccttaacacagtggtccccaaccttttttgcaccagggaccagttttgtggaagataattcttttttcactggaccagcggtggagggggaagggttgggggatgatttcaggatgagactgttccacctcagatcagcaggcattagattctcatagggagcgctcagtctggatcccttgcacgctcagttcacgatagggtttgtgctcctgtgagaatctaatgctgccctgatctgacaggaggcgaggctcaggctgtaatgctctgactcaccactcacagcctgctgtgcggccccccattcctaacaggccatgtactggtactgatggccctcggcccgggcattggggatccctgtcttaacacatagcaagggaaaaagtaagaagtttcccgttttgaaatctttgcacaatgaaaaccctaaatgctaatagagatagtaagatagtaatataataaagtgggtgtgttacgaggcttccccaaacttagactaatcactgtgaatgtacaagtttatttctttccgttaactagttacaattatatatctatgtttataaagacatttgtatattccccttcactgatcatatgatgttagctctgttccctttccttgtcagtttcctttcttgcctaataagccggcacctggactgccttgtgtgaatggggcggcttctttgcttctgccgttggaggcaacaggagtggacccatcagcataccctgcgatagtcactgagtgtcggtccacacttggtgacacaggattataccgggcgtcacaaggggacagctgttagtctgggaagctgtcctcaaaatgcttaaactcctcccagatccttttcctcagagcactttgggttcagaagagaaagcagacactgaagttcactgtgctagtgtagggtatagataactcaaactggggaacccaaactacccacttagcttttgagtaggtaataagagtcttctcctgagaagctttgttttcctaatttggctacgttcaaacgaccactaaaataaatgtgaggatccatcgatgggtagaaggtggccaggagggacagtgggaagctgggctaggtttcacagctgattatggtggctgcctggctatggcattgaccttctcagctagagggttgtggtagggttgaggggtgggtagagtggtgggatatggggtcaggtgaaaatgtgttggaactcaccaaggcctgactgttttgtctctaggggaagatgatgaagatgcccctatgataactggattttcagatgacgtccccatggtgatagcctgaaagagctttcctcactagaaaccaaatggtgtaaatattttatttgataaagatagttgatggtttattttaaaagatgcactttgagttgcaatatgttatttttatatgggccaaaaacaaaaaacaaaaaaaaaaaaaaggaaagaaaggaatgaataaactttgtagtaatcaactgtgaacttcaaaccaggttgattttagtaacccaattgctttgatttgacattaatgtagtcttacagggctgtgcttgctgggcatgcttttacgtctgtgagataatttcggttcagtaaattggccaatctttttatttttctaagacacagaaatgtatttaataaaaacctcgagagagtgatgggtggaaccccttctccttgaaagtgtgtacagatattccattttgtttggatatagtttataggaaagtgtgtggatgtattatggcggaaggtttctttatgttattttgttaatttattgggactctgtgtaaggccaggctttagtggtcattagacaccacatgtgttatgagccccttacccatagggttgggggtgggaagagaagcatatttttttgccattccggaagcaatccatttttattcacttgtgtgtcatgtaatggtctttggcaggagagagcactgagtcattgctggagttcagttcaacagagctgcagcttgggaagccctgtaagcccacagcttcctctcttatattaattgatggaattttactgtatgtgcctctgtacaagatgtagctttgagagctacaaaatgataacactgctttattacacactggtttcattgtcattgcaaaaacttaccctggttgtgggggagagttctagatctgtgccatgatccatacactggctaatagagtacataatttttccattttccattttttgtttttacttactactgaaggatctcagatgtaaaattatgtatttggtttgagatggccacttattgtccttaaaaatccatactgatatatgcagtcattttgaattggacagtgccttctctttttttttctcctcttcttccatctccctcacccatgcccccacccaatctaaagagacagtgctgtacattctcatagagatagagaagatctaaaaagttgagactactcaatccagttaacaacagcaggagcactagagtttgttcatttattctctctgtaaaacaagctgtgctttttttcttctgcctttaaaatgccacccgtgtattcaaaccatggccacttgatacttatgtagaatccatcgtgggctgatgcaagccctttatttaggcttagtgttgtgggcaccaatgtcgagcatcgttgtgacttgtgctgtatgattctcactgaagaatttcctttcagccaagaagcagtgaggtctgggaatattccaaagtcatgtctctgaatatgtgtccttgacgtgcaagctttgtaaaaccccatccccgcttaggtgcgaggcatcaccttctcacaagtgtttagtttcttttaaccacaagtatcattcttgggtgataatatagtttcattctacttagggattgtttag

SEQ ID NO: 5525 - DNA, 6000 bp, Homo sapiens
aaggcagtgattaggagtctaatgtaattaccatatttgcatgcacaaggcccttggtctatcagctcatggcaagtagtggggaagcaatcaggcatcacgcacatgcagaaacgtctcacaccagacaggcagtttgtgtagctgtggctatcgcccagctttttttggtgggtggggccttgaggagtcatctggtctgttctcctgccctcaggtgggcttattggtgggaactttgccttggcaggtgcagatgcatctgcaacgcaggctgccagatctacggatgttgctgctgtggtggtgcccatcttattcctgatactgctgagcctgggggtggggtttgccatcctgtacacgaagcaccggaggctgcagagcagcttcaccgccttcgccaacagccactacagctccaggctggggtccgcaatcttctcctctggggatgacctgggtaagtggggcagggagagtcggttcttcctcccagggctgacccccacgcagccaatgacttgattaggaaacacccaccttcagctcctcttttgaccctggaggagctcttcatcagccagcgatttgattccatgagttttggttaaaccattcagagccctcactttttaacttttaagttaaattaaaatgttgtattctctttgattgtgtagttctggcctgaaacagggagcttgccccaggccttgagactcccaaagtatcggaaaatcctcaagaatatctgacccctgtctcatccttcactgagctggaggtctgacatctctggagatcctaactcaagataaaaaataatgctttcccaatcagcttctatcaaaggagaccctttccatcttgctgtttctctttctggttgctagtgtaacctcaccagccattcttttatgtaccttaacacagtggtccccaaccttttttgcaccagggaccagttttgtggaagataattcttttttcactggaccagcggtggagggggaagggttgggggatgatttcaggatgagactgttccacctcagatcagcaggcattagattctcatagggagcgctcagtctggatcccttgcacgctcagttcacgatagggtttgtgctcctgtgagaatctaatgctgccctgatctgacaggaggcgaggctcaggctgtaatgctctgactcaccactcacagcctgctgtgcggccccccattcctaacaggccatgtactggtactgatggccctcggcccgggcattggggatccctgtcttaacacatagcaagggaaaaagtaagaagtttcccgttttgaaatctttgcacaatgaaaaccctaaatgctaatagagatagtaagatagtaatataataaagtgggtgtgttacgaggcttccccaaacttagactaatcactgtgaatgtacaagtttatttctttccgttaactagttacaattatatatctatgtttataaagacatttgtatattccccttcactgatcatatgatgttagctctgttccctttccttgtcagtttcctttcttgcctaataagccggcacctggactgccttgtgtgaatggggcggcttctttgcttctgccgttggaggcaacaggagtggacccatcagcataccctgcgatagtcactgagtgtcggtccacacttggtgacacaggattataccgggcgtcacaaggggacagctgttagtctgggaagctgtcctcaaaatgcttaaactcctcccagatccttttcctcagagcactttgggttcagaagagaaagcagacactgaagttcactgtgctagtgtagggtatagataactcaaactggggaacccaaactacccacttagcttttgagtaggtaataagagtcttctcctgagaagctttgttttcctaatttggctacgttcaaacgaccactaaaataaatgtgaggatccatcgatgggtagaaggtggccaggagggacagtgggaagctgggctaggtttcacagctgattatggtggctgcctggctatggcattgaccttctcagctagagggttgtggtagggttgaggggtgggtagagtggtgggatatggggtcaggtgaaaatgtgttggaactcaccaaggcctgactgttttgtctctaggggaagatgatgaagatgcccctatgataactggattttcagatgacgtccccatggtgatagcctgaaagagctttcctcactagaaaccaaatggtgtaaatattttatttgataaagatagttgatggtttattttaaaagatgcactttgagttgcaatatgttatttttatatgggccaaaaacaaaaaacaaaaaaaaaaaaaaggaaagaaaggaatgaataaactttgtagtaatcaactgtgaacttcaaaccaggttgattttagtaacccaattgctttgatttgacattaatgtagtcttacagggctgtgcttgctgggcatgcttttacgtctgtgagataatttcggttcagtaaattggccaatctttttatttttctaagacacagaaatgtatttaataaaaacctcgagagagtgatgggtggaaccccttctccttgaaagtgtgtacagatattccattttgtttggatatagtttataggaaagtgtgtggatgtattatggcggaaggtttctttatgttattttgttaatttattgggactctgtgtaaggccaggctttagtggtcattagacaccacatgtgttatgagccccttacccatagggttgggggtgggaagagaagcatatttttttgccattccggaagcaatccatttttattcacttgtgtgtcatgtaatggtctttggcaggagagagcactgagtcattgctggagttcagttcaacagagctgcagcttgggaagccctgtaagcccacagcttcctctcttatattaattgatggaattttactgtatgtgcctctgtacaagatgtagctttgagagctacaaaatgataacactgctttattacacactggtttcattgtcattgcaaaaacttaccctggttgtgggggagagttctagatctgtgccatgatccatacactggctaatagagtacataatttttccattttccattttttgtttttacttactactgaaggatctcagatgtaaaattatgtatttggtttgagatggccacttattgtccttaaaaatccatactgatatatgcagtcattttgaattggacagtgccttctctttttttttctcctcttcttccatctccctcacccatgcccccacccaatctaaagagacagtgctgtacattctcatagagatagagaagatctaaaaagttgagactactcaatccagttaacaacagcaggagcactagagtttgttcatttattctctctgtaaaacaagctgtgctttttttcttctgcctttaaaatgccacccgtgtattcaaaccatggccacttgatacttatgtagaatccatcgtgggctgatgcaagccctttatttaggcttagtgttgtgggcaccaatgtcgagcatcgttgtgacttgtgctgtatgattctcactgaagaatttcctttcagccaagaagcagtgaggtctgggaatattccaaagtcatgtctctgaatatgtgtccttgacgtgcaagctttgtaaaaccccatccccgcttaggtgcgaggcatcaccttctcacaagtgtttagtttcttttaaccacaagtatcattcttgggtgataatatagtttcattctacttagggattgtttagaaaacaaagaaagagccaattaaattttttagtttttgaaatttttatttatatgtatacttagatgagtattttaagctgtcgacctttagtttgccatacgggtaggactgtatttcatgttaacaactggtggtaatgataagccttcttctagcgtattttctcttctttcctgtcactttcctaagtttttttttttaaagactggaattttttttggctttatcttgtcttaccgtagagatttgttcaaaactctaagccctaccacctcccctttaataagctctttaaatagttgaatcattaacaacctggtgggaggcaagtcatttaattgaaccactaggaagtgtattttcttttctttttctgccaactttttggtggcatttgtaaaagctgatataaaaggctctgagatgttattttcagttattccataggcaagcctttttacagagcatatgtctccagttggcagcttgagatatttccgagcatccggttctagctaccagtgcctcccaatgcttagtgcacagtactgtagactggccatcacccctctccttggaaaatgccactgtgctgtttgaaaaaaagcagccttttagggctagagtattttatataaacagaagagctaagttcctgaagactaagctagatagctgcagctatatgtaaattgtatatttttatgaacttttgaagcacacactcctgtttccctctgtgtagctttgtggggatttcatgtatatatgctgtctgaaagaatccagaggttggagtgccaatagaaaatgaaaacaaatgccttgtactacaggcagcctctgaaggtgaccacataactgtcttcactgtgaccaatcggagtccctgcttgcttgtgaagaaggggcttttgtaccttgttggagatgccacctcagaagttcacactgtgcaggaaaaaggttttattctctcctggcatacattagaatgtcagatgcttgcatccatgtggaccacgatgggcctctaaaaattggtgggcagggggtttgcttatgagttttctctggaaaccgattttactcctggatgtattgaatgccccttgagctttatgagatacgagtccacatggataaaatgttagagagtggagttctacagaggattccaggaagaggccatgtctgtgcagtcctagttccagacaggtgagaagctccaggaactactggctaccttgacaagctgggtaaatagttatcattctgggtaactggttgaaactctgacttttggacaagtaattcctggggttctgtctttggtagcatcaccagggatatttgggtgggacagacagaagacacacagctgcctgttctctcctgcccatcatgtttggcccactagatgaagctgtactcagcaatttagggaatgtaacccttctcagaactggccattttcaggggaagcttgggagagcaatagtatggtgagccccttagagatgagcgcctactccttcttggcgaatgctgccttcagatgcttaccaagtggtcactgcatctagtaagattatatttccagtacacttccttagggcagaaacaccatcctatcaggtttggtcagtcccttcttcatgaagggagtcatggggaattcctgaaaattttcttccttctgcagacagttggatgagtcccttagagaaggcatccagagacataactaaactgaatatcatcccatattgattttaggaattgactctaaaactctgtgcagaatcttgtgttgggattgtatcttgacattcctgttgtgttatttttcttaactggagtgtgtgctgcctttcaggtacaatttttgtgtaataaaagccagtgcattaagtttatatagactactttctatgcaagactgagatatggaatagataggaagagatatgtactgctgggtacatggacagtaagtgtgttttcagatggagtaccagcaccgaaaatgggttgagggaggatgggttgtatgtatgtttctgcccactaattttgagcagccatattatgaattaaatcgtcacagccaagtaataaccca

SEQ ID NO: 5526 - DNA, 6000 bp, Homo sapiens
atatcctttcttcttccggttattgcattttcctgaagcctagttttattacatgattgatcatctggacagacctcttcagactttgacacatctcttttgccaccaaatcttatctgctcctttgagtctctcttgcccagtctatagaaggggcatatgtgtggagagtctaatatgcaagttgttgtttaaataatattttctgataatattgatccattgagctcttttagatcatgctgggccaagcactgtcagccatctggtgggaagaccttccagatgacaagcatggcgctcattggttgaactgagaggggtcttttccttggccacttctccttgccccctcgactcttagcttgagctccagtctttttgagagcaccagtggtttctagttgtttagttggccatatgtgacgctatattggaaaggaagagaaagagagtatcagttgagtgctaggcatcacacatacattattttagttaaccttcccagctctgtgaaatgcagataacatctctaggctccaggaagatcagtaacttgcctaggttacacagatgccagaacaggaattcgaactcaagtttgccagcttccagaggccacattctttccattttgccacacgcacgtttaccatttacgatttactccattgtcagccttccgaaaggacttgagattggtgggactttgttagtgccaatcaagatgccactcgcagtgaatgatccctgttcctttaagaaccaggctgaagctgggctgttttgggacctttacaaaatggaacttttctgcctgacctaattgccaggatagccgactgagccaagatagttttgtgttcaccaagcaactgtggaccaaccttagcttcaggaaaacagtggtaaaaaaagatcgatgaggaacactgccaaagaaataccctttcttccccgactgaaagatggctttgtccgttgagttgaaaactattaagtcctgccttcctcacttttcatcacgtggcttctgtttttgaattcctttttgttttcagtgatcccaccaccagatatccacattgacagctatggtgaaaattatctaagcttcaccctgaccatggagagtgatatcaaggtaatgtgggaatttcaagccagcagctggatggggctttattttgtatgggaactgaaaggacatagcacagtaagactggaaaaaaacaaaaaacaaaaaacaaaaaaaacgaacggctagatctagtgaagctaaaataccaggactagggtggttccttcccccatgaagaacaacttgagtcttcacatgtaattattctgcctcagcctggtgcctttttatccttaaccatataattaaatggttcacagctacagtgcaaataaagagttggtgttaacagaatatgtatgccctgtaattttcagctttattggatttcctggtgctaagcgctaatgctgaggcgctcacagtggaagaacaaccttcttgtgggagagttggataccttggaaacatattcactttccatccacctaagatcttcctcttccagcaccgccatcccctctactggccctctgcatagccgacttcatcattgttacctgtgcccatgtggttcctcaagctgagatccgctttccatagtgttccttcttatctgtccctcctcacagcctctccattgatgaatttgtgttgggacaagttgggacaagcaaccttcagagtctttctgccatttacttaactgccatttagtgtcatgaccttggcttcagaatgggttgatataagaaatggcctcggccgggcatggtggctcacgcctgtaatcccagcactttgggaggctgagatgggtggatcacctgaggtcgggagttcgagaccagcctggccaacatggtgaaaccccgtctctactaaaaatacaaaaattagccaggtgtggtggtgcatgcctgtaatcccagctacttggaggctggggcaggagaatcgcttgaacctgggacgcagaggctacagtgagtcaagatcatgccactgcagtccagcctgggcaacagagtgagactctgtctcaaaaaaaagaaaaaaagaaaagaaagaaaaaagaagtgggcttatatgcttcttgtcttgtagtctttgatcttgaaaatatttttgttcgttgtcccatatttaacgatcttcagatcaaatctttttatgagctcaggacttggaaaaggtagtctttcctgatgggtggatgtattttctgtagttagacaatgagatctaaccagcctgttttgtatggattgtcttcttggccttgactgcaaggatttatccttaatttccatggcctaattatctttccagtgtttcctctttctacctttattaattggttctcgtccttttattcttcattcacttttttgtttcattgaatctataaattaaatatggtctcgtttgtttttagaagtaggtggagtacaactaaatattagctaatggtagcacaagtagaacctgtttaaaatttttaaaaaacaacctgttcactgtaagaatgagatacccaaggaaagaacaggaaagaggtgtatttttaatcctgccttttgtatttagtgtgccccatgactagctgttcatctaacatgcttcttggttctcggcaggtgaatggctatgtggtgaaccttttctgggcatttgacacccacaagcaagagaggagaactttgaacttccgaggaagcatattgtcacacaaaggtaacactttggtgctggtcagtgtgtgtgcaggaaggggtaaggctggaccaatgctttcccgctgtagagcttgactgggggtgccagggaaggggaggtattctctggaagctgttctgtgttgacaggttcttgtgcattgaggatcctataagtgtgctgctgattctaggcagagggattcactcagtggcccctcgagccctcctccaacctcatgacccttagtggaagttgggggccataaggaggaaaattggacagaggcaagactaattctctgcagatgagttttgatttccaaaagaaagagttcttagatatagacagttacctgtctgtcctttctagtctggttcactctcccgttgctaatgagagacagcagaaggccttatgcataactggtgttcagtaaatacatgttgactggagaaatggacaacaaactaagggaggagtggtccagtccctgttacgtatgtaccagcagcaagtctcagctaaaattcctctatctaagcacgtgctaaaggatggattttaatttatttctaagtggcgaaagctgcctgtaactgttgagaatgacttgggagcttcttcctgtctcctccttctaggctgtgaagcactttcagtcatgtttttattgagtccttgtcatagccttataaagtagagactacaaatgttctattgttactttttttttttaactgaaagtctacaaggtgcccgaggaggctgttattttgacttttgcacattgagcacctaccatgtacaggcatttacacaggcattctacgcatattatttacataaccccaagtataattccgtgagatatgcccgctttacagaggcaaaactgaagttgaaagaataagtcatacgctcagacggtggcagagccaggattggaacccacatctttctaactccacagcctatgatctcattgccttagtgttgccccagtagaaactggcagagtcaggagcagaagccttaactagctgttgtttgaaatctattagggctagtgcgatgctaggcattatgccaagcacttcctaagcattttctttttttctccctgccagccagcagctgctgtaagtgctgttatttttttctccatcttacaaacaaggaaatagagagtttaaatactttacccaaggttatacaaccacaaagtatagagtcaggccttaaaccccagtccttctgattccaaaggctatcttgttagcgtaacctcccccttctcacttttctttttcttagttttaatagcatttcctctgatcagaaaggggatacatatttgtttcagaaaattgagagaacaaaaagagtgtaatgaaaattaaaattgcctataatttcacttttacatttcagatatcttctaatatatttttccatggattgatctctttatatcttttttctaaaatcagaataatgccataggtagtattgtatcctgcccttttcacttcacataaaattgtgagaattttccagtgtcatcaaatatttttgaaacaacctttagtgcctgcacagtagttgatggaatgcacattatttaattattatcctgttactagacaatcaaattacattcagttttttcctgctgtaacactgtgatggggatccttgttaaacacacttttgagtctttctctgacttcatgggataactggattgaagggtatgatttccaaggttcttgttatacaaggccaaatggcttccaggagcgttgtaccaactcctatccgcggatgggcagctttaaagaaattacccagtgcttgtgcagtgtgttacgtaccgtcatcatcagtacataaacgttgaatgaatttgtcatctaatgacagtcctacagcacatgggactcatttaagtcaagagattactatttttttttaaaaaagtgcatgtaccaagacacgttcttgactaacacccccaacttcctcctggaatctccttttcctgttttcacagttggcaatctgacagctcatacatcctatgagatttctgcctgggccaagactgacttgggggatagccctctggcatttgagcatgttatgaccagaggggttcgcccacctgcacctagcctcaaggccaaagccatcaaccagactgcagtggaatgtacctggaccggcccccggaatgtggtgagtcagccagaatgaccatcacaaagtgagtgtggactgtcccctaatgctacgccaccacacaactccagggcttttctctcttttgcaaatgttccggtgcccctgctgctcttggatataggcctttctttttcctttgttttcatacgtgcattatgattcactatgatcagatctgtgctcctttttgagtctactgttttactttccactcctccccagtgtgtcccctttgcttttagatcaaccgtcccaaggctcttggcacattcgtccccctcttgcctctgtacttggcttatgccctttctcctccttggtgtccttccctcctcttgctatgcaagaaaatcctcccttctatagttgatctctctccctatgaactcctaatatatttatagttggttccatatagcatgatatttcattgaatacagctttaccctatttgataatttttgtctgttactcttaccttcctaactagtttgtaagttccttgaagggaaggattgttttctggattttctcaatggaaaagcatacagaagtaaatttataataaggaattagtaaatccttagtgatgagcggaggaactagcctaggtctggtcttctgaggatatcttcagcgtgcatttgtcacagggctgagtcatagggaaataaccaaagtttgcaagtagctgtctgtaaaatcagtgaagaagaaggaagaagtaagatttactgagcagccagtaagtgccaggaacaatataaaatccgataaacccctgttcccccttattcctttcattggttctgtgggtaaatattcccattttgccagcaaggaaactaaggctcagtgaggcgaagtaacttgccagagttaaagctctcacaagcagtagactgagtttcagctcaggtctggctaatttaacagcctctgctcttttgtgt

SEQ ID NO: 5527 - DNA, 6000 bp, Homo sapiens
cctacttcagcctcccaaaatgttgggattacaggtgtgagccactgcacctggctttgtggctaagtttttaagaaatttaccaaatttatgtgtctaagagagttcctcgcctcctccctacttcaaagtagttgacatgagcaactgtctgcttgaatgtcatcttttttcattgcctaaagtatcctgaatatgctagcgctaaactcattaaggagcctgctttgaagatgatcaaattcatttggatatagaaattctgtgatgttacaaaattagtcttattttttggtagtcatgcccacagtacagtttttgttgtacaagaagcagaggcagcaggtgctgtcattgacaattaagatctcagcatggaagtctcagggtcagtggtgactcagcctgcccaagtgattctatcctgcagcccttatgagccacaaatttaccacacactcaactgagccatgatgtgatgtgtggacggcacaccttgctttttggaagaagaggaaaagtgtcttttcaatgtgacgaccaagctagcagcctttctagtggatagtctcaatgccggctgtggagtcgttcttgtccttgttctaagcccaggaaaattcctctggttggctgctatgcagatgggttttaaccttgagttgactctttttctagtgccagatgcccctcgaaatctccagctgtcactccccagggaagcagaaggtgtgattgtaggccactgggctcctcccatccacacccatggcctcatccgtgagtacattgtaagtaccttccatgagttggctgtatgtgtgttgggggtgctaggagatttctgggtattctgtatgacgagggggttgatttggtttagctttgtaggtgatgacccatccgtcagaacattttgctcctcaccatcttttctctcctccagcctccttgcaagatattaggatgccctggacctttggttccctttactcacattttttttcttctccctttaggtagaatacagcaggagtggttccaagatgtgggcctcccagagggctgctagtaactttacagaaatcaagaacttattggtcaacactctatacaccgtcagagtgagtgtcgtcatccattccagccatccatgcagtcttagaactgagcgaaattgctgctgttttgtgagaactctctactcacctttgtgagatgcatattagtaatctgcaaaatacccaacttcttgccctgggacgggggagctcagagtttctttcagtctcttaaatggacaccacaaagagcttgacatcagagtttctgtagataaccgggcgtttatgggaatgccgctttccctgcttttaactccggtattctgctagctttccagctcctatacttttgcagtcagctctttcctgcttatctttagctgcaggatgatgcagagctatgataagtagtctttctaaactgattttatgaggttcttatgaaatatatttttagtatttttagcagaaagagatagattttgtgaacaacatgtttgctgagaccattaagtgtgcacattcatgactctcacactgataattttgtcagtaccctttttgtatatgtgtgtatttatgaacacacccccccatacacctgccctttagaagaaccttgatatttgtggatcaatagaaattttctgatctcaggactgtcataatgccctttacccaagctccttcccttggcttttttgccctcttatttcagatgctggggcctctgaatattctggatcactctgtataaaatttttccagcctcactgccaaaatctcacccctttagctcattcagtattcttactgtatggtgtatggtgtattgcctttatttcatattaattcaccctctgatttgaaaaggtggctgcggtgactagtcgtggaataggaaactggagcgattctaaatccattaccaccataaaaggaaaaggtaaatgatcccagcatttgcagatttagagaaaatattatacaaaccctttcaaatgactttcagtatgaccggaaaatggagaaacgtagtttagaaaaacatcacacaactttcttctccccaacacacgcacatttttgggtgtctctgtagtgctttagatagagtctttttggggtgactgagtgtctttttcctcctagtattgagcatttcttctaatgcagacatacaaagggatttccaaaggccatcatgcgcagccctttgtgagtagtcaaaatatctaaaatagaaggagtccttccttctcaccaaagctgaagatgattttgtgcatgttcacttacggggttttaaagaaagcaccatgctgactcttgttattctcccagtggcactggcaaactgtgtgtaggtggttttttatcttgtactagagctgatattagtaataactgatggcttgccaagggcaggacactctagagtgttcactgctttgcgtacatcagctcatctaattgaacagtcagaacaactacaagaaaggataaggaactggaatgaggttatgtcacttgtcccaggccacacaatcagtaagtgacagagctggccctggaacctgatctgcctgactccaaagcctgtgctcttaaccactgtgctccacgcttctctctgggctgagacacatgcggcctactggaccgccctgcttgccgggggtggcgggctcagcatcttgcacgagtgcctcatgagggcagagatctggtctgtttttctctactctatcacgggcatctagtagagactaaggaaataattgatgattgagtgaatcgaagcagttaaatgaagggttctggcatactttgggagatggactacaactcattttccagagtggttttcctgaccttagccttgacactggggacttgcatttctggacttccaggtattaaaaccagatggacactgtggcatgcaataggactggaagattttactttaacctaagcctgtgaggaataggctctgggtcatggagagtcactatctagtcccctctaaaatctggagcctttgagatcagggcccaaggcggccaaacgtagtgccaccagatggtctttggagctgaatgcttgcaggtattagagaaagcctgctgaattcacactctcctagaatttttattgttgtatctcttctctctacaaagtctgtttcaaaacactgaccacacataccaagaagggatgttggaagagcaaccaaatacatgtaccttgaattccgaaggcacaagtcacaactgcatttgaaaatctcagtggatggttggttctctttaacttcttttctgtgattttgatgaatctcagctgcttgcatatatttgggctaggatttgtacagaaggcagctgtgtgccacatccaaaaagtgtttgttgtaaaatatctgtgacatagtatcataataacgttttaagataaaggacaaagacagcagaggcatcagccagacgcgccaggttaattggtgaatgtagtggattagtaatgacaatgagaaaagccaccattccctgagcacttcttatacactaagcaccatgctattgttgctcgtgaatggatcccttattaatccttatgaatcctatgagataagtatccttatcctcattgtgtagctgaggaaatgggtttggagtggattgtgacttgtccctggttgccatgattataattcaagtcagctttaccatatgcagcactcgcactgttttgctctgtgttggccgcctgaagcttccaatatcctttcttcttccggttattgcattttcctgaagcctagttttattacatgattgatcatctggacagacctcttcagactttgacacatctcttttgccaccaaatcttatctgctcctttgagtctctcttgcccagtctatagaaggggcatatgtgtggagagtctaatatgcaagttgttgtttaaataatattttctgataatattgatccattgagctcttttagatcatgctgggccaagcactgtcagccatctggtgggaagaccttccagatgacaagcatggcgctcattggttgaactgagaggggtcttttccttggccacttctccttgccccctcgactcttagcttgagctccagtctttttgagagcaccagtggtttctagttgtttagttggccatatgtgacgctatattggaaaggaagagaaagagagtatcagttgagtgctaggcatcacacatacattattttagttaaccttcccagctctgtgaaatgcagataacatctctaggctccaggaagatcagtaacttgcctaggttacacagatgccagaacaggaattcgaactcaagtttgccagcttccagaggccacattctttccattttgccacacgcacgtttaccatttacgatttactccattgtcagccttccgaaaggacttgagattggtgggactttgttagtgccaatcaagatgccactcgcagtgaatgatccctgttcctttaagaaccaggctgaagctgggctgttttgggacctttacaaaatggaacttttctgcctgacctaattgccaggatagccgactgagccaagatagttttgtgttcaccaagcaactgtggaccaaccttagcttcaggaaaacagtggtaaaaaaagatcgatgaggaacactgccaaagaaataccctttcttccccgactgaaagatggctttgtccgttgagttgaaaactattaagtcctgccttcctcacttttcatcacgtggcttctgtttttgaattcctttttgttttcagtgatcccaccaccagatatccacattgacagctatggtgaaaattatctaagcttcaccctgaccatggagagtgatatcaaggtaatgtgggaatttcaagccagcagctggatggggctttattttgtatgggaactgaaaggacatagcacagtaagactggaaaaaaacaaaaaacaaaaaacaaaaaaaacgaacggctagatctagtgaagctaaaataccaggactagggtggttccttcccccatgaagaacaacttgagtcttcacatgtaattattctgcctcagcctggtgcctttttatccttaaccatataattaaatggttcacagctacagtgcaaataaagagttggtgttaacagaatatgtatgccctgtaattttcagctttattggatttcctggtgctaagcgctaatgctgaggcgctcacagtggaagaacaaccttcttgtgggagagttggataccttggaaacatattcactttccatccacctaagatcttcctcttccagcaccgccatcccctctactggccctctgcatagccgacttcatcattgttacctgtgcccatgtggttcctcaagctgagatccgctttccatagtgttccttcttatctgtccctcctcacagcctctccattgatgaatttgtgttgggacaagttgggacaagcaaccttcagagtctttctgccatttacttaactgccatttagtgtcatgaccttggcttcagaatgggttgatataagaaatggcctcggccgggcatggtggctcacgcctgtaatcccagcactttgggaggctgagatgggtggatcacctgaggtcgggagttcgagaccagcctggccaacatggtgaaaccccgtctctactaaaaatacaaaaattagccaggtgtggtggtgcatgcctgtaatcccagctacttggaggctggggcaggagaatcgcttgaacctgggacgcagaggctacagtgagtcaagatcatgccactgcagtccagcctgggcaacagagtgagactctgtctcaaaaaaaagaaaaaaagaaaagaaaga

SEQ ID NO: 5528 - DNA, 6000 bp, Homo sapiens
aagactctgacttatgaacaataaacatttacttctcacagttctggagactgagaagtccaatatcatggcaaaggcagattcactgtctcatgagggcccgcttacttcttagaagacagctgtcttttccctatgtcctcaaatggcaaaaagggcaatggagctctctaggacctctttcctaaaggcacaaatctcattcatgagggttccaccctatcacctccaaaaggcctccaaataccgtcatattggagattaagtttcaacatgtgaattttgggaagacataaacattaagtctataacagtatccataaaaacattactttaaaataatataaacacttatgaatcagtataaaaaatagaaaacggattcattatgaacttttgaaatgatgctcaacctctctacttatcaggaaaatgcaaattaaaaccaaaatgagatcgcttttcatattcattgaattggtttgcgagaactacagtaattaagtacctgggtagcttaaacaacagtaatgtctattctcacagttctggagcttagaaatctgagatcaaggtatcagtagtgttggtttctcctgagagttgtgaggaaaggatctgtgccaagcctctctccttggcttgtagatggctgtcttctcccaatgtcttcacattgtcttctgttcaaatctttgttcaaatttctccttcttataagaataccaatcatactggattgtggcccaccctaaagacctcattttaatttaattacctcttttaaagaccctatctccaaaataccattacgttctgaggtactaggggtaggacttcaacacatgaattttgtgggggaggggacacaatacagcccataagacttaaaaaattggcaaataatttttcagtctggtaacaccaagtattggcaaggaatggggagaaaaagaaatctcatactttgctgatggaagtataaatcggcacaatcactttagagaacatgcagtaaacctgaagatagacattgtaatccagtaattccacaactatgtatttagtctagagaaacactggcaaatgtgactcaaaaacagttacaaaatattctagctacattatgataaacaaaatatggaaatatcctaattgtccatcaacaggagaaaacacaagtacattctggaatgtctttataatgatataccatgaagcaagaaaaaaaaagtgaacaggagctacaagtatccataaggatgaatctcatagatgtgatattgaacaaaaaaaggcgagctgcaaaaaaatgcaacatcataacatttatatgcaacttaaaatatgcaaaataaaacatatattgtttatggatatacatgtgtaatgagagcatatgcacacttaactatttttaaaccaataaataaattcccaaatgttaactatttttccaccagaacattcaataatataaattcttaattaggctccaagaaataagtactcttaccaaaagcacacacaagtcaattaaaaaacaagtgaactgtaaattcagtgacaattaaataaaaagaatctattctggagcctttaaggttctgtctttttcagctgcacacaggaaaaaaaactaaatgtcatgtttcaatagtgtttaaactatcctgcacacatgcaaaaaaaataccacatgcacatttaagtaaaactctttcaaaataggcaaaacaggatggtgtagcacaaagagactacatttactccaatctgtaatgaaatcctggttttgcctcgctggctgggtgggtttagcaagtcacttattcaacttatctcagcctcactttcttcatatgtaaaatcatataaacttcagttttctcatttgtaaattccctcactttcttcatatgtaaaatcatataaacttcagttttctcatttgtaaattccccattcagtttccttctggaaaggtttgtgtttatgttcggtatctacacataacgtgctcaaatggcacctgtacgggtagaatggtatttgatcagtacagtagaaattaagataaaagtgttattgagtatcagcaagatggcagaatagggctctctaatgcttgtctctcccacagaaacatcaatttgaacaattgtccatgcacaaaaatactttcacaataggtaaggaaaccaagagattacagcacctgggtacagcaccaaaataagaaaacatgcatggaagagggtagaaagaacagctttacattacccatttcacccaactccaggcagcacagggagagataccttccacttgagagaaggagagggcagtgagtacaagactttgcctcagattccaaagctaggcccacccccaataaagcctagcaccaggaagacccccaacagccccaaactccaggtctgtatagcaaattaagtatccaggctgccccatgaccaggctgaccccagtggccccagtctgtagactgcccccagcatcaggctagccctcacagccacaggcttcaggcctgccccagtaccaggccaaacccacatagtcctagtcattgggccagaacctatggacccagcccccaggccagccactgtggatggagactccaggcttgtccagtgccagaccagccccctgcagccccagactcctggctgctacccgcagactgagcttccaaacctgccccaacactatataggatcctgcagccccagggtccaggtctacagagcaaatttgagctccaagcctgccacagcacaaggctaagcccagaggccccaagctccagatcagacccagcagaagacatgacctgcagaatcaggctccagaccaaccccaaggccaggccagcccctgtggccccaggctgcagaccacccctagcaccaagctggatgccaaagtcccaagcttcaggcccacttgaccatcaggccaactcctgcagccttaatgaccaggccagaacccatggaccttgcctccaggaagacctctgtgaatataggatccaggctccacccagtccaagctagctcctatggccccaggcttctatcccaccccaatgccagcttggctcccctggccttaaacagcaggcaggcaccaagacctaagctccaggccttcccagtgcaaggccagtccccatggtcccatgctcaaggccagatcctatggtccaatgatgctacagtaacccagagtccaggagaccccagaagaaccagtccccacgaacccaggctctaggaccacctctgtgtacctactactcaatctggttccttgtcccaagacccaggctaggctttatggatccaatccctaggccaggtcctagacctgtgcctctaaggcaataccagcaggcacaggctccagacccaaagatcccaggctccaggccagcctaatggtcccaggtatcaggcaagtacttgtgatcctaagctccaaaccagtgcccacagacccaggctccacatggaccccagcatcaggctaaccccaggctccaggctggtcccagtggcccagactctagaaaacccagagtccagacctgttccagcagacccatggtccacccccagtcccagtctagaccttacagactaaggctccaagaccaccccttctgacccaggttccatgatagcctttgtggacccaggaaatatttgatatatatctgctatataagatatctgatatataggaaaatatacatatatctctctgatatataagatttcataaaggagaaaagaaagagaaagacaaagcgtagcagaaaacttttcaaatttggagaaagatataaatatccaagtagaggaacagatacaggcctccagtcagattcaacccaaacaagactacaaaatgacaatatgtcaaaaatcaaggacaaagagaggatcctattagcaagagaaaattagcacgaggatccttattagtgagagaaaataagcaaaccatatatgaataagttccaataaggctagcaacaaatttctcagcagggacgttacaggccaagagagagtgagatgatgtattcaaagtgctgaagtgtaaaaaattttttttaaaaaatgtgccaactaagaatactgtatctagcaaagctgtttttcagaaatgaaagagaaataaagactttcacagacaaacaaaagctaagggagtttatcaccaacagccctatcttacaagagatgctagagggagtattcaacctaaaagaaaaggatgctaattaataagtaacgcaaaaacaactaaaagcataaaactcaatggtaaaagaaagcagacaatcaaatccagaatactctaactgcaatggtgatatgtaaatcacttataactttagtatgaaggttaaaagacaatctattaagaataataggccaggcgtggtggctcacacctataatcccagaactttgggatgccaaggcaggtagatcacttgaggtcaggagttcaagaccagcctggccaacatggtgaaaccctgtctctactaaaaatacaaaaattagccaggcatggtggagggcacctgtaatcccagctactcaggaggctgaggcaggagaatcacttgaacccaggatgcagaggttgcagtgagccaaaaaaaaaaaaaaaagaataataatagctacaatactttattaaggtatatacaatataaaaagatgcaaattggcccgggtcttccaggagtcgggttgcttgggaatgcagcccaaagcgggtggtaaactccatttaaggctaaataccggcacgagaccgatagtcaacaagtaccgtaagggaaagttgaaaagaactttgaagagagagtacaagagggcgtgaaaccgttaagaggtaaatgggtcaggtccgcgcagtccgcccggaggattcaacccggtggcggatctttcccgccccccgttcctcccgacccctccacccgccctccctctcccaccgcccctcctcctcctccctaggcattaccattcaggacataggcatgggcaaagacttcatgtctaaaacaccaaaagcaatggcaacaaaagccaaaattgacaaatgggatctaattaaactaaagagcttctgcacagcaaaagaaactaccatcagagtgaacaggcaacctacaaaatgggagaaaatattcgcaacctactcatctgacaaagggctaatatccagaatctacaatgaactcaaacaaatttacaagaaaaaaacaaacaaccccatcaaaaagtgggcgaaggacatcaacagacacttctcaaaagaagacatttatgcagccaaaaaacacatgaaaaaatgctcaccatcactggccatcagagaaatgcaaatcaaaaccacaatgagataccacctcacgccagttagaatggctatcattaaaaagtcaggaaacaataggtgctggagaggatgtggagaaataggaacacttttacactgttggtgggactgtaaactagttcaaccattgtggaagtcagtgtggcgattcctcagggatctagaactagaaataccatttgacccagccatcccattactgggtatatacccaaaggattataaatcatgctgctataaagacacatgcacacatatgtttattgtggcactattcacaatagcaaagacttggaaccaacccaaatgtccgacaatcatagactggattaagaaaatgtggcacacatacaccatggaatactatgcagccataaaaaatgatgagttcatgtcctttgtagggacatggatgaagctggaaaccatcattctcagcaaactatcgcaaggacaaaaaaccaaacactgcatgttctcactcataggtgggaattgaacaatgagaacacatggacacaggaaggggaatgtcacact

SEQ ID NO: 5529 - DNA, 6000 bp, Homo sapiens
tgtaggggaaaaaaatcccaaactgcacagcctagggttggggacaaaaagcaaccaagccacaccgtagtctccacgtgcagccctgttcaggcggcgggtaggggggtgatgtctcatcagaagaggggcctgcctgtccaggtagatcctatggggccacaggcattggatggaggatggaggaggctcagggccagtgccgggactccagctcctctgggcactgggcaggcaatctctgttttctcttggccaaagaaccggaggcctcaggcctgccccggatgggcacgcaggcagggtgcatatgtacgtatgtgcctggcatggtccttgcctgagtcctgcctgctggctgacacggagctggctttcttccctggccctgttaaaacccagaatgtatcctgacagcattggaacaggatgcagagtaggggcctctggcaggacattaaacggcaccgagatagaaggaggggggccctccctgagttctcctctcccctccctgccagccccccagcaggcagccaggcctggacccaccatccagcaaaggctgacagaacagaggctgccaactaaaacctgggcacccggtggccaagaggctagagtttcacaaggacctcattcattcattcattcattcattcattcatttgatgagtgcttccagagcccacctatgacgtgccaggcaaggcggcaggcaggagggccaccatggtgactgagacagactcagggtctttccctacactccagagcacaggctagttggaacaagccagaggcgggcaatgctggtgctagggacatgagcaggggtgaagaagcccagcagggcccagcacaggcacctgagccagactcggcggcctcggagagacttcccagaggagaacgggctacacgtgggcctggaggtgaggtagaagtggcccagggaacgggtgcaggacagagtttcaggaagcaggcctggggtcagagaggcccagagatgaagagcgggtagagtgttgagcgatcggagcagtgaggcggtgggtgggcaggatcgggcaggtggcgggcaagcgtcagctgcctcaacatgcaggaggccaggctttgttctgagggcggctggggccttggagggttttaagccaggtcctcacagatttgccatgtacgaagagttcacccactacctccgctccaaaacagaacatttactgaggctccagagagcctggcagggtgtgtgcttgtcctgagctacagaggacttaaaagatgaacaaggggccaggcgcggtggctcatgcctgtaatcccagcactttgggaggccaaggtgggcgaatcacgaggtcaggagatcaagaccatcctggctaacacggtgaaacccagtctctactaaaaaatacaaaaaattagccaggcatggtggcggccgcctgtagtcccagctacttgggaggctgaggcaggagaacggtgtgaacccgggaggcggagcttgcagtgagctgagatggcgccactgcactccagcctgggcgacagagcacgactccgcctcaaaaaaaaaaaaaaaaaaaaagatgaacaaggagactccccctctctccatgcacaggcaggcaggtgggagatcgcaacaaccattcaccccagtgcagagtggttggcagggagaagagcacaactaatcctgcctcaggaaggctttccaggggaggtgacctttggatgagtcttgatagacaaaaagaagcttgccaagtggctataaagatgaatttaggccgggtgtggtggctcacgcctgtaatcccaacactttgtgggggctgaggtgggcggatcacctgaggtcaggagctcaagagcagcttggccaacatggtgaaaccctgtctctactaaaaatacaagaattagctgggcatggtggtgggcacctgtaatcccagctactcaggaggctgaggcaggagaattgcgagaacctgggaggcggaggttgcagtgagccaagattgtaccactgcaccccagcctcggtgacagagcgagactgtctcaaaaaaaaaaaaaaaaaaaaaaaaagatgaatttaggccaagcatgggtggctcacacctgtagtcccagcactttaggaggccgaggtggtaggatcactagaagccaggagtttcagaccagcctgggcaacaaagcaagaaccccgctatctctacaaaaaattttaaaaaattagcggagtgtggtggcatgcgcctgtagtcccagctactccagaggctgaggcaggaggatcacttgagcctgggaggtcaaggctacagtgcagtatgatcctacctgtgaatagccactgcattccagcctccagcctgggcaacaaatcaagaccatgtcttcaaaaagaaaaaaaaaaaaaaaagaatgtaaataatcacgctccttctgagatgtctgcctgcaaggtgggaatacgatgagagcccccaggcatgaggcttccttcctaccttccaggcccttctgagtacttagatcaacttaatcctaacaactatcctacgagaactccattagacagagaggcaacttgaggctcagactgtgaagcagatggccaaggtcaggctgctggaagctgaagagccaggattcaggctcaggctatagctccggagcccacgccccagcccaggtgctgcccgccccagtgcgctacggagggtcacacagagcccagctggcatcccaagcctctgccctcacgctaggcagtccctggggagattggatgaggggctcagggaccccccatgcccaatgtcctggctcatttgggtaaactaaggcctggcagaatggaagccattctcattacaccacaggccagggccaagtaggcagggctggtgggggtgggaggccggccatacccacctgtaggcacatgcggctccaaggagatggcagatgggaggggtggggagaggccttgcatggcacccactcccacctgtgcggcacgagagggagggaaggagcatcattaacacgacatggcctcctccccactgctcagcctctcccggaggatggtgaggggggaatccattatcgggcaaaatagcagctgctgacgtgaaaatgaaatatagattcaatacctgagcctttcagctcacaaatcatgcccccggcccaggtgacagccagcacagacgcccagctcagataacagaagggaggagataggtcggggacggggacagacggcacctccccaactccccagcccctccccctggggctcagggacccaaagcagggaccaggacccaggcttgtctccctcctgtccctaggtgggtgacgcaccaacatgcccgtggcctccggtgcacacacagggtccccaagcaggcagctggagggctggggtgcctggagctgccctgcctgcagtgattgcggacacgcccctcgcgaggcaccgcaggctgccacccccagcttgtgaactgggggtggccccagagctgtttgttttccctgactgaggggcggctgtgccacccccacactcctgaaatgggtgatgagggggttgggggaggagctgagcggcccacttcctgctgctgtccatttagccagcggttcgctcggcttttaggagggggctggcggtgaacccatccccgttacaatgcactcagggaccctgacaactaatttaatttaaaacagccttgcaataaaagctcagaacggaaaaccgccggtcttgggggttatttaacaaattgcctcacagataaatacattaaaatgattctcaaaccggagccgggcgaagttgaagtaaaattaagaaagttgaatcaaaatgtaaattaatggcattaagatatggcgttcaaattggcaggactcacgcttcgggagtgttggcaacggttctgccttctgttcaggtgatgtggcacctccacgcggtgtcagaaaccccttcagtcccaggcattggggagctggtggcaaggccaccccaaccccacccagcacccgcctgtcccactcttccgcctttggggacagtgatgcctaccaggccctggcaggctcaggcccagctgcccgcatgccctagtagctgtaaaatggaggtatctactgcattgacctcaccagctgctagcaaggaataaaagagtctgggcacggtaagggctggcacagattggagccctccacaaacatgaggtcctaggataacgatggttgtctcccttgcacatatttactgccgattactcttacagagccccgcattcccatttgattggcagataaactgaagccagggaagcccaggcagaatagatagggttccatgtgcagaggggcttttgtctctaccccctccagcctgcaccaagggtcctgatctcacgtgtctgtctctcccagctgagggcagagaagctgcagctgggacagctgctagcctgggagcccagataatgggctcagaacctgggagcacccccatgggcatgctcccccatcctttgtgggcctgtgtcactgagcagccctcccagcctggttgagtgagcctcggccttccccggaggttcacagaagtgtggggacttggcgggaaatgggcatccgtgtgaacccccaccccagagtggcccaggtgccaacagacagcactgggaacattatctagagctgcctatcctgatagtgccactcactaatcagcttgggacagaaaagaagagggattcctccgggggcagtggcaggtgggggtggggcaggatgggggcaggagaaggagccctggagaaccagttaggggtgtgagggtgacggtgtccagcacttctcccaaccttcgattgcaggggtcgagggagaggtgcggggagcagagcaggagggccactgcgcgcggccgggggcccgaggtgggcgccttcacctggatccgcagttctacctgacaccggagacagctctgaaccgcaggggaaggtgctgccaggcctggatgaggcacggctgtcagccgaagagcctggggggcacaggaggctgccagaggatgggggtctctctctggcccaaagccccaggagccagaccttctccctgccatctggctcagggaccctgggggtcttggagcccactccccaaggacaagctgctggccagtctggtcccctttagcctctggctctggggtaggggaagggcaagcacagccacaggaagcctttgtggggagggaggggctctccctgcccgtgtggtgcccctagctgtggggccaggtgtggagggggccagggctgctgatgcctcctgcagtggcctgaccccatcctgggcatggggaggcagcccctccatggcttccctgcaggggcacaggcagagcaggcggtggtggggctggtgacacccccgggcccggccccggcagctgtgtcacctaaatgcttcgccaggaaacctccgcacgctgccggccactgcagacgcagcagacgcaacaggcttcttatcgacagtcattaagtctttagcaaatggttcagagagaaaaaatagccacgatgaggatttatcttgggcgcccctcccagacctcaactgagaaggcacatgtcaccctgagcccgactcgcgcccagtgggatcaatgtccctctgcagggggcagagcagggggccaggaagctgggggacaggcggggatggtgagaggtgtccgccagaccaggctctgtgctaagcactccctgcagcctcttaatcctcagggcagcatgagagatggatgctgttatcactattataccccttacatagatgtggaaactgaggcccggagagaccaggtcgtgtgctcagggtcacacagctggttgggcgacagagatgtgaggt

SEQ ID NO: 5530 - DNA, 6000 bp, Homo sapiens
gcagaactgggggtcccccgcctggggaagggtgcacgggacagaagccttcctcagctgcagagatgcctgccagaagcctcagggcgctggaacttttaagaaaatggtcaattctggccttacccagggacagagctggccagagtcacatttatggtggtaaatagtgaatgttggcgaaatgctttctaaaaatgcccttgcaaggaagggagaggaagcctaggaatttgtaaagtaacaaatgcctgttgtaatatttcccctggtgcggtaaatccataaaggtgagtggattacagaaaaactcaccgtgccacacgcacacctgtgcccgggagttttctctggcttgttggagggagcgtggacagcaggactgctccccaagtcaagatggttaaggcctggaggtgttggggaggcagcaaggagacagagttgtccctgcaatgaggacgggaggggtttgggtccccaccccaatgccaccctggtgtggcaggcaaggatggcttcaggtggtcctcaagggcagaggcccagctgggagagggtctcccctgcaggggcttcaggctgggggtcgcctgccaagcactgtcagccaagagaggctggagccagcagggtgcctgagaccagcccagagagagtacaggggcaggttctcagaggcaccgactccagctgacccagaggggctgcctctgagcagtgcctggacgagtctgctcgtccagacactgtgtctgtgtctgtggccgcgcccaggaggctgttgggggcggggggggaggacaggtctctgaggggcccagggcaaaggtaatgacaattggtgctcacacctgcctgtgggatttcacctgggcgctccctagctctcgctggctttgtcacccggaccgctccacgggtggctgccatatcccacagttaaaaggaggctgcagggacggaggagctgcctctgctgcatgttgggcctcagggggaggcggtctggtggacggggtcttctgaagtgggaggaggaaaggcagaggaacagggtccagggtccacagaggaagagcaggaggcccacggggaacctcgaccaaagttctctgccaaggcagggcagggccacctgccaggacgtccaggccaaactcttgcctcttcaggagctgcactcaaacccggaagccaagagtcaagctgagtctgggggaaataaagtttataataatagacttgaatgtggaaaaataaagcaaatttaataagtttattaaagtgtgatgtgtttgtgttagaatatttgaaaacaaacataatgaagaaaagcataataccccatccttagttcacattgttaagcaaatgtaagtatcaaatatcagtctactcttcccatattttaatgccccttagctacgtttacataaacattttatacatgtttgtgataggagcatcaaaccaccatggcacacgtttacctgtgtaacaaacctgcacgttttgcacacgtatcctggaacttaaagtaaaagaacattaaaaaaaaattaatctccgccaagtgcagtggctcatgcctgttatcccagcgctttgggaggccgaggcgggcggatcacctgaggccgggagttcaagactagcctgaccaacatggtgaaaccccgtctctacaaaaaatacaaaattagccgggcgtggtggtgcatgcctgtaatcccagctacttgggaggctgaggcaggagaatcattcgaacccaggaggcggaggttgtggtgagccgagatcctgccactgcactccagcctgagcaacagagcaagactccgtctcaaaaaataaaaagaataaataaatctcttttaatctaggaaaaatttttatatgtttgtagtctgttttttttacttagcagtataacataagcattttcctatgttctcaaaaactctttgaaagtataacttctaatgtctgcttaatcagcatataaatatgaataccatgttttcgctgatattttcctattgttgaacattggtggtttacaatttttgctgcaaatgacatatatacatattttcattattttgcatttttttagaacagtttacaaaaagttagattaatgaaccaaagtctaaacaattttaaggctcttaatacgtattatagctgaattgctttctgaaagggctgtactggttttctgtccagataggactgggtggggtccccctccctctccacccttcactgatcgtaagggaacttccacgctgggtgaggccagcggccaatgcagccgcctcgctgagctctctcccctgaagctggatatgctggctttacagccaggactctggaagtgactgaggattcctctggtgacgcccacggaaggtgtggggggaggaggaacagtgtttctgcaacgcaactgggaatgctgaaaaagtcattgaaagagagcacagcagctgtgtggacacttgaagtggcgcctgagtaactcacatgacctgctagcagattgttttaacacactgaaaacgtggagattgttttattatttatttattgatttatttattttgagacggagtttcactctgtcacccaggctggagtgcagtggcacgatcttggctcactgcaacctccaccctccgggttcaaatgattctcctccctcagcctcctgagtagctgggattacaggcgcctgtcaccacgcctggctaattttttgtatttttagtacaaatggggtttcaccatcttggccaggctggtcttgaactcctcacctcgtgatccacccacctctgcctcccaaagctctgggattacaggcatgagccaccgcacccagccgaagattgttttaacacagtgtgaaaacatgagcacagagacccctgagcgggctgagctggggactggggagcgacacccgtcacggacggtgcaggggctgggaacgtggatcttgcgtgtgagttcctcccatactcaacaagccttgcacattctgtttctgaactagatctaacttggcagctgtgaccccctggtgagactgccggatgttccctctcccgcttaccctgctttcttccatgggaaaagagctcacatgccccaggcttccttgccatagagtgtggtcacgtgactaaccatgtgaagggtgaggttccctccttcgccctttcctcttcccactggctggaacgtggatgtgatgactggagcttgagcagtcattttggaccaggtgctgggaccatgtatttaaggtggcagagcaacaagctgaaggcattctgggtctctgatgactatagttcggccatactagtccaggactagccaactccagatttttgttttgctttgttttaaagacagagtcttactctgtcacccaggctggagtgcagtggtgtgatcttggctcactgcaacctctgcctcccaggttcaagcgattctcctgcctcagcctcccgagtagctgggattacaggcgtgcaccaccatacctggctaatttttgtatttttagtagagacggggtctcaccatgttgggcaagctggtctcgaactcctgacctcaggtgatccacccgcctcggcctgccaaagcgccgggattacaggcatgagccactgcgcccggccaactccagatttcacttataggagaaatacacagcttgtttaagccaccaccattttgcacacagatctgaatgtgttccatttggatttgccccatctgagctcacaggtcctcggccaccacttcactcgcttgtctttgccaaagtggcaaagctgtggtctctgctgccatcccagcctgccaggaggtcccccaaggagaaacatgggtgggaccatgttaccccttggggaaaccagagccgactgttggccctgggcctggaccacagcagagggctgctgggcttgccggggggtgctctggccccagtgggcctggagccgttccgtgtgacagcgtctgcctgcggagctctggccctgcctccccagctttgcagcagctttcagaagcagactcctcgccacacacgctgcagataatgtgtgccagcccacggcctgggcccccactccccgcagcccttccctcctcagggcactccactggacggtcactctcaggacacccagagcctgcccagctgccgccctcagcccaggctgcacagaacgtgctcagggactggggatgcggggtggagggctcctcctccgttgtctacacagcctggggccagccacgtgtccccaggactccaaggattccccagtggggcccagaaagcaggggcttgggtaggagcagacagtttctttgggagtctgtctcgtcgtcagtcctccttgccccagtttctcctctaagggaatcagcactggacctgtggggtggggggccgtggcccggggtggggggccgtggcccggggtgggggaggccgtggcccggggtgggggaggccgtggcccggggtggggggccgtggcccggggtggggggcatggcctggggtgggatgcttttggagggaacatggggatgtgtgagcgggggtgagagaggcaaggcaagtgggggcgttggtgctggctctgtcaggggctctgtgccatcctgcttccccctaggaccaggtgtcatgagacccatctcacagtggaaacccccttcccgggaactccagcctaggaattcccctctggcccctgacccgccatctgggctccaggaaggtgtcccaggctccaggggctggggtactctcctggcctggatgctggctccgccccgactacacccaggcgcggcagctgcaggacgctggaggaggaggagggaggggcgagccccacgcggaagtcaggtaggagcacccgccgctggcagccactctcctggccgccaaaccccagctggaactccggccacagccagcatgcaggtgagtcctgcgctcaaaagggtccacaccttcaaggcccccagccacgcccacacctggggcccccggccccagccccccgccagccccacctggaaggcgcctgtgtgtgtggggggggtccctgcaggctgcccggtcaggcgagggtgaccgcccggctcagctaagctgcctcctggactcctggggcacgctgggggttggaagtgctggaggcgggcggcgttcctccctccagcccgggattctgagggcaccagggctgggctctcagctagtgtgtggggccaggaacctctaccagagtcctgaacacgagatggagagggcctgcccaccgaggcgggggctgctgctgaggaccccagacctggcagctttgccttgcagctggcccctaagggggagcgggctgtgggcaccaggcaggctgccccagggttgggagctgcagagtggccggcgggctgtgggctctctgctccccaaggaccccgcccagcacaggtgggggccgactgctgctgctggattccgattctgggggtgggcgctgactgctgctgctggattccgattctgggggagggagtgcaggtgaacacgtagaaagacatcctttctcccctctgccagtgaagaggtcacctggggccagggccaacacctgggcaggtcagcacctggtcggcccagggaggaggcagtggtgaggtgtggagtgaaaccagcctccctctcggcctgccagggcctccacgtgtgggctgcgccggcggcctcttgctccatctccgcccagggctctcctcggccctccacatccaggtctgacaccctggctgctcagcccagcacctgatgccccttagcctgagctcagggtcccctctgccagccccttcctcccatgctgggggttagaggagagacttggggctggccaggggttgggttgg

SEQ ID NO: 5531 - DNA, 6000 bp, Homo sapiens
ttttttttttttttttttgagacagagtctcgctctgtcacccaggctggagtccagaggcgagatcttggctcgttgcaacctccacctcccgggttcaagagattctctgcctcagcctcccaagtagctgggattacaggcgtctgccaccatgcccagctaatttttgtatttttagtagagacggggtttcttttttttgttcgtttgttttttgagacggagtctcgctctgtcgcccaagctggagtgcagtggcgcgatttcagctcactgcaacctccacctcccgggttcacgccgttctcctgcctcagcctcccaagtagctgggactacaggggcctgccaccacgcccagctaattttttgtatttttagtagagatggggtttcactgtgttagccaggatggtagagacagggtttcaccatgttggcctggatggtctcgacctcctgaccttgtgatccacccgcctcagcctcccacagttctgggattacaggcatgagccactgcacccgaccgggtatctggagatttttacctctccagtgctaggaaggggctatgcccataaactcaacaggaagcagttacagaagatggatctctgcccttccgctgccctcttaagattaagaaggagtatctaatctctgagcgaggaatgaggtaggtggcaggactcagctctggaggtgggacacagacaccagaccagattgagaactagctaaaacagggaatgctgcgcatggtggctcatgcctgtaatcccagcactttgggagggtgaggcaggtggatcacttgaggccaggaatttgagaccagtttggccaacatggtaaaacaccatctctactaaaaatacaaaacttagctgggtgtagtggcggatgcctgtaatcccagctactccggaggctgaggcagagaatcgcttgaacccaggaggtggaggttgcagtgagcctagatcgtgccactgcactccagcctggacaacagagggagactccgtctcaaaaaaataaaacagggaagaggtgaaagcacctctccataagacctaagacccgtaagaccagtgcatgtcagtttaccattgccatggcaacacctagaagttaccacccccttcggtggcaatgacctgacggcccagaagttaccactctttccctagaaatttctggataattcacccctcaatttgcatgtaattaaaagtgggcataaatatggctgcagaactgcctctgagcagctgctgggggcacactgcctgtgggatggccctgctccacaaggagcgacgcctgtgctgctgctgtgcgctgctgcttctgtaaaagttgctttccaataagtaaaaaataaggccaggcacggtggctcacgcctgtaatcccagcactttgggaggctgaagtgggcagatcaactgaggtcagaagatggagaccagcctggccaaaatggcgaaatcctgtctctactaaaaatacaaaaattagctgggcgtggtggcagacgcctgtaatccaagccacttgggaggctgaggcagaagaatcgcttgaacccaagaggcagagattgcagtgagccgagatcacaccactgcactccagcctgggcgacagagcaaggctcagtcttaaaaaaataaaaaattttaaaaaatgtttaagttgctgtctaacaccaccagctcacccttgaattctttcccaggtgaagccaagcactctcttgggctaagccccaattttggggatcacctgccctgcatcagccttgctacgctgaggctgatcttgaattcctggcctcaagtgatcctcctgcctcagcttccccaaagtgctgggattacagacatgagccactgcacccagcctgaaaaggagtgattattctttgagagcatgttagacaaagagtcaaagacagacagataggaaatatgtgcaaggtcataaaccagcaaggaattaatgattagatatgttgatatgcaaattagtggaaaaaggctagaaacccaatagcaaaaagaaagaccaaagatatgaaaagccagttcacagacaagggacacccaatggctgacaagggcacaaagagcagctcaaactctccagccatcagagaacccagaggaacatgaggtaccactttaaattcatcagatcggcaagccattaaaaagttggatggtaccaagtcctgagagaaccagaagcctcaggtggagtgtcaactctcacagccactcaggagagcatctgtggtaccctgtgaagtcatgagtgcgtgtgccctataacctggaaatcctaccccaaggggaattctcccacagtccataaggggacagcaggaagatgttaactgcagtgatgcctgtgatggcggggttgaggccagtttgagtgtacaacactgtggaggtgaggtggatcataaaggtgctagacactcaacatggtacaacatgcatgtagcctgtagaaacaataaacaaatgcatatggaaaacagcatcgagagcaaaaatgtaaacgtgtaagtaacagaactgaattttctgcatgacatcatgtttgtaaattgcaaacacatccacataggagacagtgccatacatggtacagagccaggcaggctttaaggacgccgactgagcatgctgacatgggtctgatggaaggcaggggagaggaaggaacctgggaagtgaaagagggtaagtgaattaacataactcgagaggggccttattcatagtgttgatgtgtaacaaacagaagtagacttgactcagctctgtacatgaggccataaaatgaacatgaggccgggtgtggtggctcatacccagcaccttgggaggccgaggtgggcagatcacgcctgtaatcctagctacaggggaggctgaggcaggagaatcgcttgaacccagggggcggaggttgcagcaagccgagatcttgccactgcactccagcccgggtgacggtgcgagactctgtctcaaaaataataataataataataataataataaggcagggcactgtggctcatgcctgtaatcccagcctcctcgggaggctgaggcaggagaatcacttgaacccaggaggtggaggttgcagtgagctgagatcgcactccagcttgggcaacagagcgagaccctgtgtcgaaaaaaacaaaaacaaaaaagaactcttgactaaggtccataaagctctcaaggctctggggcccatctactcctcccaggctcatcaagtcggcctgcccctttccttgctgctcagccacactggttttctcacattcttcctccacaggccaagctccttcccacctcctggcctttgaacgtgctgttccctggtgccaggaaaacactgaaccttgcttttctcacagctggctccttcatcatcggcattcctgctcaaatgtcacctcttggaaaggtcatctttgagtacgaaatctaaagtcagttttgcatcacacagcacttgaaactgtctcattttgcactgttttattcaccactgtatctatagtgcccaaaacagtgtttggccctaaatagatgcttaataaatacttgtggcagaaatgaatgaggggtttgccaaagtcccaagtacttacaagtggtagaatggggatttgaaaccaggtccacctaattcatagagtacttctgctcttccacccccaccgccccccaccacggttcattttttttttatggagtcttgctctgttgcccaggctggagtgcagtggtgtgatctccactcactacaacctctgcctccagggtacaagcgattctcctgcctcagcctcccaagtagctgggattacaggcactggtcaccgtgcccagctaatttttgtatttttagtagagactgggtttcaccatgttggccaggctggtctcaaactcctgacctcaagtgatccactctccttggcctcccaaagtgtgagccaccgtgccctgccaagagttcagattttattctaagtgcaatggaaaaccaagggaaggtttttttgtttgttttgttttgttttttgagacggagtcttgctctgtcgcccaggctggagtgcagtggctcaatctcggctcactgcaacatctgcctcccgggttcaagcaattcttctgcctcagcctcccaagtagctgggactataggcatgcactaccacgcccggctaatttttgtatttttagtaaagacggggtttcgccttttggccaggctggtcttgaactcctgacctcaagtgatccacccgcctcggcctcccaaagtgctgggattacaggagtgagccaccgagccaggccagcagcaaaatttttaaaaagggttttcagaataacacacgcagataaaaagatttgttttaaaagatcacttcggctgctgcgtggagactgactggaaattggaagacacataagctctctgagcctcggtttccacatttgcaaaaatggggagagcacccctccggtgcggggctgttgtgagtaaggtggggaaacagttcccaggagtctccttggcactcgaggaacaggctgcggtgcaaaaggccctgtcagggacctggaggttggggcgtggaagcccctccaagcccccgcacatacacgcctgggggatgtgtccgagcccggcacgggctgtcgcttgccatggcggccactgagtggcgtcacggggcgggcgcgctccgtctggaagaggctcccacccatcagcccgctcagggctcggcaactctggcctgcttagggcggacgggggcgggaccggcgcgtggggcggagccagggtcggaggggcggggcatgcgggggcggggcagcggcgacgctgggtgtgtgggcgcagatggcggcggcgcacggcgcctgagcgggccggggccatgagcgccgcccggccccagttcagcattgatgatgccttcgagctgtccctggaggacgggggccctgggcccgagtccagcggggtcgcgcgctttgggccgctgcacttcgagcgtcgggcccggttcgaggtggctgacgaggacaagcagtcccggctgcgctaccaggtgaaccgcccggcccacctaaccccctgcccccggccggacgggaccccaggccgggccccaaaggcctcaactcggggaagcatctgcctagaggccccagctgaagcgcgagaccgcccccccgccccgcggacgtgactcttgatccagagccctgcccaggccctcccggttcccataccgggccccagccagccgggaagagcccagtgcccgggcccgggagctcatccctcagctccagctggggaacccaaccggattccccactcatcctggctactcgcacctggcccccgctgggttgggggagctcctctgtatctgaaccagaccttgccccacacgcaggagcatcccctgtgccccaggccagctaagctgatgggaacccgcacgcctttctctattctgaaagccctctccctaatcccaccaccacccctaagagctggagctcctctcacatgaccagtccttgcccaccctttggctcccactaaaccagaaaaacccattttcccagaaaacctccaccaaccctaggctgcttttcttggagacctggaccagaaccctgtgccttgaacctgggaactctgggcctggcctttcctggcaccccaattcccaagctcccattctaggccactgaatgagagctccaccctaacccaaagttgggagctctcctttccctgggatctatgcaggctcctgctccccaaagccctggcatccacccacctcctacctggtttctgtgaatcaccaaacccgttctgcggggagggcagagggccaggtgaacagct

SEQ ID NO: 5532 - DNA, 6000 bp, Homo sapiens
tgaaaagactacaagtaacaggtgccaatggtcccagggaaaatccctttctggagactggacccaccctggcatctgccacttggaaacaaggttgcctgccctggttgaccagatgtccccagatcgccgaaggccccacacataaaacataaaataagctgataaaacatgatcacaaaagggctctgaaggtggcacagacactatttgaaatgcaactggctttcagcagttttctaagtagacagcagtcaggcgtgggagactgcaccataaatgctacgagaacaggatatgggggagggaaacgccttgcttctttcagctggccctgcagctataggataaggagcacaggcagggccgggcctcgggcagaggctgaactgtggccggacagcagcctgctgggagtccctgcccaacgcaggccacaagcccatctgacaggtgtggctcttcacctggccttccgaggcagcttctacctcagctgtaatttctcccacctccagcacagcccgaaggcctctgagagcagagcgagccagtgcgtccctccccagctcacagagcagacgttcacacagcgggctgaaccccgggagagcctcggggaagccggaggcccccagcgtggcaccacccgccctgggctgtgcccctcggagcagcttaccagaacatgtcctgagatggatgccgcgttcgccacagacgtggtgaagacattgtctgcagcagcccccacgttggccactgtcactgtggtcacctctgcaacagaaggagcctcatttaacaagcaacaaaagccagaatggacaaagcgaacagcctcgctcaggtgcttcaaacaaagtgactccccctcaggtgtgtgcccttgtaaccaggaagatcttaacacttccatgaacacgctcgacctacatttctattccattgtctaagtcattcggctcttccaggaaaaagagaggaaatctattcttccccagtaaagccttttacgtgcagtaaaaaatgcatacaacaaacccgccaccccagccagccccagctctatcaaaccaccacggggcttctatctccttctgcggcacagctgtgggttctgctggtcaggtgtgccctatgcctacgaggagctctcggcctccccgcaggtgaggacacctcctggacccactcttgtagctccattcctgcctctcctccaccgcaggggtcaggccaccatcgtcaggtgacctcggccccatgctcacagccattgcccttggtctctgaccccttcctcctaaaaagtacatctaacctgcctatgtcccttggtgccaccccaccgcaccccctacaacatggaactcagccccctggcatgcagacaggcccttcagcagcatctgcacacagggcagttaccacagaggtcagctgcaccccacctcctgcccctgtcatcccagataggtcctgcagctccagcctctacatgctggagtgtttctagagaaacactttctgccgccaacacccccacaccctcctctctgcctctgcaaagtcttcctgtgatgctcctaggccaagcaagtggctcttctgtcacccagagttctagaatgtcctgtgtccagggcaatctctggcacacagcagatgcttaaaagatactggttgaatgagtcctgaccataccattaacccagcactcaccaaactgccctaaaaatgcctgtttgcagccgggcgcggtggctcacgcctgtaatcccagcactgtgggatgccaaggcgggcggatcacctgaggtcaggagttcgagaccagcctgaccaacatagagaaaccccatctctactaaaaatacaaaattagccgggcgtggtggcacatgcctgtaatcccagctactcgggaggctgaggcaggagaatcacttgaacccgggaggcgggaggttgcggtgagctgagatcacaccattgcactccagcctgggcaacaagagcgaaactccgtctcaaaaaaaaaaaaaggcatgtttgctgtctgtctccacgaccagaccacaccaggtgcacggttccctcatcctcgcctctcagcaccacaagccccggcatgcggcgcgcggccacagtgagtgctcaacgccaggcccatggcagccctgggagcagccgcccaaagcctcctcaggcggcagcgtgtcctgctgagttacttaaacctggaaaccacttgacgtcagctgttcgtaatttttaaaaagtattaaagtgcttttaccacatcaaaacacaactaccatatttttcagaagaaaacacacgtcagcacatttctctgacatcatgatgaacagcatcatttttcttttatgcattcagaaaaatacgtgcaaaaatgacaaaaacctgaaatcaacctcatggctccaaatcccaacgtcaaaccagagtttagcgacggacgccaacccctgagagtcacaaagccttccctcacttttttttcttaaccaaccaaacaagcagcagtgacccctttgccttcgagggccactcagctgaccaagggcagcccagacgctgctggcccccacccagcccccaggccgaacaagcacccagagcacacgcaatgccctgacatacccagcacaccaggactgggatccagttcctcaacccgcaaagctccgtaggggaaaagtgcctcacaacgcaacaagaagctcctcccaagggtctcaacactgagctgtgagtccctgggggacactcgggaactccaatggggaagaatacagtgcgttaggaagccagtgggtggggaagtctatgccccacggacacaagggcgggacacaggaggtgggtggacggcaccagccccgtagggcatctgtgagctctgccacgggctcccagtgttttggagcctgagaaggagactgacctgtgtggcaagaaactataagcagcttatataaaaatgtggactggaaagccacagcagcctccccaaaggaagcccgacaggaagcggggcaggaggagcaggtccttagggaaaaaggcaagaggaagagggaggactgggaggggagcctgcacaggtggctccgcagcccccctgggccaccacacagccacgctgacctctggcatcatggcctccagcaggctgcccacccctggctccccagcgctcaggtcatgcctgaactggccctcaggaagtggggggttcctggtgaccacaggtgcccacccaccccagggcttctccaggacaggtggggggagccaggatggacgaaggcagggcaggggcagagctgcacaggggggaccagtaggaggcggggctgccacaaagaaaaggggggcagggggcaggtgtgtgcagggcagggccaggtcaggtgaggctaggcaggtcaccaggggcaggtgtgcggggcaggtgtttggggtaggtggggcaggctggtcacctggggcaggtatgtggggcaggtgtgcggggcaggtagggcaggccgatcacgtggggcaggtggggaaggctggaaacgtcgagcaggtgtgcgaggcaggtatttgtggcaggtggggcaggctggtcacctggagcaggtacgtggggaaagtgtgaggggcgggtggggcaggtgtgagaggcagatgtgaggggtgagctagtcacgtggggcaggtgtgcagggcgggtggggcgggcgggtcacgtggagcaggtgtgaggggcaggtgtgcagggcgggtggagcgggctggtcacgtggagcaggtgtgagggacaggtgtggcgggctggtcacctgggacagttgtgcggggcaggcgcgcggggtaggcgcgcgggaaccggacgaggcgagaggccggcgggcgcacttgcctgcgaaggctgcggcagcggcggcctcgtcggggccgggcagggcctcggcgcccatgtccatgtgcccgggctccgccgccatcaccgccactgccgtgacccgcggcgtctcccgctccgcctccgagtctgcgtcctcctccgagtcctcgtccctgctcagcaccggctcctccgcctcgcctcctgccgcggccgcggccgccgccgccacagcggccgcggccgccaccgccgccgcctcagccaggcccagctgctttgccgccgagtccgagtcctccatccggactccgccgagccttcccgaaggcgccgtccgggaccgcccgaagcgccggtcgcggagcccgaagcggggcccgaagaggacgcccgagctgggccgaggccgcccgaagccgccgcccgaatagggaccgaaaaggcagccagccgccgagcagagccgagccgagtccgcccgcggagcggagccgaggcgaacagaggctgcccgagtaggagccgaacctgcacgaagccgccgagccgagaccgagtcctgaaccgaggagggtcgaagttccccgaagtgggaagccgaatcagtccgaataggtccgagtcctcacgagggcttccgagagactcggcccctgctctcctcactgtcctgacaggctgaggcggctgtcgtccccggccgacagggctggacggctctaggcagattctcgccggcggccggcgcaattctgcctctcagagagagcttagtgccgcgggtttcgcccgttcccgccgccggcggaagccgagtcagcccgaggccgagccgagacgagccgaatgtccccgaggccgaatgctcccgaacgtcggttctccacctcttcccttccgaaagtgcccgagcggtgccggacggactaatcgggcctcggccgtggctcggacgtccgctcccgaaacgcggcgcggtcgggccccttcgtcaggagacgcgaaaatggccgaaggagcgcgagcgcgcgggccgagaggctgccgggatcgcgacggaccggcgggcggggcgggtaagatggcggccccgcggcgaggtgagctcgggcggggtgggggcttccgggcttgcagcggcgggcgcggcgtttccctgtggtgacaatccggtttccgctttcggtgcgctcacggggccgtgccaccgtctctacgtgagcgagacagctccgtcaccccatcgagaagcgcggcctggcctggcctgggtggcgggcgtcctgcaccccgaagagctcccccgcgcgcgggcgcctggccccgggcagggtgggtgcggagcggctctgggggccccagtccccggcagctcttgtcccgcgcgtggtttttgtgaagacacgtgggcgggatgggcgcagggtttcggtagccttggaactctcgccaaagaaaatcgcgggcgccggtgcctcagccgtcctgcctgagagactcgcctccgagaggaggaagggacagaccaaagcagtaaatcggccatcctgcagaggagccgccttctgctgtctgtgggtacagccagaactcccatacgcgggcgctgaagtgccaaaccttcgtgcgtgttctctagtaattaggtgcattgttttgaaggaataaagaatggctactccataggcaggacagcctctagtaaccaggtttgttttgtgtattttcatttggttaaaaattaagtttaggttgggcgcagtggctcaggcctgtaagcctgacagtttgggaagccgaggctgcaggatcatttgaggccagcctgggcaacatagcaagaccccctctataaaaaaaaaactgtaaacatcagccaggcggtggcgcacccctgtgggccaagctattctggaggctgaggctggcggatcacttgagcccaggaggtcgaggttgcagtgagccgtgatggcgccactgcactccagcctgggcgacagagcgagacccccttctacaaaaaaaaaattaaaaattaccccggggaaggccaggcgcagtagctcacg

SEQ ID NO: 5533 - DNA, 6000 bp, Homo sapiens
tttttttttgaattggatcaatgaatccaaattagcacatatgactgctttaagtttttttttgagtagtaatatccatcatgcttgttgaatttttaatcagtttaataatttgttagttgattctctttttttaataagttgattatatcagctgaaactaatattgatattaactatttcaggccaggcacagtggctcacacctgtaatcctagcactttgggaggccaaggcaggtggattgcttgagcccaggagtttgagaccagcctgggcaacatggcaaaacctcatctctacaaaaattagccagacatggtggtgggtgcctgtagtcccagctactcaggaggctgaggtaggaggatcatctgagcccaggaggtcgagactgcagtgagccatgatcatgccactgcactccagcctgagtgacagagtgagatcctgtctcaaacaaaaagtaactatttcaaatatataaactttttgtctcttgtcggagtgcaataagttttttttttctgcaatagcaaagttagaggccttgttttgtgcttagttttaatagaaataattattctcagtatgatgtatctctgggtatattattgatatattaattcttctggccaaatttttaaaaaatcttgcttctgcaatagcatcctttctcagtgatcactgtttgtctttagtagatcctctgtggttgatatttctcttcttttctagcttattggggttcctagggattggacattgaactgctcaccccatctctacatatccactcccttggagagttcattcaatctcattgttttaactaacatccctgtgctgatggcttcaagttacatctctatcctggacttcacccctgaaatgcagactcagttattcattttcctctacaacatattcacgtggctgttcaaaacactgtttaaccaaagtatgtataacatgaatgctcctatttggaggtttgtggaatggaggtttcccactccaaacctccacctttagccttccctatcagaatgtcacaaagatattctgtcctacgtatttctcttaaaaaattacagtcttgcttttcacatttagatatgtaatgtaatagttttaattttatttttaataagatcatataacataaaatttaccatcttaaccattttaagtgtacaattctgtagtgtttagtacatttacattgtcatgtaacagaactcttcatcttgtaaaactgtaactctgtagccgttaaacaactttgcagccacaatgcaataatgctggctgcttagactttaaaaactttttaatttttgcaggtatatagtaggtgtatatatttatggggtccctgagatattttgatacaggcatgcagtgcataatagttgcaccatggagaatgggatatccatctcctcaagcatgtaccctttgcatcatgaagaatctgattacactcttcattattttaaaatgtacaattacgttattactgactgtagtcacccttttgtgctatcaaatagtcttattctattttttttgtacccgttaaccatccctatctcccccgtactacttttcccagcctctggtaaccatccttctactctctatgtccatgagttcaattgttttgatttttagatcccacaaataagtgagaccatgtgatgtttgtctttctatgcctggcttattttacttagcataatggcctctagctccatccccgttgttgcaaaagacgggatctcatactttttatggctgaatagcacttcatagtttatatgtaccacattttctttatccattcatctgttgatggacacttaggttgtttccaaatcttagctattgttaacagttctgcaacaaacaggagtgtagatatctcttcaatatactgatttcctttctttggggtatatatgctgctcagaatttttgatgtcaggactcctttagactgttaaaaatattgaattacaaagagcttttatttatatgggctttatccatccacattaccacattagaaattaaaactgagttaaaaatatttattaaataattaaaatagctaataaacccaacaggtgttaacataaaatagtgaacatttagtgaaaaattactgttttccaaaaaaagagtgacatcattttatattcgcatttttgcaagtctcttgtctggctaactagaagaaaattggattatcatatctgcttctgcgttcggtctttgtaatatgtcactttggttaatgtacataaagaaaaccctgcctcacacagatacgtggttggaaaaaaggagagtattttaaaagccttttcagataattgtggctttttttttttttttgatactgcaccaaaacttactaaggggcagtatcttcgaggtttgttgcaacatgggatctgaaaatatatcaataaactcttcatacttattcccattaaaatccactggtccctcttgtactttgcccatgaatgtttctgtaacatcatgtgcagataattgggaaaattttagttcagagttatgcagatgttttaagtgatgatattttattatgcaatacaagaaatcatagttaagatatcaccagtgagcttccaagctcatagtagagaatacaactttttcaaaatgctaatttttcctttaagcttgaattttatcactgagtttaattgttgttagttgttttctttgaagtgacaagtttacatcattcaatttcaaaaaatgtcgaatacccacgggcgaataatcattgtttgtctgatagtcattctttaagtaaagatggtgttctatgtaacaagtggctagttcagctcacagctccaataactgcacagattttccttgagacactcttcatactttgatacgcagcaaaagtgtattatgcatactttctattttatcactctgaatagtaaaaaggcatgcattcaacggttggcatttaataaaacagatactttttactgcttcaagacttaagtgaaactggctttttccctttactgtgagtgcacaggggtgaagaatacaatggtgactaacaaactaacacattcttatgctactaccttgattggtgctcaagaggcaggagcatttcccaccactgtttttgcacacctgtgcaaatgtcgacattatgaaaaagaaaatgtgttattgtgaaaatagatctgatcccatggacccctccatcatctaagttccaattattgagaagcactctagtagaagaatggccttatttgttggatatatacttcaaaatatttacagtcaagggaacatcttaccagcaacctgctctcaaaaggtccaggaaaaagaaagtttttttgtactatagttgcaacatttccctaagttataaattgttttaaaatatttgttttatctctgctttatctccattttacattaaagttatatttaaattccattactgtttcacagtaaaattctgtattaaaattggaatttttggaaaatgaactttgttcattctgcggctttgagtaatccttgaaacattgcataaagtcctgttactaactgtgcttcaagatacaggaaatagtcatatattagatattttttgtacgctattgacttgagcaagacagtttacatttgctatgtcttattcacaataagtttagagagaatatatctcctttttacagcgtatgaacagcagccttagcttgtttaactttctcaaactgaaatacaagaaactggccaatgattccttttggaacaatattagatgtttacataggcaagatttaaaagctgcatatgaagttaataaattttagatcctgaaaatgttcttaacatcagaaaaatgtttaaagaaatgaaagatgaaaaaataacatgtagacttgcccttctctttctctaatactctttccccattggtggttgggcgactggattctccaggctttcctgatgcagagcactgtgtgggtcacagctttggggatctcactgtccacaagagaatgtaatgtcagaaatagaagtccttcttaaatgcatagggaagctctgtgcatgtagtcatttgacagcagactgtaacattgaaaatataattcagatatgactaaaagcaataataggcatttaattcagcctctttgaattttatttactgttagcctttgattttcaattacccttaaaaccacgcagtcacattcaggccgtgactaacattttaaaaaaatacaataaaaatctttggctggaacttttattctacttcagtattgaaaaaatcataaatataaattattatacatatacagttatgtgtatatatatgcatataaaatattctcttgtctcaggtttgaaatgactaaagttaccaacaccttaatttagaaagaatcaacagagagggaattgtcaactttcctaataccaatagacttgactttcctttgggtgcctgtcccctcctagagatttatgttcctggtcaagtcagtttatcatgtctgctttgcttcttccagccaaacccatagaaatgaagaaataatagtcttttgatttcaagtatgaaagatctaggctgttctcatattagatggaaacttaaaacacctgaacgttagctagtaagaacagtttcctgtaatttagtatttactggaagcattgtgtgccatgccatcctcctgatgtttgtaacaggacttgtaaagactgttatcaaataacacttttttcttgatatgtctctttgagcttcagtgtttggataatcaagagagtctcagcctttaggtagctgacactgtgataagagcatcctgtgaactacccaaataaggaggaaaacgaacgcagctgagcatgggatgccatataaaaatcacttaaaccagtcgccactccttgtttcctgagttgtcctgtgctggaggtctgctcagacgaaggtctccatggcgttagaagtcttgatgctcctcgctgtcttgatttggaccggtgctgagaacctccatggtaaataacaagttttagagaatgcttcctcgaaggagttaatcataatgatcgctttccatgcaggtgttttactccctgaagaaatctgatcttattctaactggctagaagaagaagcgctttcaggccaagtagacttgtgtcaatatacggaggatacattttctctttctgcctaaatgtcccagttctcaggcttttatttctctctctctctgttttggtcttctctctaacttgagactcattttcagaggttcttcaggaatagtccttggctctctttcagtctaacatttcaaacccctgccaattactggtgcttgattgtatcacattgtaagatattcagttgcatcttagctgatcttcctgcttccagactcatatttttgcttaatgctgatattattgctgttttgttcccttaaaaagactgctctgaacttcacccatgttaaactcatcaacggttctgcaaagttaataggagaaagctaagtcagcgcgttgctgtctacaagttgattccaatgtatcttttctgttttgcctggaatccaaatgcttgccagctccaaggcctgactaaatgtaatctgtaaagtagcatttcaatattactttttatgttctttatggtttctttttgtagactttttttggtaatttgaaagggggtttttctttgaaactgatacgtcaatttcttacccatttggcctgtaatacctttggaagcaaagatcacatatagctcctgatatttttccattttacctaagatgaattttaagaatgcctagatcagtgaagctcaccaggtaacagttaacagttaattattgaaatgaacagcacatggagagaaagagccactgt

SEQ ID NO: 5534 - DNA, 6000 bp, Homo sapiens
aaagaggaacctgtgagtcagatggttgtgcccagcttcagttggaagtcccagtccttcctctcccagctaacagcactttctttccagggttagtttggtgcttgcttggggtaggggtggagaaggatgttgggataatcagagctgagagggtgagtgtgtctaccatggcactcagctcactgtgcttctctcctggcagacccagtcatggcagcctccagcatcagttcaccatggggaaagcatgtgttcaaagccattctgatggtcctagtggcccttatcctcctccactcagcattggcccagtcccgtcgagactttgcaccaccaggccaacagaagagagaagccccagttgatgtcttgacccagataggtcgatctgtgcgagggacactggatgcctggattgggccagagaccatgcacctggtgtcagaggtaaggaaggtagtccctgtgtgactacacacattaaggaaaaataaaagaagaaaggttggtaatggccacctcatcttagttccacatcctctctggtgcagagagccccaaattccacaaaaagaagccacacagcacttgtctttgaattcctcgttatttgattgctgtcctagggccttttagctccacccctatcctttcctggctcctgccctttccttgccagaaaggctgggaaatgagccatctttataagcccatgttactgggtgactgtagagtctcactttggtctaaatctgacctagaatctcgaaatggcaaaatatcaagtcctgaatccattccttcacctgcagaagtgggttgagcttattgggagcctaaggcagggttatctttttttacctggtggcatcccaagcatggtatcacatacttttgataggctggactgaagggctgagacaatcatttattaaatccataatatagtatagctgatagactcctttttcactggaacatcctatccctttacagatgttctccacgcaccttcatgactccctggacagctagcaggcctccagttttatagggtgactactaaaagtatttgattgtctccgtcattcacacacaagtacacctactactccctccaaagtatcccagcaaagcagttaaattatgtcccagatgccctagtttccagttcaggaaggagagacagcctgttggccatccctgtagactagaaggtggatgtggaagggacccctcagccaggcccaaggcccctaccctctgacccaggcctgtcaccactgggtgagaaacaggtctgagacattcctgcagttcttgcctggacagtggtgatcaggcgtgaaggcgaggaccgttgttcattatgaactcatctcgctccgtgctctttccacagtcttcgtcccaagtgttgtgggccatctcatcagccatttctgtggccttctttgctctgtctgggatcgccgcacagctgctgaatgccttgggactagctggtgagtgttcgagtgctgggtagtcagccagagctttgcctgtactttcctacttgtgggagttcatctttgtcagggtctagccttttccccaagctgcttaacccttcccaggattctgcagagacatggccaaagagcaagccaagaactaccatggccaggtgtggtggctcccgcctgtaatcccagcactttgggaggtcaaggcaggagggtcacttgaggccagaagtttgagaccagcctgggcaatataatgagacctcgtctctataaaaaattagccaagcatggtggcgtgtgtctgttgtcccagctacttgggagctgaggtgggaggatcgcttgagcccaggaggtagaggttgcagtgagccgggatcacgtcactgcactccagcctcggcgatggagcaaaaccctgtcccacccagaccccctaaaaaagaacttccgccaccacgtgccagttgttcacttcctatcaggcatcgtgctgagctgtagtatctcatttaattgccagccacagtacagggaggcagtagaattgttcccgtttagtaaatgaaactgcagctcaacagaagcaagtaatctactccaggcctcacagccagcaagaaacagagctgagattccaacccatatcactctgagtctgcgagaacggcttattcctttgcaatgtgcctagcacctcccacccttttagctcttgccccgctctcccctcaccacttctccaggttggctgactctgtgactctcttggcttccaggtgattacctcgcccagggcctgaagctcagccctggccaggtccagaccttcctgctgtggggagcaggggccctggtcgtctactggctgctgtctctgctcctcggcttggtcttggccttgctggggcggatcctgtggggcctgaagcttgtcatcttcctggccggcttcgtggccctgatgaggtcggtgcctgacccttccacccgggccctgctactcctggccttgctgatcctctacgccctgctgagccggctcactggctcccgagcctctggggcccaactcgaggccaaggtgcgagggctggaacgccaggtggaggagctgcgctggcgccagaggcgagcggccaagggggcccgcagtgtggaggaggagtgagccggatgccccacacaccgccagtgtcataccaaagagctgagctgcttcggggccatgcagccctcctgccagccccctgcccttttcttgccctgtctctgaaccttcagaacattgatccttgccgcagccccactagccaagagaaacagagaaagaccattccccctgcctgtccttgcggccctgtcttctgaggttctctgtctggggttggctctcttaaccctttctctgctcccagcctgcctcaccagggaaggttggaggggcctccctctggcttctgcatctgcgccagcaaacatcactgccgttggtctctcatgacttaactggcttccctctgctgctgccttggcttcctcctaatgctcgtgctctcctgtccttctgaagttgctccttggccaaatctccagctcccttcttgttttcctcatcctcctaccctgtactcccaccaaaccatggtcctttaaggcacgctcctgtcctcctcattgcccagcagtagggaggggcaggggtaaggggacctgaggataaagggtggggaaacagggtcccctgaggcctgtgggggctgcaggggaggaggatgtaccttgtgtctctttcaagtgccttaatccgagccagcagggccttctgcttgcctgctgccatactgtatgtaggaaagtgttctgtggctgctttgtgtcaagaaaagagcagtcactctcagaatcttgattccccatcagccaaagcaaaagatggctgctgctttgtaggcatgtgcctgcaagtgggaccttgctgggcattatatgccctgtgggggtttcagagaccctgaaagaggagggaggacccgcctccttgtctgcacaactgcatgcacttctctccccatcgctccacaacctgaaaccgagaaggagttgctgaccagtgcccaccccggcagcccgggaggaacacaggcagctcctttcccttcacgtggtctgcagagagcagggtgagctgccagctgcccctctccaccagggtaccctgtcttggtggttaggggccacttttcctttgaggctctagtggaggtggatgtccttctctgccaggcttggcacatgatgtgaagaataaatgcccaattcttactgttcaggtttgatgtggaatcacagctgcagtgatatatattttttatcagtgcttggttggttttaaataaagtgcacgctattttattatcttgttctgaataaaatgtatttactccaagtctggattgcttccatgtctcctctactgctaaacccatttctgtagtgcagctccgcctcccaatttctccctgtgggggcagtgtgaagctggcagaggggagagctgaaaaggcaggctggtaccaggtacccttccctccaggagcacaaggaattaggaaagcatgcccccattacaaaacgtaggaacgactggcactgctggaaatgcgtgtgcttgctgggcagaggggtcaccccttccctgcagtgtgctgaggtgggtgggcagcctggagaagacttgcctgccctccccttcaccacccacctgaggactttcctgtgccaaggtttccagtcggcccacaggctggaccaattttgcggagggcctcagacataattttttctttgtaagctgcccagggcatgagagtgtgcagctggggcccctgctctgggcctctccccaaactgcctggtaggcaacactgggtcaggacccttgaggctggccttccctcgggagtgttgggcaaccctcaaccctcctaagcgctgcaggacgctgcccaggtggagctggtcaagagactagagctgcctgcacctagagcccttcctccacggcggtggcctagctctgtcagggcaggctcaggtggttggcatctggccccgtttgaccccctccctcctttcctgtccctgcagctcccgtcccatgtgtccctgaattctggttctgactcaggtgtcagatgccttcacaagtgagctgcttgtgggggtgggtgaggcagagaaagtggctttttcttccctgatcagaagcttccgtgagggagccacacagaactcaccgagtccctcctggcagaggcggccgtcctctgttgcttccagggacgtggccctcttcccgacctcggtcgcctgagcgcgcagggattggggatccgtagggcactaggacccggcggggcggagggggcagcccatgtgctgcgattcgctccctcccaccccactgctcccgctccattgtctgggaattgcagccgcggggcgggcggcggcggcggcggcggcggccgggacccagcgggccaggtggggacggcgcggagcgggtgcgggagatgccgtgcgggactggggccacctgagccgcccgcctcgtccccgccttctgtgggaaggatgtgcgcgcggatggccggtcgcacaacagcggcccctcgggggccctacggcccctggctctgcctcctggtggccctcgccctggacgtcgtgagaggtcagcgggaggggagggccggggcgaggggcggccgggcccggccgagtgggagcgagtgatgcccgggagccaccaacctttgggttctcggactgaaccctgagcggggtcgccccgcagcgccctgaaggtcggagagttcttgccctcgggaacctgcccccagccactcgcccctaaggcttccttcaccttgcacgacccggcaactccttcctgacccggggcagcccggcgcaggggcttccccgtcccgcaccttctgcgagggacccctcagcccgggcatcgaacccggcggccccggtcccgggcgcactagcgtcatccccactccctcactgtggtctgtagcgctgcaccctcctagcctccttccgccgccaccaacccacccccctcgggagtggaaagcagcccctttgcctgggacctgcaacagacgcaagccctccctcccccttcccccagggctccctgaccttggcgtctccagggatggccgcatccttgccttccagaacctttgagaggattcctgtcactgcgggaaagggcagcaacttccctgtgcttcggggtgggggtcggactcccttggcctgggctagctgggctgtggctgcaaggcaaaggatgccacagaagacagagggacagtgaaacattctctgccctccccaccgagagagccgagcgctgggtgatgggagtccgtgggagtcaggctaagagcatcttgta

SEQ ID NO: 5535 - DNA, 6000 bp, Homo sapiens
gaggaagcaacaactcatggtccagaaagcaagagatttattttgagatttccacaagtccttgataaacccagaaaccaactctggtttcaggcatggcaaatgcttaaagccctgagcagttgctcttaaacgctaggtgagtgggcaaagccacaggactggccctgctttcagctaatatgtaggcagcacgggcccaggcatcaaggcagtcaccctgtcccacggactcacaccaagaaggcaacagtgtggcttcctgcattgaggtccctcactcggaagcagctaatagccaatagcccccacggaggtaaaacatttgactgctcacctttagccctaatgataggctcagagaactggcctgggctccaattcctgcgaaatgggcaccttgagcaaatcacttaacatttgcaggactcacctgcaagaaaggcgtggcagtaagaatacttgaacagtaagaataacgaacaccagctacgagcaccagagccttacacacaagatcccatttactcctcttaaccctgggaggcatattattccgtgaggaaactaaggctgagagagataagtaattagcatgaggacccagtgagagtgggtggggagttccaaatcctgtgtgtttagcttcaaggcccacgctgcttccttgaccacaggttgtcagatcaagtgagaaaatgaatgtagcacactgtagaagtcaagtattagaattcttcgctgggcgcgatggcttatgcctgtaatcctgcactttgggaggctgaggcaggtggatcacctgaggtcaggagttcgagaccagactgatcaacatggtgaaaccccggtctctactaaaaatacaaaattagccaggagtggtggtgggcgcctgtaatcaatcccagctactcaggaggctgaggcaggagaattgcttgaaccagggaggcagaggttgcaatgagccaagattgtgccattgcactccaccctgagcaatgagagcgaaacttcatctcaaaaaaaaaaaaaaaaaaaggctgggtgaggtggctcacacctgtaatcctagcactttgggaggccgaggcgggcagatcataaggtcaagagatcgagaccatcctggccaatatggtgaacccccgcccccatctctactaaaaataaaaaattagctgggcatggtggcgcgcgcctttagtcccagctagctactcggtaggctgaggcaggaaaatcgcttgaacccgggaggtggaggttgcagtgagctgcgatcacgccactgcactccagcctggcgactgagcgagactccatctaaaaatatatatatatacatagaattcttagtcattgctgtcatgcacttcatcctaactactaacatgcagctcatgttccttgtgcctgcccaggcctctcagtggccctcagccatgccatgccagctctccccatgctaggggtccacctacttaggtaaagatgcacaaggtgacccaagttggcagtaatctctgagaaaggaaggtccagccaggctcggtggctcaagcctgtaatcccagcactttgggaggccgacgcggatggatcacctgaggtcaggagtttgagaccagcctggccaacatggtgaaaccacgtctctactgaaaatgcaaaaatgtgctgggtgtggtggcgcacgcctgtaattccagctaccagggaggctgaggcaggagaattgcttgaaccctggaggtggacgttgcagtgagccgagatcgcgccactgctctccagcctgggggacagagtgagactctgtctcaaaaaaaaaaaaaaaaaagaaaagaaggtccaagggctgcagggaaaaagcttccatgaagctggcaggagaaaatcatgccaccagcctcctagaagatttgtgactcaactacttaactcagagatttgctacccagcctcagaactgcctcctcaattcctccaagggcagaggacgtttcagatcaccagatattcacctaaaacactctccatccctcagtgaaatgtaagagatcttgatcagcaggctcactcatctgacaatatctacttccacaactgttttttttttctttgtaagaggaaaaagtaaatgcagtccgaaaggatctgtagccacaccctagaaaaggtcctggtttactgctctgtgacagacttagaatagaccctgggcacactttcctgacagagagctgcaaagttatattgccctgctcacaatacacagataagccctcctacttcctgaaatagagcaaagcaggagaaaaggaagaatgcagtgaaggaccagcacagtgattcatgcctgtaatcccagcactttgggaggcccaggcaggtgggttacctgaagtcaggggttcgagaccagcctggccaacatggcaaaatcccgtctctactaaaaatacaaaaattagccaggcacggtggcatgcgcttgtagtccaaggtactcgggaagctgaggcacgagaattgcttgaacccaggaggcagaggttgcagtgagccaagatcacgccactgcactgcagcctgtgcaacagagatagactctgtctataaataaatacccaggagttccagaccagcctgagcaacagtgagccctcatctcttaaaaaaaaaaaaaaattagctgggcgtgatggcatccacctgtagtctcagctactcaggaggctgaggtgggaggatggcttgagcccaggagaaggctgaagtgagccgagatcgcaccactgcactctagcctgggcgacagagctagactctgtctcaaaaacaaaacaaaacaaaaaaaccgtgaaaactgcaatgcaaatgcttgaaaatatcctctcatttgttctaagggcaggctgggctgtgatcccagggtgtgctcactttgcagagccccattctaagggagcagtcagcaagctcttctgtaaaggtccaggtagtaaatattctaggctttgtagagcacatggtctgtcacaactatgtcatcaactctgcccatgcaagagcagccacataaacatcttaacaaatgagcaccacggctgtgttccagtaatatttatttatggacactgaagtctgagtttcacataattttcacgtcacaagatattattaacttcttgcgaaaaaggattctcccggctgagctaaaacaggtcacatccaggggtaagaaatgctagttcccatccagcccttagtcttagaaaaaggctctacgcaggctgggcgcggtagctcacgcctgtaatcccagcactttgggaagccgaggcgggcggatcacatgaggtcaggagttcgagaccagcctgaccaacatggagaaaccccgtctctactaaaaatacaaaaattagccgggcgcggtagcgggcgcctgtaatcccagctacttgggaggctgaggcaggggaatcgcttgaacccgggaggcggaggttgcagtgagccgagatcgtgccactgcattccagcctgggcgacagagtgagactctgtctcagaaaaaaaaaaaagaaagaaaaagaaaaaggctctactccaaactcttgcagtgttacttttataatttagaactacaaataaatgaaggggtagaaaatcagtttgttgctctccctccccgatggactgggggacttcaagaatcttgaggaccagatttaggatacaagccctaaaccctcatcttacaaatcaaaaacactgtgacactggggcccaaaacaagaaaatgacttagccaaggtaagtggccgagctggtacaggaattcgggtccactccctctcagctctgaggattccttattctcaaaggtagcttctgttaaagtcggaacatgaggagtgaagggctcaatattcctgccaaggaggtaggtgaacaagttaccccttagcaccggaataattatagaccccgacttcaggctgtgcctaggtccggctcaggtgtccaaagaaccgttccaggcacccgaggggtgatccctgactcctctgctgggtgctcgtgccagctaacaatgggtgaaaattggggtgaggagctccaggtgctttctgcgtcctctgaagagctttcgtgcctttataaccaccgcgttggaaggaagagcgcggagaaaggtgcccactttctaaaagagaaaattgaggccgagcaaggggatcgcgacagtgcgaagcgagatagcagcggaaccagcattcgaacccaggtccctgaactcccagccccgggatccttctcacccctaaccacagtgggacgaagtgaggccgggatctccggaacccgcctctcgctaccaggcgccggagctgccgctcccgaggttcctaggagatgcagaagacactgccctgaatgcctacagccggctggcaatgccgccccagagcagagcggcgggtgccgcctcgccttcttataggctcgcagcacttccagtcgcgcgcgaggcctcctgggaagtgaagtccggagaccaggggtggccggctcccagcgcgccaagctgctaaccccctaactcccgttcctcctcggcgtttcttctccaagtccgaagtcagggtccaggactgctgcgatgcatcagccccgcctctcatcccccatccagaggaggcggaaatgttcaggtgaacgcgaagcctcccactacgagccggccctcagcaaggccgtgcgcagtgtgggcgggagccctaagtcagctagcggcgacgctgggagggcccggagcaggccgggccccgaacagcgaaagctccaacatggcggccagactggccatagagcgggaagagaaagccggggactagcaggccgcacggcgcagacggggcccgcctcctccatttacttccggaatttaaagccggcttccggaagccgggacgatgtccgcatgacaaccgacgttggagtttggaggtgagagtgattgacgaggagtgggttaagtgaccagaagtcagaatttttggtgctgttgttttgggcttgggttttatgctttgttgttgtttgccaaggaagcctcgtttttaagtggattgggaagcgtgaggaatactgccctaggtacaaagggaaggcggcaggtagcggtggacgaattaaagagcttcatgagcttgtgagtctccactgccctaaactggaggggatcgtcgtacgtagagacaggcatgggcgtttctgcataacggatcctcaaaacagccctggatggtggcctatgagtagtggttaagagcacgggtttggcgtcacagttatgaagccgggttctgctgacttgagacctggaggaatgccttgagctctgacttctgtgtcctttcctgtagaataggaataattcccaccttgcagacttgtagggaggattaaaggaaacgatcttggttgacaagtttatcgtggtgtgagtacctaggtagtagctatcagtgttatttaatgcggccgggcgcagtggctcacgcctgtaatcccagcactttgggaggccgaggcgggaggatcacgaggtcaggagatcgagaccatcctggctaacatggtgaaaccccgtctctactaaaaatacaaaaaattagccaggcgtggtggcacgcacctgtagtcccagctacttgggaggctgaggcaggagaatcgcttgaacccgagaggcggaggttgcagtgagccaagatcatgccactgcactccagcctggcgacagagcgagacactctctctctctctaaaatttaatgaatgaggaaaccgcgaacatatgtccaataaggtgggacttcaccagctgaggtggaggaggtgccttaaccttccggagcctctgtgtaaaatggggataatatacattgtaatggctacttctcaagatggttgtaggat

SEQ ID NO: 5536 - DNA, 6000 bp, Homo sapiens
cacatacataaaaatccatcccaaagagccaaaggttgaaatgaaacaggagggctaattgctaatataggaattaatatcagagagctccgatctttaaggcagctatgaactgtaaagctgagggcctgaggatcgtttctacttcgggaggaagccctgagtgccaagggtgggcagtggctctagaagataggcaggtggtcaaggggaaacacagccagacctgcctccctctggattgccactgagctcacatgtgactgtcataacatgagagtaccccagaaccacagcacagcgtcatcttctccaagaagcctccatgatccaccccactccccgaaggctgggcaaggcggggctcttggctcccacactgccctgtgtgcgtctcacattgtagccctctgaaaaccaatgccctccccactggactgtgagctcctggaggatgagggcatctctttggatccccaatgtcttgtacaatgcctggagcatgattagactcagaatatgtttgctggatggagagatgggtagatggaaagatggagaaatggataggtggagagaaatggatgaatggagagacggatggatgaatggacagacggatagatggagaaatggatggatggatgaaaagatggagagatggatggatggatagaggtgaatagatggactgatggagagacggatggaaggatgaatacagagatggaaggatggatggatggagagataggaggatggatggagagatgagtggatagattgatggagggatggatggatgaagagttggaaggatggagagatagatggaaggatggatggagagatgaatggatgggttgacagatggagagatggataggtgaatggagaaatgagaaggaaggatggacggatggagaggtgaatggatagatggatggatggatggatgaatgaatagagaaatggtgagatggagggatcgagaaatggagggagagatggaaggatggagggatggatggatggaggggtgcacaagagagcctcaggagaagcccaggacccctcagtgcagtgtttggtggatggtccgtttctcttgcgctgtcttggagtagtgcagcaagaaggaaactggcctggagtttgaggccctgacactgctacaggttgtataaccctgcacaagtcctgctccctcttctcagtccacacaatgaaagtggtcctccctgacctgctagccatgctgtcttcccaagctcagggaagatggcaaggcagaaattactgggaaaggacaaggtgcattgtcccctggcatatatgtatgggcagattcggccaaaacgcagagggtggtgcagagatgtgagattgggcacttggctttctttccctcctttcaaatttcttttaatacagttgtgatgtgattgacgacaacaaaagtagaaaattgtgtaagcatctcaaagtacttttactcaaaatggaagcttttatgatgttgactcaaaaaatggtttattggttttgagcacagagaccagacctggagcctgtgggaacgggggaggccaaggcgaggagtgtaaccactaacttcacacggcatggtctccactcactcgagccagaagggtggccactgggggtgctgtggctctggcgggaggtgtctgccaggcgcacgcatttacatatttattcttgggcctcctttggttcagtgaatgcaggtggctactaatgatcatcattatgcgcccacacaagggaagagccacagtgctgctggagagctcacacctcccaaccactgccagccagactcacttggaaaaccaatacacaccccagaagcctgagaggccccacttatccagggcacagacgctgaggagcccagtatcccagcactggggttccaggaggctctgcaggccccagggaaggtgggggtgggggctgcagcagggaaggtggactgaggacatacaaagctggacgggcaccaagagcctcacttagtgccttggttttctaaatgagggagcagatggagagtttggtgggtgcatttattaagcaccaactgcatgcaaggcactgagccaggtgctgggggatccagcctcaggtcctcccttgaagccagggagacaattcttttcatgctccgttgttgctgtcatggttcacaggaccacacaagccaagcagagggtggcccattgcagggagggagggatgacgtctgcatggattcttacagaaggggaacagtacagtgaagggccaggctggagccagctcagggcattagtgggcagtagtgggagacacggctggtgggctgggcagggcccttggagactactgtaggagcactgcctctatcctgagagctatgggacgctctcaggataaagccgagaagctatgggaagggtctgaggtgaacacaccagtgggatgaacctgcctcctttttgggttcttaatttcaaaagcagagctcagtggtttctctctttatcgggaggcagcggccacagctgactggagcctctgggctcccaggacacggcaatcatcctctcaaaatgccaaggcccgctgcccctgccccacccccatcggtataaaacaatttctgcgccccggccagggaggcggatgacctcactggactttttccatctctcgctttcatggagaaattacaatttataattggatgaaatcacgcgggtggtaatagcaataagggctcgtgctagagccggccgccctcccgccgcgtgcagggactctgtcctcatcttccctcctgcgtaagccccaccgtaccccttccagggcctgtgccccacctgtagtattcaccaggcactggccattcagaatcgatgtcccgtggggcttgctggctctgaaacctccttcttcctagggcagcttgtcccaagaaaactccccctgccaccctgtccaccccatcagactcagcctgcacaccacctggctggcacacacccttcccaaatgccttccctgccaggctgtgagccccgtgggcagccaccccccatctgggtgctgggcttattaaaacatgaaccctaatatccctgtttttatttgtaacggcctctgacaacaagcatttctcaaatcagccaccttaggccctacaaagaaaagtgcccagatgcagctgagcccatctggatctgatttcaaaccagagtgagcactctcagatgtgtaataaaagcccttttccaaagaggggttcctgcagggggaatacagacaccagggcgccgcggcccttccacatgccgcactaatgagaggtgctggggagggctcggggttttgttttggattccagaacagcctgccctgccctccgtctgtgtggaagaggagggcggctgcgggtgttgaggactgaccccccacctaggaagtggggtgggcaccagacagaggccagaaacacggagacccaacttccccagttccctgatggtcctgcttcccatggtggggaaaggcagtgcttgttctggaagcccaggccatggcggcccagttggagcctttgaatgacatttagcaagaagagcaggtgccgggggaattggagccagctctgggctgggcggttggccctgcacggccaggagctcgaaaaacttcatttttctcttcccagtccttccacccccagggagggaaaaccaggtagctgcaaggctgggcaccatgcatggccaattgtcaggatttggaaagaggcaggagatagggagaataaccccagccccttccccggctcataggcaagtggcattaagaaaaaaaacaggatccaggctgggtacagtggctcatgcctgtaatcccatcactttgggaggccgaggtgggcggatcatgaagtcaggagatggagaccatctggccaatatggtgaaaccccatctctactaaaattaaaaaaaaaaattagccgggtgtggtggctcacgcctgtagtcctagctccttgggaggctgaggcaggggaatcggttgaacctgggaggcagaggtcgcagtgagccgagattgtgccactgcactctagcctggcgacagagcgagactccatctcaaaaaaaaaaacaaaaaaacaggatccaaagcaaagggggctgcagcccagtggccctggtggatgttgtcccagtacggtccctcatgtctctgggcttaatcactggtattgtttttggcaggtgaggaagcaggcagtgggcgagaagatggattcctttttggacagacaagaccagagagtgaagcgggaataactcatcctccctacctccccagcaaggaaacctctacaaacaggagcagccaagcaggactgaggcccttgccccccaagcatcttctcaaagaagggcatgtgggggcctgacagctcagctgcatgtgtcagcagctccagccccaccatgaacatctgaactcctcagcggggtaatggaccccctcctttcccccggagacacagcctgagtggcaggaatacagagcctttggagagtggctccctctcagctccgtcatgcaagaacactctctgcacccagcccattctgccaagtgacttaaaggaattaaaaaaaaaaaaagccttggtaaacaaaaagggggtaaaagccacgcagaggcccttcagaagaggtggcgggctgcagacaaaagggcaagagttgaaaagggctgtggaggtagcaagcagcagaggccaccctgctcagggctgggtgccaggccacagggcatgcccgacgaacagggagtcggaaccccctcaggccaccctcgggagtcctggggtccagaggggtgtccctgtaccccttgcacacaggaccctcactctgcagggataagccagctgcgcctgcagcctagggtgccaaggaggctgctgattgtggcccacagcctcatctgaacgccaggagaccaggataccgaggcaccggatcccctctctgtgccctggggagccccagtgctgcccagtcaccccagggctgaggtctgcgtccctagtggtgcaaggcctggtaggaccacggggcagggaatgtgagcgccatctgagctcacggtgtcctgagtcgcggcttcgtgactttggcaggggcctccggaccagtgaccccagtcaaacccagagggtcttgggcggcagcgacgaaggaggtaaggcccaaggacaagggaagagggacgcgaattcagaagggctccagggtgggcccagggttcctcgcacccagacagctgggttgcaccctccaaaggccccttttcccagccagagctccacaggtctccaagggtctgcagctccatcccacacacccactcacgcagttcatgcagctggcagcttctgcttgccggcataagcatcatttgccacctggtggtccccgtgctgctgggctctacccagcagctggacccaggatgtaatggagtggcctctcctggagtaaatggccctgcagcagggtggaggaatctcattttgagccccctccctaaaggtggtagcagtgaggccttggcggggtggtgggcaggagctctggtaacctaggctacttgccctggcgcctgctgcccttgaacgagagggagtccacaagtctatatcagggcccgcccctgttctggccaggggacccagggtgggttgatccaaagctactgcccaaggtcctgctcctgttggcccttgggcaccatctgcactggcttccagttcagcctctttgttggttactggagcaagctgaggcccagagaagggcagagagtgccccaagggtcacacaacaggcggtgagtcctccctgccgctgaggaggggctgactcctccagggatcccaggaggccagag

SEQ ID NO: 5537 - DNA, 6000 bp, Homo sapiens
gtccacgatgggcctggccctgtgcagccaacaggacagagaagagtcagctgtatgtgtgggcagcctgaaaaatgccatgtggacaggcagttgtgggaacccagaagggagccaccacttgctcagggggtcaggaaaggcttcttggaagaagggataacagagcacgccttggaggacaagcaataacgatgataagagttaatgtttcctacgtccttcctgtgtgccaggtgaggtgctgagcaaacatcaccttgctgaatctctccaacagtcctttggggtagggactacattagtcctgttttactgaaaagtacaaataaccagcctgaaatcccatagctggagtctgcaaagccaggtctaaacccagagctccaggctggggagggatacagtccaaatcaagaaacaggaaggtctcaaaagggtgtcctggggacactgaaggcgcattcaggaagctccttactggtcaccctgcactgcctgcctggtgtcttgcaactgccacacatacacaaagcaccaagaacagatgctgactcagtagctgcgcctctcttcccattcatccctcaaggcacaagtcccccccgaccccaccccaccacgttccccagcccaggttggagactcactggggatatagaggtcaggggcgttgaggtcttgccgggggggcagaggagcatcacgactgtactgcacttcccagttctggcagtggcagtggcagcagcggccacatcaggaggggaagaagagaaaagaggagagaagggggttgaggtctgggggccagactcgggcagaatgaggaaggcccaccagctcccttggtaggaagctcacctggtgtgtgtaggggaagaccagcagccctagcttcttggccacgtaggctgtgtccacagcaaaaaaatacttgagtttgctcacagacacaaaacggtgcagctgggaggggagagaggaagctgtgggcaagccgcaccccaggcctcagggtgcccctctgtgtgctccatccctgagggcactgtgaggaatcgggtggaatcccatgatgccccagccctagccaaaaattctgccacccgtgccccgggggcaggccacacctccttgtgcaccatgtccttcccatgggatgcgatggagctgccataggccatagccacattggccattgggtccccaagcaagtggttgacactgaaggccacgtctgctcctgtggctgggtatcccccgggctggctggaataaccaccgcttgtgtcatcgaagaggggagggggatccggggctgcccgggccctgtgcttggagcctgtgggtttggaggtatcagagtagatgacagaaataccaagcatgagcccaaaccaccgccccttccctggctggacagccctgcacgggtcctggaggcaccgatcagtgaggggaccccaagctgggtgagggggagctaactgagaaaaaactgtgatgagggatcctttgcgagaaatccgttgctaaatgtaggcaaagaaagagctgaggcagcgcctagaactggttgcccacttggggtttctgaaggcctctcactggaagtgacctctgaactgagccacagtgagtagaagtgtgctaggtgaaaataactgggagggcatccttccgtgaacaaagctgggagaggcgacagctggctacctggaggccctggacagtgatcagggacctcatcaggttcacaacagtcaaaggagtttctggaggaggaggcggaccccgtttttgcccgactccggcatgggattcccaggactgggccgagagggcgaagtccgggacgtgttggagtgttacgaggggcaggaacccgagtgacacccccgccctgggcggcggtcccagtcgctatctccctcggggtgagcgggccacgccgccgactctccccccgccggccgcgccgcgccccgcccgcgccccacgcaccgtgggctccgtagcccgagtgataagccatggccgcgacgctcgctgtccccgagggcccgctgcgccgcctcgtgggtacgaatactaatgaggcagctgctccgcgcccagggtaccgaccgaggccacccggccgcgcgacacgtcccccaccccgccggtctcggccaccatgtccgtggcgtcatcccccgcgcctgccattggctcttcggcggcgccggctcgcccctcccctctcccaattggccactgacgagctctggcctgagcggattcggcagaaggcaacatccgggtgagggacaggcggagcgacttgcggtgcctgggattggatcacgggcttgccagttcacggtgggaacagccaatagaagagttaagaaagaaggtgggcgagaattatttgcgcgcctgcgcggtgaggcacttgacgcaccctgccacgactacaccagggagtcgagaggtaacctgcagccggagtcaggagcaaagcttccttggtgggacgtactccaggagggaacggggcggtcgagttccaaccaagccctgcccttcggggcgcctgtttctccctctctgggcttgttttcctcccccgtcacctacacttcacccaatcttggaacggagccccggcagacccggaggtggtggtgggaggccggacctatcagtgacagagctgccaagcaagccccaggatgctgactccacccgcctcccactcctcttctccgcgcgggtgctgtccgtcgtccggtgctgaaaatgtcctcccgcctcagccgccatcctgtagactcccgggggcctgcgtatgggaagatttggggtctcgaaccacacgctcctagcgagcgcgtggccgcacgcacacatacacgcatactgcaaaactggggcccagaggatccgaagtctgagagattgggtggtataggtggggcaggatcctgccccgggcctgtcccatagactctcccgtagtccagcagatttgggggcagaggtgtgctgatttgcgtcctgaagctgcagcctaaactcctgagtcatcgccgggcctgtggtcttcttgaagtgaggcccctaagcctcacttgtagtcccgggggttcctttctctccacccaggttctgatcactcccaaccccgcggagacagtcttcaggggcctccctctcacagaccttcagccaccgctttctagagagcatgagcaggttctctgcgacctctctaattagctaccaggtatccagttacaccagatgaccttcctgctccccaaactcagcccacgtggtctgattgcagtgccattgcccagaggtcccctccacctgggatgcccttccccctcatatccacttgtccataagcctagttatctttaagagttagttcatctcgtgcctctcagagggacaaaggggacagagacctgacccggtcaggggtggaggtcataggttgggttctaggccccctctgggtgcacccaatttgccctgcatgtaagttccatgaggacaggccctgttgtcattctccacttccacccttgtcttcccagtgccaagcacaatacttgcatatggaagacacccaataaacatctgtgtccaagaaattcataataaatagataaaaccctggaccagtcctttcctgtgtccacatctcaattacctaatctttaagtgggtaaggatgtttaattgaatggtctttgagttgctctttgcctgaacacacgcacatacaaaaatgaattaacccaccagtattgcagctcattttctgcccatattgtctagtttgggagcaaagccagacccagacacagatgtgaagatctgaggccctggagggctaggaggtagcactggggccacgtgtacctgggagggggtcatctaatgcaagtcagttcccatgtcactgcagggcacaatggatacttgtaaactgaatccaaaacctttctatgtcttttcttttccttctttctttctttatttctttttctccctttctttctgtcttcttcttcttctccttctccttctcattcttcttctccttctaggcagggtctcactttatcacgcagctggagaacagtggtgcaaacacagctcactgcagcctcttactcccagactcaattgatcctcctgtcttagcctcccaagtagctgggaatacaggtgcacaccacaccatcatgcccagctcattttttaattttttgtataggcagggtttcgccatgtttccaaggctgctggaattcctggactccagtgatcctcccacctcggtctcccaaagtgctgggattacaggcatgagccactcagtccagcttttatccccatttttcagatgggaaaactgaggttgagagtggagcatgctggcccaaggtcacgcagcctagggtcccttgtgtcctggccccagcctgcctgtcctaagctgagcccagcacccctgcccagccagtgagactcgtcacgcttttctcagctgtaactaccctcttctccaagtgaggcttcagggatgggatctgggtgggcttaactctgggcctactccttagagatgggaccccgcgagcgcccacccaccttggagattctccttcctcgagggttttacagcccgggaagctcaggcgccagagggttagaccagctcaaggtcgcgagcgcgagcgcggccggaggagaacccaggggtccagccgcccagcgggggcttctcggggacgggcggagcgcccgcggtgccaggcgctgccggcggcgccgccggtgccgcgggggcggggtcagcggagggcggggcgcctggcacccgggccgccaacgccgccgccgccgctgccgccgcgctcgggctcgagctccgcgcactccctccgcggccgctgagccgagcggacgcccccgggggccgcgtcgcagccctccgtgctcccccctatcatgcccggtgcccaggctggggccgcccaagcagccaggacaccatgcccgaggacggcgctggcgacggcggggaggtgcccgcgctcatcccggacggcgagccgctgcgggaagaggtaccggcgctgggggggccggagccgggcctggggcggcgtgagagggaccagtgcaaaaggcgaccccaagagaggggctgaggagggaagtcccagagcccctacggccaatgacgtcattggggtcacctgcgccctgccaagggtccaggggcccgcgttgggggtaggggtggggcggctggacagcaatatgcggggcgacttccgcccccggcgtcccctcatccagcctcgcccgtcctgtgacgtcagtgcctggcccccacgcgtcccagtgccgcagcgcagcgggggatgctgcccccacccccagggccgcggggtcaggtccccagcccggcccagccgctcacgaggtgtccgggcagcgcctgcaatgcagcagcagtcgcagagcctagaggggaggaggggaagaggaagggaggcgcctgggtaccccttctccttgtcctcgaggtgaggattgagggcccattctgctggctgggacccccgacggcccctcctcagccctagccaggaaggtctgcaggacctggggccccgagtgatgtgtggggtgatagggtggtgagtggggctgtgcatgcatttgggtgaatgtagcctgcttctgtgtgtgtgttgtgtgggtgtgtgaattgggtgtgtgcgccctgtagtcaggtgaggggcgagtgggtgcctggctcgggttgtcacccagtggtctaggtgtgcgcatgtgagtgagtccctttgtgggcaggtctctccctgtggagtctgaggagcctgggggtcagtttgcagtggggggtggggagatgtgcactgtggtcaggtgaaggtctggtatgtctctgggctt

SEQ ID NO: 5538 - DNA, 6000 bp, Homo sapiens
aggtggcctagccaggctctcagctaccccaggtgagctttaaagctcttgggattctcagaaggcaggccttgtgttcacaaaacacattaagaatctgaaaaccctcctatggaaactggatgtccatggattctgttggaggaaaaaaaaatccgcaccctccccccgccccccacccccaagacagaacttcatgctttggctgcgtttctgagcttcggccggcagtttccgagcccatggagtcccgccgtcaagctgcggttggccggcctctgctcgggcactgacatcatgcaagggaaggaaatgacagtggtcccgtctcccgcccaccatatctcagttgtaaattctccaggcacgtcttccccggggtaattatagcccaagttgcttttaggaggtgatatcatttacctgtttggcctctgtttctgtcctacgcgggttgccgggcagcacggggctggtgtgggagtgggacgggtggccattggcgctcacaatggccttgagtcatgactgctcactccttccatgctcctttccctcccctgggctgctcatgagtcaacagcacttattaaacccctctgaatgcagagatttgtactgggccaaccgaggggcagggcaagctcagtgcacccgggctgtgtgggtgccacgacctctaccaatggagggcaaccctgggcacctgtgtatttctattttgtaaaaagaaacccaatctcctttctgccacctctctaattctagattgtgtgttgaattcatggagtgagctctggtttgaggggtgggggtcaggagagctagactgaaagcctagtttgctctcctgcctgaccttaagccaagtacatcacctctccaggtgtgtgcacctgtgaaatggggactgataaagctggcccccccaggtccagttgacatgcaggtgagggctgctgagaaatctgagagcagtggtgctcaactggggctggttttgtcccctggaggatatttgacaacatcaagaaacatttttagttgtcacactggggctggaggcagagggtgctgctggcatctcatgggtgggtagaggtcaccagggtgcctgcaaaatgtcccacactgcacaagccagctcccaccacagaggatgatccagccccacacatccactgtgctgagacatccactgtgccccacgctagagctcctttattagaagagacctttgcctccctggcctggactcaccaccgccaggcgctgggcctcttggtcctcgcctaccatccaaagggagacacttcagcctcactttacaaaagaggaaatctaggcacaccaaggccatgcggttggttaatggggagcgaggttcttgttccggtccatggtcttggtaaccagtccctgtgtctccataatttggggcacctcgttcttcctccctttgtaaagtttggtttgttcaacttcccactgagttgcagacagcttggcccgtgctctgaggtattcttccctgtgggcaatgccaacgggatggaaataaaatatcgttgaaaagggctcccctgtgctgcctcctaccaggaagccaccctcctgacagcttgttggtctgcgctccttgtcacctgatgcttgcatccccggtgactattaaaatgtccgcaaagtgctcgcttcggcagcacgtatactaaaattggaatgatacagagaagattagtatggcccctgcgcaaagatgacacgcaaattcatgaagcattccatatttaaaaaaaaaaaaaaatcagcaaagacacctgtacctgtatctgttggcacatgccatcaaatgacactgaagagcaacactgtggccaaacaggccagctgggaggcccggagcttcccataatgaaatgcaccatctagacgaattagacaagggttttactaattcatgagcagggaattaatcctgcccacaaaatctgtccctgtggggttttagtgataaaaatcactgagacaaaaagaaaactgggtgcaacagtttatggagagcccccacgtataagcagttagtgactggagtggagagagaatcccagcaaagtgacccataggacacaggcggggacagggaaccagagaagagaaccatctatggaacaaaaaggaccctgtaaacttgtcctggcttgggagatatctccagctacaggaattcttttcccgctcctattttggggggctattgtttttactttgtgtcggtccctgaaatccctagacccacgaacccccggcgaaggccacgagaggcctggaggcagaactggtcctctctggcccttgctgcacagaggccacgctgcatttcctctgcccttgctgtggcatgtccacactgtccacctgggaagacttggggaaggggcgagaggaaacagaatgtggggatactggagagaaaaaaagaaacatagtggcaatagcaaagaaagtggagtcttacaggcaagcagatgccctgagcctggctacagtataaatcacagaaactagaggttaagcactgtttcttgagtaaagccgcaaggggtgctgttggggagaaggtggggccaccttgcctaggagatggccccccagcaggcagcccccaagccccagagccctctcaggccagaaatgtcacttcccaaacctttgggagcaccagtgtgtccagatttggccaagtatatttttactcttttttttttttcatgcaaactgcacctcatagagctctggaaggtctgttggcactcgaacacaaatttgaaaagacagtacattagtattacacaatgttggttgtttaccaacaaagataagtggatggagttacataatcctctgtacatgcgtgtgggattctcccagccctggacacttgaacttttaaggagcagaggctgtggagcactgttcctggcatggatttggccagcctggggcacttctccaaaccctctctcgctgtccaaggtgcagacaaagggtcctttagggccactcagtgcccgttggcaccaccagcctgagaaccaaatagccttcctgcaccgccccaagttcaaggaagtcacagacttgtgcctaaatgggagagtctcactgaggcaccaggaaagggtaggtcatgacaagatgacattagtagtgacaacagtcaccattgctaagcctggcagcttcaggcacgcttaaaactcccatgagaaggcagaggctctgaggcccaggaggctctgaggccaaggaggctggcacaaggtcacaaggctggaaggtgccagagctggagctagaccccaccccttctctccaaccctatcctagctgactccaggttccatgcttggaaccatggcacgctgacgacatcgtggcctttaaagacaattttctaatcacttctgtaggccttgaatgttccccagtggccatttaacaagcaattattgagcatcggctgtgtgaacctggtagacaacccactgtaaaatgagacggaataaatgaagtgctagttggggttcaggcaggttctttggatagacaggaaggcctgcatatttgggtgggaaggggacagtaggggagaatccagcaggacttcctgcaggaggtgctatctgatgcacaccgtgaagaactcataggatgtgagaggcagagggacactttatttccactggatgtggtggccagcatggcccctggggcttaacctgagtatggtcgtcccctggggacctgccttattctccttaggggaagaagacttgaagatctgcagtgtgccagacccctgctaggtccgggggtaagagagatcaaagccaccatcccccccgctccgcccctccagaaagcaggacagccttgcccagcagtggggaaagctctgcaggagccccgccccacctcagaggatgcggactggtccttggccctcctaagcctgagtgtcctctgcaaaatgaggacccgcattccaaccttgcaggtgcggggttaaatgagatgatacacactcacgccctacatcagggacgctgcacgcacctgggcacagaacactaagcactccgtaaactcgggggcaccggtaacatcagtgggctccagggagatgactgccccgggagagactcccccaggagcgcgggcagctggagggggcgggtcggcaggaaccaggcaagctccccggaggaggtgagtgctgagtgacagcaggagtttgccagggtggagggaaaggggcagagatccagactccaatctcagaagcttcactccccccggaggcggaggtgacgcgccacagaagcgcctgccactcggggactttatttcaggtggggctattgaaagttcccccctttcacacccggtatgaaaaccctcaaaaatccaaaggggcactttccctggataaaaataaaacttggaggggcccgcaggaatggaatactttttcttcctgtgtttaaatttctacggaaaatctgaccggcgcggccaccgcccctgccataggcgggcggagagcgcttatatctttaaggcaaaggcgggccggctggcgtccaagttcctgaccaggcgcgggccggcccgcgggaccagcagccgggtggcggcgcgatcggccccgagaggctcaggcgccccccgcatcgagcgcgcgggccgggcgggccagggcggcgggcggagcgggaggcggccacgtccccggcgggcctgggcgcggggaggcccggccccctgcgagcgcgccgcgaacgctgcggtctccgcccgcagaggccgccggggccgtggatggggagggcgcgccgcccggcggtcccagcgcacaggcggccacgatgagggtcaacgagaagtactcgacgctcccggccgaggaccgcagcgtccacatcatcaacatctgcgccatcgaggacatcggctacctgccgtccgagggcacggtgagtgcgggcggccgcgacccgggcgggagggccgcgcacctgcgccttggcgagggcgggaaccgggcggcggcagggcctcctgggaccccagggcgggggccgcaccctccgcgcagggttcgcggcgcccacccgcgcacgtgcgtgccgggaagggcgcgccggccctggccaagtgcgtgcgccccgcctgcgctctgagcgttccgagcgcggcgcccactccgcccagcgcagcgccgggcccccaggcatggcccggcctcggagctctgcggccccgaagccgcctcacccggggctgcagctcggagcccaaccaagagctcacggctggcgccctggatgggaccttcccttcctggctcgcggccaggggtacctgttggggcagccagggtgagggtgatggtgggggtcttgggtgaaggccaagttggtcgccactccacgatgatggtaactgccaggccccactgcttcactatcctctggggccagagtcccgagtcctcacttgccagaaacgcatattgtgcccagggcactgggcctggtaccctggcattggcaccgaaactctcaaagcccagggtgtcaatcattggagattgctttctaccctcgcccctgtctcccctgggcgcccaggcctggttcaggtgggggcactggttggaagccagtcatgtaagttggggaccccatcctgaggtccccaatatccccaccaccctccccagggccagacccagaggtctaggtaaccctatgttttagagaggggggcagaattctcccaggaagggtttggcttgaaggacaaagtttgccggaagaggataggacagggctgggactggctatctcctcttggggtgagggaagctctcagcagcaatttgtgggacctaaggacagaagctcccttctaccttcttcccatgcagacccc

SEQ ID NO: 5539 - DNA, 6000 bp, Homo sapiens
aaacactgaaatgaaatgaacatttatctcaaagtaataaaggcattgatttcttccacatatttaatgacaatgagaacaaaaagccattcaaaaaagaagctgcattgtactagaaaattctgttaaagcatatttttatctttaaaacagcaactttctgctgtaaaacatggcaaatgacgtacctatcattaacttttatttcttatgttaacacagtaggaaatcatatcagatcaattcaagaagacttgttaaaacagacccttataacacactatggtcttgcatcatatcagagaatactaatacaacttatcctgaattggtcctaaattttcacaaattaaaatatgtccaagattgtcccaagggctcacctgggagcaaataaagttactactatagataagaaaatcttgaatgaaaagcaactgctgaggaaaaaaaaccttctatgaggaaacagaagagtcttctgttgataaaactgagatctgtaaaaatgcgaagagactagagtgagagaagtagaaagtaatgtcataaagcaaacgagcagttaatatggggtttgaggcacagtagtttcagcttatccaagggcagtccagaatggcacctagaaatgggcttagtgagatgtcacacccattcccaattcccaccatggttgcatggtatcagtaaaagaatctcctctctctttgacaaaaatatactaactaaataccaaatgaaaatccatcttatgaaaatttcatactttaatgagaatatgttcaacaatgaataaacacttggctcagtgaggatagttattgtttagaatcacattaagtctagctttttcgtcatgtctaccacatgaaacaatgaagagagaaaaagactcaaggtgacagaggacagtgatccctgcagaataaatctaggttaaacttaaaaatactgttcttatattatataaacagtagagatagtaagcatagccaatgaaaaatacaatatacacataacttgtttggctagttgtctataatattcaagaatatgtatcataatactagcagttttaagagattaaaagcaagatacattgtttctctagatcagtttataaggaaaatatacaacatatactctggtatcatagaaatataaactggtttttctaataagaacttgttgattcctttaaaaattcaatccattagtcaattcattattgaagaaggaaagaagaaagggaaggagggaggcaaaggaagagaggaagaaggaaagaaaggaaattcttctaaagtattataatttcaccaatgtatcagcaatttctgtaacagttctttaaagggaagaacttttaagaaactcggtttatggggtttagaaacattaagttctaaactttctaactaaacctgcttagttaagttatacctagaatatcaattgaccttcctcctcttccttcccacatacctttttatctctttctctgtctctcctccttcccattctctcttcctttcactcttttcctctctgtctctctctctctcacacacacacgtaatgtgtttaattccattattagttcaaaataaggtaatccaaaagaaactctctagagaaatggtagaaagaataaaaacacacatcaacttaaatatgtcaaagagccatatcatttattggctacattcccaaaaccattcttgttctagataaaccaattgtgtctggtctggacaagtgtggctccaaaatctcaggcagtttacttctgtcagtggtattattagaaacagcagggggaggaaacaatcccaatcttaaatcccagtgtgcaaatatcacagttctaggtgttccaaaagttttatatatcattgtccatctctacaaatatcagcttggataaggcatctcagtgattataagtttcctcaacatccctaacaaatccacaggtagaagaattaaacaccatgcagagataagttccactttaacctgcaattcacccagagctttagtttcagattgtagcaactcacataactggacaacatttggatctatattagtccagtatagcagagttcaaggctgttcatataagttttgattcaaaactcttgagaaactctttacagttgatctcaccttccatataatgtcaaaacaaaacaaaacaaaaacagtcccaaactaggatcctttggaacaaagttaacctggggtgcatctaagctaaactgaatccccaagttcagaatataatcaactatgcttcaggaattcactagatcttgatcaattccaataataaaagttgttgaggagggaggaaaaaaacaggtgtttgccccatttggggaacttgacaatcatgttattggataatgcatatatctggaaaagcacaatagtcacgaaagttgtgctttatcacaaaagtgaagatttacactagaataaatccaaataataagtctattttttaaccaaaagataaattataaagctgtaattttgttcagtgcaaatgaaattactttgctacctttcacaattctgtaattagtttgataaatattaaacccatgaggaagagctccactgcacaagtttcttttttaaagactgcttaaaagtaaccttcaacaagctaagaaaacaagctaaaggagactccaaatctgcggtactgaatctattcttattaccaacggtgatataaacaacctgatttatgaaatcataaatatctatcaataaatactatagtcttgcttccttttactttagtaaaataatattactgaattatgtaccactgaaactatattacaataaatatttcccccaaactgaagcaaaactttactctcaaatggaatataatttaaattacaagtaccagaaccaacaaaagggagaaatattatatagcaaccttatggcccacctgtcttcttgactggcattcttgggtctttccactgccacaggagtcaatatctcttttcaggtctcagtttgatccagctggattgaggccaagagccaggtaactgttgcaaaccacttcagtgttcagttttgaaatccaggctgagtcttctatgtcagacaaagaaaataatgatgtattttttccacaactaaactttttacaccgcccacagagtttacagcaacgtaattttttagtttttcaagtttttcaattttcagaaaatatttagactgtttttacaaactgggaaaattattgtaaacatgaagaacgttactgaaattcctcttcaggcagcaacatttttggaagttcaatgactaactcaattaaggcacaaaccaaatttagacaggtctcattactttatacatggtcaaattcaaagatgatgataaagatactcaaatctgtagagaaaaatgtaaccccacctccccaaaaatacttttaaaaatctctttgactccagtctctaaaaagataggtgagtttgaacagttttctgtggcagaacacacattgaaaggcccccttatatttactgatcagaagttccggatctcaccccctcagtaactcagaatccagcttgctgtccctttcatttttttcttctgtgctctccaagcccccaggcttgatccttaatgcccctctgattctgatcctcccatgtattaaccgagaggattgaaaaaaaaggaaagcaatcccttggcatggagacattaaagtgacagtgctactcaatgggcacttgatgcaggatgagttggcgaagcagatttcttcacactggagtcattcacatcatgccatctcttcgcattcaagcagctccctatccggcgaggaaaaacactgagacttcgagagaagccaaaccttcccccaaaggtgttttcagagacgccgtagtagtattagacatgtaagcataagctatgtaaacggtccgcgatttcctaaatgagaaagtgcagctgcttggctttcacatccaccttttctctcaatctctcttcaaactacccaccttccttttgcagaaaagacaagacatttctttgccaccgctggccacccctgcccaagccccgttcttttagggaagagcactgaaatgtcctgcaccctccacgcgatgaagtgtttcctcaggcaggagcaacagcagcactagaaattatataactctcgaatttggcttctgtaagacatggagactggagggtcgggggttgccggtctgggagatactgctgggcatttaacgtgcacaaaacagcgccaggccttgcagtgccccccaccccgagacacggctgacaagtgggtcttctcgcgggggtagtgggcaaatttctctccggtctctttccaagcggggctaaaggatgcaaattgaggggactacagactggggagaggagtcagacggctgagaggagaggaggctagtcggggctgctctgacggcgctgggcggctggtccggggtttggaggaggaggtgcccgagaaacagagctttaacaccacacaggccagggcaaaggggcgagttccctcaaggactgaaaggggcaggcagctagttcccagctgccctgaggagaggcaggagcgcagtaacattacaacattcgggccgccccatctttcccgcaggacgcgaagagatcagggagctaagctgataaatagtcagggaaggaaatactcggctggcgaggggggcaggcccacaggcgcctggacctcctctaagcgaataagtggccgtaatttctagacgccgcgcccaatcacagtcaggatggagggcgcggcttttgactgagtgggggcgggcccgggctgcaatcgagaggcgttgagccgtaaatcagcaccacttcccgcccagggcgttctgggtccccgcccaccggcaagtcacatgagccaccaaaatggtggtgttcgggtatgaggctgggactaagccaagggattcaggtgtggtgccggtgggaactgaggaagcgcccaaggtaggcggaaatccgaagtggtatggggggtgatttctgcaccttcaaagtgttggcagactcttctaagatgatacctttaaaggagatttgaaaagttaaaacagctcccaagtccatgcaaggagcagtcgattaagtctccagttgctgtggaaagaggcggagagaacgtagatgacctaaattctagtcctcattatctgcagtttgttttctcttgtctccaggcctttgcacaggctttttcttcaacttggagtatttccctgcttctatccgtcccaactcccctgccaaactgttctctttcggttattgatttaaatgtcacttcttccgggaagccttcccacgcttcctctggctagattgtttgctttttcttaggttgttgggtttttcgtttatgtcactctctcattctgtgtttaaattgccagcttttttgttctgaactcccactgcgttgtggattcctgaggatgggatgactgtatcttgattacccggaggtctggcatataccacgtgctccctaaattatgagcgaatgttgaataaaattctaaaggtgaaatttattattaggtgaaaaatttattattaggtaaaataatacacatgaaagcactacaaaaccgttagatgatttgcaaactataaacctacataaatgcactcttactggtataagcgtggtgactagttgagtggccttaagggggaaggggtgtaatgaaagcactggagtctttgacagtgccttgcaaagcttaagcactcaaatatttcctgtgttctttccagtatttcagtatttgctgtcctgtaatcataatcctgggtgtctgttttccctatagagactttagggtgtagactaggtaggagattagtagaagatattgcctggaagtttgttttgtt

SEQ ID NO: 5540 - DNA, 6000 bp, Homo sapiens
aagaaactacagcctaatactcctcatgaacattgatataaaaacttttgacaaacttttagcaaaccaaatacaaaaatatatataaagaatagtacctcatggccaagcggggcttattccaggattgcaaaattgacttaacatttaaaaaaatcactcaatgttttgttccaccaaacccacagcaggagtcaccccaaaagtgacagcaggggagtttccacaagggagtgtccagagttatcctgagactgggctggttgggattcaaagaaagaagcactaaacaccagggtcatcagtccaaagcatttattaggggaaattttatatgactgaactgcagcaatcctcaccacaaacagcaagagaaaaggctagcagttcacaacaaggggattaggatatggagtttatatgagggcttaggaatttggctcagggccagggccagtttattttagtgttttgggcaacaacctagatacctttatcagtgcctggaaatgtttcaggtctcggtttggattcaagcctgctaagaaaaatctgcagctggccaggtcacaaagcagtcaaggcgctctgtgatttttggtcaggacacggaaagatggctggggaacgtggagcccctacacaatataattcactgtatcaacagactaaacaaggaaaaaaaacaatcatctgaatagatacagaaaaagcatttgacaaaatccaacatctgttcctgataaaaactcccagcatgaggaaaagaagggaacttccttaagattttgaagagcatttaccaaaaaacctataattaacatgatgatggtgggaaactgaatgacttccccctaagatcagggaaaatgcaagaatgtctgctttattgcttctagccaacattgtatgggagagtctagccagattggaaaagaagaaataaaattatctatgtaatttttaaaatcctatttgatttagcaaggttgtaggttataaaatgtaaaagaaaaaataaattgtaactctccagataagcaattaacaataagaccaagcaatttgtccattttgtctaaattgtcgaacacagtgggttaaagttgttcataatatcctctccttatcctgttaatgtgtgtagaatctgtattaatgtcccttctttcagtccaaaaagatttagttgtttggtctctttttcttttgattagtcttattagggcttattgattttattaatattttcaaagaatcacagttggtcttttctctattgtttttgtcttttccctttcatttatttccactcttacctttattattccttcctctttgatttcctttttgcttaatttgatttttttaaaaaaatattgatttggttgattttgcccttgattctagggcataacccttagtcattggatgtagtcattaattctaagatgctgctcagtggaatgtccaaagttttcacccggtctgtataacttggaaatatttaaatttccgatatttgaatttaaatattcaaaaatacactgtcttcccagcatcagatgactgctgaaatttcactttatctcttccagtcttccaactgttgctgtccattgggttctttgggtcttaccacatgcatgtactgttataatgtcagccaaaaatttgaggggattttttagacagattttggggttcccttttcaaggttcctgccccaattttcagttgatctggcatttccaaatttcaacttctgagtgttttagaatgggaagaatgctgctttatactgacactcgatattccccatgtactgcacagactaatgccctcatgaaaaaaagctggataaatgtggatcttacccactatttttcccatctttcaagaattgtataccttcctgtgttttcatgctattttggttgctttccagggtctttgaaaagaatctcttccttgtccagagtttatagttgttatttgcaacagggtctgtccaacataagctactgtgtcacttccagaagctagaagtccctcttttattttttgattattatctttgaaaagtatggaatcttcctggatcaactattttcagcagattcatgcagcatttaagtcaaagccatatcccagcaatttttctgtgtgacacaggattttatagacagtctaggtaagagataataagtagtagcaataaaggtagtgacaagtggtcaaattccattttcttttattaactattttatgtgccaatattctgttgttagagagttcagacaagctataagaaactaaattatcttttctctttcggcatttctcaaaacttttaaaatcaaaagaatggcatgtatttttagtgacagaaaaatatgctttgacaaattgttctttatttcctgtttccaaaaagagcttacggttgtctggtgcaagcatcatagacattgcagatttctggctacatttctatcccctctcttccatgcacagcccaagttcagctaaattgtctgacaaaaattttcatagatgctatgtagagaattgctgaaaggaagatgagtggaatctgtgagaacagagtcacctccagtgcctaaataagaaatgatttctgtaaagaatatctaggaagaaaatcaataaattgttcacgattgattagtctgcagggagtaatgtggatgaacttaagtttctggcttgtgcaatgaaatggatggtgttgtcaagccctgagacaggaaacagtagatataagagaggaaaacatatacgattttcagctttggagtatgagatgtccttgagatttttatttagaggcacctatctaatctccatctgcagtattgcctccatttttttctacatcatatgcatcttatcatagtgtaactatgaattttttaactcccatttttaataactaacgtttcccagaaaataaagcaaacaaaagggagcaaattcttagtctggcatttgaagtattccacactctggctcttttttttttttttttttaacttttcaaccttattggccattattctctacaagatggtggtttatagtttctacataattaggaaacacagacagttacagagaaggcctagtgaaatcccattaaggcaaaggtagtaagcagaatattgtgatttgtttgcttaaaaccttgagatgaaaagcaaagtgagtaaaagactagatgaccaggcacgctggttcacgcctgtaatccctgcactttgggagaccgaggcgggtggatcacctgaggtcaggagttcgagaccagcctggctaacgtggtgaaatcctgtctttactaaaaaataagccgaggctgggcacggtggctcacgcctgttatcccagcactttgggaggccgaggcgggtggatcacgaggtcaggagatagagaccatcccggctaacacagtgaaaccccgtctctactagaaatacaaaaaaattagccaggcgtggtggcaggagcctgtagtcccagctacttgggaggctgaggcaggagaatgctgtgaacccaggaggcggggcttgcagtgagccgaaatcacaccactacactccagcctgggtgacagaacgagactcagtctcaaaaacaaaaaaaaaaatcagctgatcagctgggcgtggtggcacacgcctgtaatcccagctactctggaggctgaagcaggagaatcgcttgaacctggaaggcagaagttgcaatgagctgagatcaggccattgcactccagcctggccgacgagagcaaaactctgtctaaaaaataaaaaataaaaataaaaaaaagactaggaattttccttcttgtacaccttcgtgaaaataagtctttctatttgtgcaagtttagaaactgcaattacagacttcttggcactatggagcctaatggtcaagcaaccctgcaatggagagacagtataaaaattatctggacaatgcaacactttatcacttgttcagaaatttgagaggatgagaataattaagatttctgataatgtgttatgatcatgtatttattgctacagttagttatatattttttggcacaatgtttacctgctaatcttaatggagttaagataaaattcaattgtaggcatttttcccttctattgggttaattagtccaagcgaactgagcaaaggttgcagggagccccagcatggctgaggaagacctggtgaggcatccactggctgctgggaggagagcattagaggtaccttctgaacagcactgtccaatagaaatataatgcaagccacatatataattctaaattttctagtatttatacttaaaaagcaagaagaaataagatgactttcacccaacactgcttccaaataagcagtactctggagaacacgagaaatcctcagaaaaataagctgcagctctgaggtgctgattatggtagggcaatcaatacagatcaaaacatggcacagggagcttaagttcctagggagagtagaaaatcgatagagccaagaaatagctcacctttgacttatttttaacctgagtagctatcatatgccaagagctgtgcagttttcatttaccccatgccaagaacgtaagtaggctctactgaccaggaagttaagtaatatgcccgaggtacgttttcaatggaagaggctgactgagggtcacccaacttatatctcgaaatttcacaatttctacaagttctgtcctgggaggcaagagtaggtgaaacgagcacactctacgccaggcaaacaaacctcaacgcttagcctcccggcacctcctagggccggaagcttctcagcccaaagccgctgctggctgcaacctccgtcccgcagtccaattagcagccgcgacccggcgcccgcccacgccgcgtcacgagtcagccaaagatggctgcgcccaggtaatttgagcaaaggccacagtgaactccggcgtggctgaggaaggaggaggcacccacaggctgctgggaggagagcataaggtactggtattccgggggagggggtgaagtaaatgtcccggtgtcaggagaagcacgacgcggtgacacgctagctaccagcagcgctgcgcgtaaatgagagcaagtagaagtgtagttagctcttcctgctgtcttttcactttgcactctagaaggaaagaccttatatttaaattaactcagtagaaaggagaaatgcctgagattgaatttaatcccaggtttactgtcaatttacaaggtgaccacggccaaatttgattttcagaggtcccactttacttctctttcagataggccccacactgcctatctctcagagctcttccaagaatgacatgagataggtaacacaaaaatctttcgaaatatttgtagtttttacaggcggcgttgtctttgatagatatttgttattaatatcggagacaaaatgcccacaggggctgcccagtcagcacttatactgaattgagtgacttaattgccctcagtacaatatatacatactaaatttgattatatatttcaccaccccatacacaaaatcattcagagctcctgtacagcagagattgtgtcttatcatcttatcgtagccaaggccctcaaaaatttgactaccagaaacctagacataaatttctaaggctgctttgtacttattaggttagctttaagtctagagatatggaatgtcaaggtaatcaacatttccaaatgacctcttatcgatataaaacaggtagcaataaatatttaaacgagtgcctgtaatgttgtaggaaatgagaaaatctggtttcataaaagcatgttttcctttgttgttatccctgaactgtttttttttttttttttgtagaccgagtctcgctctcacccaggctggagtgcagtggcgagatctcggcacact

SEQ ID NO: 5541 - DNA, 6000 bp, Homo sapiens
cagcctctccagatggtgaaacaactaaggcattgccttaaggggaaggtacaatccagggtgcagctatttagattttttgtaaagactgtacaaagatttaaagccattttacctagaccatttcagctagacaaaagcacttctaagtgtataagggtgttttccatcagctttcttactctcagcccaagacggaaagtgtttgtctcagaggtttgtgagtgtggcttttttttctattggagtggattataatttgatatatatgaagtccccaaaatcttaaagagaattgtattggcagacacactgcctacttggactgaaagggcatatgtatcttttaatactccagatttgaatattaaaatttatatttacatattagaaactcaatattttaaataaaatgacgtaaggaaaaacctgaagttatgttgcaacaaaaattagtagaaaattagaattatggctgggcatggtggctcatgtctgtaatcccagcactttgggaggctgaggcaggtgaattacctaaggtcagggagtttgggaccagcctggactacatggtgaaaccccgtctctactaaaaatacagaaattagccgggtgtggtggtgggtgccactaatctcagctagtgaggcagaagaatcacttgagcccaggaggcggagtttgcagtgagccgagatcgtcccattgcactccagcttgggtgacacagcaagactccgtctcaaaagaaaagaaaagaaaagaaaatcagaatcatatgtagctttgtgaaaagcttggttactgactgttgctggaatcaagagctactacagtgtcatacttcgagtttgccgtactttgccattgtacttgtgcctgataattatttctacaatgactgcatgtagatctaaactagattagtgtcgttaaatcctctgcattagatcttaagagctcttccattctttttcgttgacatcttcaaaactagaatcctacaagagcaacaactttgtgttttttttttttttttcattcttccatcacaaagaaaggggcaacaattttcatcttggcgtttcttcaaagcctttgaattccatcataaattgccagattagttttcttcatccactgtgcaccttctttggagaaactctttgcttcaccttgttgatgaaccctaaagccctccctgcgtttttttaatgaaaaagaagaaacaatgaagcccccagaaagtatccaatcaagccactgtcatagccaacctaaaagaataaatgacccatgcagatgcaatgtttaacattatctttaaacttaatggtggcatgaagagaaggctttcttttaaaaaacagcctgctatatcttataataccatataaagaaatttacaaatgtaagctactggtttaactgcatactgctccattttgcaattttttttgcatcctaaagcacagatcatctcccctgaggatttatcaatgccttcctgttttggaatctccatagcagcactagaaaagatagagtatcctttcttttgaacttgggagtttccctgaaatcacccctttgccacccagctcatcagcattgtcccctttggcaccatcccctttttctcaaatttctttatgcttcaagtctccatttaacagttaattaggaccaggtgtgttggtgcacacctgtaatcccagcagtttgggaggctgaggtgggtggacagcttgagcccaggagttcaagagcagtctgggtaacacagggagaccctacaaataatttaaaaacattagccaggtgtggtggcgtacctgtggtcccagctactcaggaggctgaggcaggaggatctcctgagcccaggggatataggctgctgtgagctgtgattgcgccactgcacttcagcctgggtagcagagtgagaccatgtctcaaaacaaacaaaaaacagttaactaaaagaaaccacctggttttaattgtaattttaaaatttccttatttattaatgtgtaattgctgggccacatagtaaacatattgtttattatcaggcatgaaaactatattgtgctattacattcagaagcaactgagagttaacaatcatattaaaaatttttttttttttgagacggagtcttgttctgttgcccaggctggagtgtagtggcaccatctcggctcactgcaacctccgcctcccaggttcaagtgattctcctgcctcagcctcctgagtagctgggattacaggtgtccaccaccatgtctggctactttttgtatttttagtagagatggagtttcaccataggccaggctggtcttgaacttatgacctcaggtgatccaccaagctcagcctcccaaagtgttgggattataggtatcagccaccgtgcccagctcgtattaattgtttggtgaataagatgttatttgtatagtattgtacatcttaacatgatcattttttgttaatatttgatactatgttttaaatacttgttaagaattttttggttgatatgtaatgcattttattttttcccatttaaaactaagttcctattcagcattttcttgtgaaaggatcacagatattcaggaatggattattgaaaaaaaataagcctgcactgctatttctgtaattttttggataagtttatgctgtgtttttgatcttcttagtttctgaattggagatttgaaaaaaattgtgattatcttgttcctattctaccattgtatattggatgtgttgaggcggatgataactttatcatgagatctgcatctggtcctgaggaatattctggactttggctaggattcagcaactgcatggaattttaggttgtctcccttggaaaagggaaggtatgtctatctgtagaaagaatggtgtgcccggatatttgggtagccagagacatagaactatggcagacactgctagttgcctctaatatctgttttttccattttgctcagtaataaaacctcaaatgttagctgggcatttgtcccattaattaaaaaagattgtattcaccatcctctcttgcaatgaagtgtggccatgtgattaagctttgtccaaggaacgtaagttgtagtagtttgtatggatcttctgggaagtttttttaaaaacaggaagtatgcccttttctccccgcccccgcccccccgttttttttttttttttttttttgagatagagtctctctctgttgccaaggcaacagtggtgtgatcttggcccactgcaacctctgcctcctgagttcaagcgattctcctgcctcagtccctgagtagctacgattacaggagcgtgtcaccatttctggcaaatttttgtatttttagtagagacagggtttcaccatgttggccaggctggtctcaaactcctgacctcaagtgatccacccgcctcagcctctcaaagtactaggattacaggtgtgagccaccgcgcccggcctctcttccccttttgctggtcttcctggctagcatgttgatgtcatgttattttctaagttagggtggaaatcacaggtagcagatggcatagcaaactgtcacaaagaggctgggatccctaatcgttatggagccaccattttattctaggactgcctacctttacctgagagaaagatacttttatctttttgccattgttgttttggacttttcatctgagtatttctcttttattttcttcaaacaactacacctatctgatattatcttgttcagttttctttgttattttctgtcttctccctctagaatactagcttcgtgaaaataaaaatcttgtctctcttgtttctgtttgtttccttagcacagtgcctggtaaatagtaatgactcagtaaatatttgtagatgaatgaatgaagactagaagattcgaatggaattcttctaaaggtagttcgtttctgctttaagagactatggaatttagaaatccaaagaaactggcaggtttgttacatgtgaggagattgacagaggggttatatgactcaagcaacacaggacccttgtcttgctaattgttggccaagttccctagccaggtctgagttctaacacacgactgccgcctctactgtgtgtgctgtttggttgataagcacctatcaaagatgctgtagacaggattgctccgtggcctaaggtttggacaggatgacctattgcccttccccacacacggtcggggtatgaacatagctgagacttttcaagccttcgcaggtatcacagagcttggaaagcccagcacttgggggtagttagttgcaactagcaggcagccctagctgtttattacctgggactctcgggaaggcaagctcccggtgctggggaggacgtttgtcccaggcattcctctggcaaccctcttcctccaccagctcccaacaaagacatttaatccctttcttccactaccctccgctctacttggcttgcagttggaagctgaagtacaatttgacccaagccaccccctactgcgcacctgccatagcgcttgcgccccggagccgggcacggcgtcgcgggggtggggaggcggctcgtccccgagctgcgctccctcgcgtacagcctcggctctgggtgcgaagatcctctctgcctccgctcacccagccgcgccgccgcgcgggaacgcgccccagcggatgccctcttgagggagcgcgcacgcgccgcctctccccgcctccccggtgcgcgtcccgcccccttgagctgcgatacgccgagcgctcaacatccgaggactttggcccagagtaaccccgctctcgtgacctttcccctccattccgcacctccgagtgctggccgggcgagaggctggcggctgggctctcgcgcccctccctgcagggctcaggctctccccctcctgtcttctccgcgctgttcctcgtcatggcggccctcagcaagtccatccctcataactgctatgagatcggccacacttggcacccttcctgccgggtctccttcctgcagatcaccgggggcgccctggaggagtccctgaagatctatgctcctctgtacttggtgagacccgtcacccgtcccgcagggcgagtttagtctggaagatgggccgggggctgcagttggtgctcccgaggggctctgggggacttgccttgtgtcgggctctcttttggaggggtcggagtgttttggggggtcggtagggggaagggggaggtcgcaagggaaggatataccaattcctgcaagggagaaggaggaggggaattagagattgagctgtcatctgaatgcctgttgctaggaagaggatggctcccaacttttagaattaagtttaggacacttaaaaacgttaattcaaagaccagccttattttcctctggcctgccttgtgatggagaggtatttgtaggtcagcgaggctatgagaaggacctgcaatctttcctcatctagtttcccctgttttattttgcttttttttttttttttttttaatgaagaaggcatatttggccctaagtccctgtggcctcagatcttgactcagttttgagatgacaggattgtgatttgggggttttgcaagtgtttttgcaagttcacagaacagactcctgggttgagattgtgtgtggtgatttaaagggtgatgccagtctttcagtcagtgaacttggttaggacatctgactttgtgtcacctaggaccttctgttacacaactttacatacagggcaattaatagggaatatttggcagtatgtatatgtaacactgaggactattaaagatgctcttaaatgttctccgcaaaatctttttttcaataatcttatccttgatattaaagatttattattactttggccattgaagtgcattgtctcattttcttg

SEQ ID NO: 5542 - DNA, 6000 bp, Homo sapiens
caaaaagcaccgatgtacactcatatatgcactttatgtacattatgttccaattacaagtaaaaattaatagcattcttgaagaagagttttaaatatagatgtccttaggttgagtgttgaggttttgacaagttgtcttgctctttcagccaagccaaagccatgtactcctgtaaagcagagcacagtcatgagctttccttcccacaaggagcaatattttctaatggtaagtatgtcaattccctctgcctaagtttgtcatcatggggaggatgaaggaatagtatggtggtatgagtctaaagtagaagccagaagcctcagattttatcccatgtcctgcctctcataacgggcatgcatgaacacatcaaatccctctgggtggcatgcatctgtagtcccagctgcttaggagggtaagcccagcccaacccacaaaataaataaataaataaataaataaataaataaataaataggccaggcgcggtgactcatgcctgtaatcccagcactttgggaggccaaggcgggcggatcatgaggtcaagagattgagaccatcttggccaacatggtgaaaccctgtctctactaaaaatacaaaaattacccgggcatggtggtgtgcacctgtagtcctagctactctggaggctgaggcaggagaatggcttgaaccagggaggcggaggttgcagtgagctgagatggcaccactgcactccagcctggcaacacagcaagactctgtctataaataaataaaacattttaaaattccctctggattcattcctctcctgcaggcatttgtgtgtatgtacctgtttgtacatgtgtgtgagacagagagattgttttatttgactatgtgaatgcaaaggacattccaactttagagggctgtgacattgttttgtttggacgtttgagttgagtgtatagttggaccctctacattccagaatttttgcatgcacactttaaccaaccatggatcaaaaaggttggaaaataaatagataaataataatacaaattttaaaaatatatagtataacaactatttacatagtatttacattgtaaaaggaattacaaataatctagaaatgatttaaagcatacagggggatgtccctagggtatatgcaaatattacatcattttatatcagggacatgagcatgcacagtttctggtatccacaaggggtcctggaactaatcccccacagatactgaggactgacaatccgatgtgggtgtttaacccatctgtttatataattatttgacactaatgttgactgagtgctatttatttatttattttgccagtgtacccatcagtggaaccaggatggttaaaggcaacttatgaaggcaaaacaggactagttccagaaaattatgttgtcttcctctaatactatttagtggatggcagtatcttcatggtatccatggtaacgaataaatgctatgattttatctgacacagatacacggggatcagcccactaagtgaaaacagtcaatttctatcaagttcttcaccagcagactatgtagctccttattaatggaaaaaaagatttaaattgttggccattcttttttggttggtttcttattttaaaatatcttacttgtgaaaaatgtgtttttggataatatgtaactctccacaatgtcgcttccgtagcaattgtagagtttcaaatactgtgttaaatactgtatcccagaaatttggaaaccagaaatctgctatatggattttgagatctgtcctttactgcctggcattctctgaggatctctgaaattgttacttaaaaatgtaatttaaattgttcatttattgttttttttttcttagaaatatactgcttttatatatgattgttttgctggtcctaaacatttcaaggatgtaagtctttgttttaatataactttatttgttttccaagtagatgataatattcaaaagcaataatgtatatgatatctataaaggaagcaaaattaagtcatacactgattccactgtaaacaatctgtccagaattccagacaccttcagcaaactttttctgtaaaggcctgatagcaaatatttttgtggtgggttgaatttggcttatgggttatagtttgctgacacctagtttagagggtgtgtaaaactatcttcataactttgagatttttataaaattttacatgaaaatatactgataaattatatgcacatattttctaccagtagcattatagtggcatcatagaagaatatttaccaatgatggggaaactgtaaaactacagtatcaaggcatacaacttaaattccacttggaagattgtaaagtgtcaaagtattttaatgataatttaatttgggcttttgaaatgttcttctacaaatgaaaaagatgtttaaaaacgttacaagggaagctatgccttctgaagtctatccttagttgaaacagaaaataaacacaaaggtacaagatccttaaattattttgaaccacagaggttgaaattgttttgtgatcttcagcagaaataaaatctgtacatgattttcttttatgccttttagtttacagtctttattagcaatttcagtgaatttgtagagcatagtaataggtatttactgtccacttatatatatcagcatctggtcatgcacgaaccattaattctatatttctatttcaataattctaatatattatttctataaatgtaatatctgtatgtggcaaagagcctttcttctcaagatcctgaaaagctggttacctgccctttgagtgccacagtcctgaactgcttgttcttgacatcttgcatattacttcagagttccccactgtgcagactctcaggtattaactgtaaaaaactctttacatgccattattatctgtaatctctatctcttctactttaaattaatgtttctagaattaataggttaaatacacatacacacacacaactatgcctcagaaaagttaggcttttacaaataaaaagaataagattagaattaacaagtagagagaataacggtaggcagagtcagaatcaggaataaatatcagtgaatcaaaagaatgaaaaatattatgtaataaaaattagcaatgtaatgtaaacgtttgataaaagagtatctttttcttttatctcttactgttgacctctgtgcactgtaataaggtgtgttgctggatcttcttggtcgaggtccttggtgaccttagtagtaataacagcattgctgacaccctaattgccctctgctggaacagaaggtagttttccagtgtaccagtcccttagtctatacagcacccttggtttaagcacacttgccatcatctggtatcctgctagactagaatctcttaaaagcaaattggttttctttcaaagaccaacttgactccaaagagagattcagaatcctacttctcctgctgctgcataaagaatctcaaccttcattttatttgaacacggaccaaagtgttcctgcttctgagttgtctgtaagctaattctgcagatgttccattcagatttaaagcttttttactgcataggatgtggataggaagcctaactattgtatctgatggcaaggcatatgttgcagccacagtactggctatggtccctttgctgaaacaagctacagaagcactgattcaagttgtgcttgtgcttgaacttttaatcttctagatttgtgaggatggctctttttccttcataatggattacaatgtaagcaagtcatggccatatactggagacgggctaaagctgcttttcccttaaagtaagtttcctacagataaggtatttatgagcactgagaaagtcaggacatgtactctaaatcacacagaatgttaattccacaggaaggcaatgccagacattgaaagaggatcacattcaacttttaatagtagttcaataacaaaaccttagcttttcaggaacaatgtgaagatacattagaattgccacatccatatcttcaaaacacgcaacctctgcaccctaataactgcttacggtataatcagtatgatgatgagattgagggggtctaaatttaagttccttatctcctgagttatgtgaaaatatccctcagtacaaaacatttgtgtgtttcacagatgactctcttgttttgccgtaatgctaccaagtttatggaaactagtcaactgaaggatttttctgttgtgttatgtgtaaatgtctgaacagtaaaatcatctgtgtattcctgtaacattcacgaagtatgaggaagtgggtttctccttgtttgatgtgagtggttttgcttgttgcatgggttccctgtgctttgtaacttgcatgaacacaaccaggtttctcaacaatgatttgtctgctgactcttttcagagatagtgaaggaaaaaaaatgtattaaaaccccaaattatctaggtttccaagtaggaaaaataaagatacatatgacttttattattattcgatgataattagctttatataatgtggcatccttcataaaaattcactatgttgtgaggcaaacagatttctcactatcatccagtgtaccctgctcaccttctcactcctagcaccgttcttctggtctgtgttgaaaagggtatcattcatgtggtttcagtttagaagagtccctcagagctttgcctcaagcaatttcaaattgtagtgataccttaaatcatgtattcaggatgccttctttagcatttagaaccccaactagacttatactttgactaaagtcagaggcagaccaatttagggaacagattttgttctttgcttttatgatacatttgtaactcacagctgttagcatgacctcacatcactgcgtaggacccggaaatcacatctcctggtcaggtcacgaaaaagaacacaggcttgactattgtccagaagttactttccccttgactaaaggtttccccttagggtacacattgctatttaactttgcctcctacccttttttgttaccttccaaaatcaagacacttttaagaaacaaagatagttttctgaacattctgtgtcctgcctgtctcctgttgattcgcagatgtaatatcgagtattcatcaactggtctcaatttcctgaacacattcactgtatccctcattgtcaccgttatccccctgcttcaaaatgtgccagttccacttggtaataacgttgggaaaatgcaggtttatgaatgatgtggacttttagaggatcaaatcaataaattggattttttattttttgagggcagctgccctcactgttttaaataaagaatcttacataagaatgttgacaacattcacagtaagccattggcagaaaattgatctgcatgtcctagaccaatgattacaaggtgtctgtggtttagggggcccagcccatcattccttttccccttggcactcatgagagagatgccaagttcagtgtggatttttcttggtgctctatggagaaatggagtctgtgtgcttactgaagagtcccaaaaaccagagaccattttcatttactgccatcataaatattctccaccattcaagatgcctgtgtacacggctatttgggaaacttaagtgttggaggaggcaggggctgaaggtgtcaaaacctcctcagtaggataacccctttctcccctttggaccatctgccatctttcatgagtgtttcccatggtgtttttgcatccagagttgacaacaactcaattttgccttgaatttactcagtcttataaattaaaaatgtgcattttatataaagatgcattttatataaaaatgcacacctttaatctctatatggcagcatatacatatatatatataaaatgcacacttttaatctc

SEQ ID NO: 5543 - DNA, 6000 bp, Homo sapiens
ccaaaaaggacccctcataaccaaagcaagactaagcaaaaaaaaaaaaaaaaaaaaaaaaaaaaacatctggaggcatcgcattaactgacttcaaactatcctacaagatttataccagtaccaaaacagcatggtaccaatataaaaataggcacatagaccaatggaacagaatacagaacccagaaataaagccaaatacttacaaccaactcatcttcaacaaagaaagcaaaaacacaaatagggaaggggcaccctattcaacaaatggtgctgggataactgtctagccacatacagaagaatgaaactggatcctcatctcttaccttatacagacatcaactcaagatggatcaaacacttaaatgtaagacctgaaaccataaaaactttagaaaataacgctggaaaaactcttctagacattggcttaggcaaagattttaagaccaaaaaccccaaagcaaatctaacaaaaacaaaaataaatagatattacctaatgaaaacacttcggcacagcaaaataatcagcagtgtaaacagacacctcactgaatgggagaaaatattcaactatgcgtcctacaaaggactaatatgcagaatctacaaggaactcaaatcagtaagaaaaaaagaaataatcccatcaaaaagtgggcaaagaacatgaatagacagttctcaaaagaagatacacaaatgactaacacatgaaaaagaatgctcaacatcactaattatcagggaaatgcagattaaaaccacaatgaaataccaccttacttctgcaagactggccataatttacaaagtcaaaaaatagtagatgtttgcatagatgtgatgaaaagggcacttttacactgatggtgggaatataaactagtacatccactgtggaaaactttatggagattccttaaagaactaaaagtaaaactaccatttgatccagcagtcccactattgagtatatatccagaagaaaagaagtcattatatgaaaaagccacttgcatctgcatgtttataggagcaaaatacacaattgcaaaaatatggaaccagcctaaatgcccctcgactgacaagtggataaagaaaatgtgatatatttacaccatggaatactactcagccataaaaaggactgaagtaatggcatttgcagcaatttgtacgggagttggagaccactattccaagtgaagtaactcaggaatgggaaaccaaatatcgtgtatgttctcacttataagggtttgctgaactatgaggatgcaaaggcataagaatgatataatgggccgggtgcagtggctcacaactgtaatcccagcactttgggaggccaaggcaggcggatcatgaagtcaggagattgagaccatcctggctaacatggtgaaaccctgtctctactaaaaatacaaaaaattagtcgtcgtggcacgcgcctgtagtcccagctactcagaggtctgaggcaggagaatcgcttgaacttgggaggcagaggttgcagtgagctgagattgcgccactgcactctagccagggcgacagagcaagactgtctcaaaaaaaaaaaaaaaatacatacatacatacatatatatatatatatatatatatatatatatatataatggactttggggactcaagggaaagtgggaggagggtgagggataaaagactatacattgggtacagtgtacactgctcaggtgatgagtacacaaaaatctcagaaatcaccactaaataacttatccatgtaacaaaaaaatgacctgttccccaaaaactattgcaatttttaaaaatgtaaacattagccatgcgtgttgatgcacacctgtagtcccagctacttaggaagctgtggcaagagtatctcttgagcgttggaggtcgaggctacagtgagctatgattgcaccactgaacttcatcctgggcaacaaagtgagcccgtctcaaacacacacacacacacacaacaaaaaattggttttgtcctggtacctggttattataatttgaagcagaaattattttgtttagattttttaatattaagaagcatctccgtcgggcgaggtggctcacacctctaatcccagcactttaggaggctgaggtgggcagatcacctgaggtcgggagttcaagaacagtctgacaaacatggagaaaccccgactctactaaaaacacaaaattagctgggcatggcggcgcatgcctgtgatcccagctactcaggagagtgagacacgagagtcacttgaacccaggaggccaaggttgtggtgagccgagatcgcgccattgcactccagcctgggcaacaagagcaaaactgtctcaaaaataaaaagtaaaaaaaaaaaaagcatctctactcaccattaactatacaattaagaggtcacacctttgtttcatcatcgtagacaaggtaaatattactaaagaaaatgcctgtccataaaagggatctggtgacagaggacagcctctcccagagtaacaggcatccaggactccactctatcaacgatttctaaaacaatgggtgtgagcaagggctaggatgagatgtgtgattaagttcctgagctgacggcaaatttaaaagatgccctctcagctcctggctgcggcccatcctccctgtaaggtgcacgactccatgacgcttttcactgacggcactacctcttggccattaccacctcccaccagatcccattcgctctgttttaccagggaaaggtctgctccagttaatgccttatccttcacagtgatgttctttgactttataaaaacggagccatttggtcaacaggctgcccgtcggatcccgtgtccttctgcactgctaatatctagctgtggccctgctttaaaacccaaatgcaaacatctcttccatgaagcccttcctgattgccagtgccctcaacagtggaataagctgccaggcatcttagagatctagacccgtggttctcaacccccacttccccaggcctcctgagaagcttttaataggtgcatcagccctggattcttaccggcaggactgagagggagccttaacgcttgtgttcttctaatagtgtgcacagggttgacgggaaacacacacacacacagtgcagaaccattccacgaagctgtgtatccggaattggttccctctgaagagttcctggtcccggtcctgccgcggaccttcacggcattatagttcttaaacatggtgtgtccggagtttgttccttcaaatgttcaggtgtgtccgaagttttttctttctagagagttcgtggtctatgcacgacttgatgagtgaggccgcggaccttcgcagggagtgttacagctcttaaaggtggcgcatccgcgttgttccttcctcccagcgggttcgtagtttcgccgacctcaggagtgaagccacagaccttcgcagggagtgttacacctcttaaaagtggtgcgtctggagttgtttgctcctccctgtgggttcgtggtgtcgctgacttcaggagtgaagccacagaccttcacagtgagtgttatggctcttaaaggtggcggctccagagttgtttcttgtggtggcttcctggtctcgctggtttacaggagtgaacctgcagaccttcactgtgagtgttaaagctcataaaggtagtgtggacctaaaaggtgagcaacagcaaaatttattgcaaagagcgaaacaacaaaaccccaacaccatcgaaggggacccaaacgcagctgccgctggctcggatggccagcttttattccctcattggccccgcccacatcctcctgattggtcctgcccacatcctcctgattggtccattttacagagcgctgattggtccattttacagagtgctgattggtccattttacagagtgctgattggtccgtttttacagagtgctgattgatgtgtttacaaacctttagctagacatagagcattgattggtgcatttacaatcctttggctagagagaaaagttctccaagtccccaccaattagctggacacagagcactgattggtgcatttttacagagtgctgattggtgtgtttacaaacctttagctagacacagagtgcagattgatgcttttacaatcctttagctagacagaaaagttctccaagtccccatccgacccagaagcccagcgggtttcacctctcagtagcttacagaagaggaccctgctgccacagcacaataccacaaagaaagtcatgctctcctcagcaggtagcccccttctccgggacaggaactttgtttccttcttagctctatcgccagcacctagaacagtgcccacctgtcagatctgttatcagatgggaacatggcagatttgttgaatgaatgaaggaatgaatgaactatgtgacactcaaacttagccaccaaacttaaactaaaaaaactgggttgtggtccctgatggaccgttggcaccttcttcctttgctggacggtgatccgtggctgtttctgcggtgtgttcgcagtggttgcctggcttggtaacaaacactcttcggagccacagcctgttctcagggtcctcgccgcctcccaggccctgcgatctctttgcatctcaggaggtccaggttggttgcagtcctcttgggtgactcaggaaccagcctctcctgaagcacacagcttagggagttcctgaggccagagacatctccacgggaaagtcaaaggcctggaggaagtgcggacctgacgacagatgccccgcacgctggccgggaccgggaagggcggtcaagggtggaaaggggctggcggctgccaggcctggcggagtggagcggggcggggcgcagcggggcggggcgggcctggagctgcacctgcttctgggcggacgcacttggcgcgcggcgcgggctgcagacggctgcgaggcgctgggcacaggtcagacgtccgtacccgcagggggctcgaacctggaggagggctcgaagggagagggggccccgccaaggagcggggctgtgatggagaggaggttccgactcgcaggggacctgcgggggaggggacgcggacagggaggggctctgggacaggggtgaaggctgcgctaggggaggacgggaggggatggagggccctggtgtcgcggaagcccagctggggccccctccgggctgcggaaccggtgcgcacactactcccaccgcccccgagtgcctctgtccggctggccgcggccctggaacgaatattgctcagtcccccgcgagtcaggtctgccgcgttgcccggtgaggggaaggtgtgaagccccgggcctccgtctgcccggtgagtccggggacgcgcgcccccggggatgccatctggctcctgggctgtgaccagtcacagctcacatagctctgggcactggtaccgactgcctttccttgttagctgcgatacacaaatacacgagccagatcctttcctgaggccaggaagcctggaatctaataacaccgggcggtggataaagtcccccgagccagtgcttagcttccgttaatggagccatggatggaagcggatgtcaggcgcagtgggggagaaatttgcgggggtggccctgtctagggccagagaaacaacctctgaagctttgatccagccctagagggaagaaagatgtgagtttcagccagggaaacgtagcactttaagaaatagaaaccctttcaaaatttgagggcaggtagctctcctaaaagttgcagaaatggccacttctttttttttttttttttttttttgagacggagtctcgctctgtcgcccaggctggagtgcagtggcgcaatctcggatcactgcaagctccacctcccgggttcacaccattctcctgcctcagcctcccg

SEQ ID NO: 5544 - DNA, 6000 bp, Homo sapiens
ttcacaagttttctgtttgctgccattctaacaataactgtgctttcaggccgggtgtggtggctcacacctataatccttataatcccagcactttgggaggtcaaggcgggcacctgaggtcaggagtttgaggccagcctggacaacatggtgacctgtctctactaaaaatacaaaaattagcctggcatggtggcacacgcctgtaatcccagctactcaggaggctgaggcacaagaatggcttgaacccaggaggcggaggttgcaatgagccgagattgcaccactgcactccagtctaggtgacagagcaagaccccgtctcaaaaacaaaacaaacaaataaccactctgctttcaggtatatggagatgatgtcccaggtatgtgaccaaggctgaaaagactacaagtaacaggtgccaatggtcccagggaaaatccctttctggagactggacccaccctggcatctgccacttggaaacaaggttgcctgccctggttgaccagatgtccccagatcgccgaaggccccacacataaaacataaaataagctgataaaacatgatcacaaaagggctctgaaggtggcacagacactatttgaaatgcaactggctttcagcagttttctaagtagacagcagtcaggcgtgggagactgcaccataaatgctacgagaacaggatatgggggagggaaacgccttgcttctttcagctggccctgcagctataggataaggagcacaggcagggccgggcctcgggcagaggctgaactgtggccggacagcagcctgctgggagtccctgcccaacgcaggccacaagcccatctgacaggtgtggctcttcacctggccttccgaggcagcttctacctcagctgtaatttctcccacctccagcacagcccgaaggcctctgagagcagagcgagccagtgcgtccctccccagctcacagagcagacgttcacacagcgggctgaaccccgggagagcctcggggaagccggaggcccccagcgtggcaccacccgccctgggctgtgcccctcggagcagcttaccagaacatgtcctgagatggatgccgcgttcgccacagacgtggtgaagacattgtctgcagcagcccccacgttggccactgtcactgtggtcacctctgcaacagaaggagcctcatttaacaagcaacaaaagccagaatggacaaagcgaacagcctcgctcaggtgcttcaaacaaagtgactccccctcaggtgtgtgcccttgtaaccaggaagatcttaacacttccatgaacacgctcgacctacatttctattccattgtctaagtcattcggctcttccaggaaaaagagaggaaatctattcttccccagtaaagccttttacgtgcagtaaaaaatgcatacaacaaacccgccaccccagccagccccagctctatcaaaccaccacggggcttctatctccttctgcggcacagctgtgggttctgctggtcaggtgtgccctatgcctacgaggagctctcggcctccccgcaggtgaggacacctcctggacccactcttgtagctccattcctgcctctcctccaccgcaggggtcaggccaccatcgtcaggtgacctcggccccatgctcacagccattgcccttggtctctgaccccttcctcctaaaaagtacatctaacctgcctatgtcccttggtgccaccccaccgcaccccctacaacatggaactcagccccctggcatgcagacaggcccttcagcagcatctgcacacagggcagttaccacagaggtcagctgcaccccacctcctgcccctgtcatcccagataggtcctgcagctccagcctctacatgctggagtgtttctagagaaacactttctgccgccaacacccccacaccctcctctctgcctctgcaaagtcttcctgtgatgctcctaggccaagcaagtggctcttctgtcacccagagttctagaatgtcctgtgtccagggcaatctctggcacacagcagatgcttaaaagatactggttgaatgagtcctgaccataccattaacccagcactcaccaaactgccctaaaaatgcctgtttgcagccgggcgcggtggctcacgcctgtaatcccagcactgtgggatgccaaggcgggcggatcacctgaggtcaggagttcgagaccagcctgaccaacatagagaaaccccatctctactaaaaatacaaaattagccgggcgtggtggcacatgcctgtaatcccagctactcgggaggctgaggcaggagaatcacttgaacccgggaggcgggaggttgcggtgagctgagatcacaccattgcactccagcctgggcaacaagagcgaaactccgtctcaaaaaaaaaaaaaggcatgtttgctgtctgtctccacgaccagaccacaccaggtgcacggttccctcatcctcgcctctcagcaccacaagccccggcatgcggcgcgcggccacagtgagtgctcaacgccaggcccatggcagccctgggagcagccgcccaaagcctcctcaggcggcagcgtgtcctgctgagttacttaaacctggaaaccacttgacgtcagctgttcgtaatttttaaaaagtattaaagtgcttttaccacatcaaaacacaactaccatatttttcagaagaaaacacacgtcagcacatttctctgacatcatgatgaacagcatcatttttcttttatgcattcagaaaaatacgtgcaaaaatgacaaaaacctgaaatcaacctcatggctccaaatcccaacgtcaaaccagagtttagcgacggacgccaacccctgagagtcacaaagccttccctcacttttttttcttaaccaaccaaacaagcagcagtgacccctttgccttcgagggccactcagctgaccaagggcagcccagacgctgctggcccccacccagcccccaggccgaacaagcacccagagcacacgcaatgccctgacatacccagcacaccaggactgggatccagttcctcaacccgcaaagctccgtaggggaaaagtgcctcacaacgcaacaagaagctcctcccaagggtctcaacactgagctgtgagtccctgggggacactcgggaactccaatggggaagaatacagtgcgttaggaagccagtgggtggggaagtctatgccccacggacacaagggcgggacacaggaggtgggtggacggcaccagccccgtagggcatctgtgagctctgccacgggctcccagtgttttggagcctgagaaggagactgacctgtgtggcaagaaactataagcagcttatataaaaatgtggactggaaagccacagcagcctccccaaaggaagcccgacaggaagcggggcaggaggagcaggtccttagggaaaaaggcaagaggaagagggaggactgggaggggagcctgcacaggtggctccgcagcccccctgggccaccacacagccacgctgacctctggcatcatggcctccagcaggctgcccacccctggctccccagcgctcaggtcatgcctgaactggccctcaggaagtggggggttcctggtgaccacaggtgcccacccaccccagggcttctccaggacaggtggggggagccaggatggacgaaggcagggcaggggcagagctgcacaggggggaccagtaggaggcggggctgccacaaagaaaaggggggcagggggcaggtgtgtgcagggcagggccaggtcaggtgaggctaggcaggtcaccaggggcaggtgtgcggggcaggtgtttggggtaggtggggcaggctggtcacctggggcaggtatgtggggcaggtgtgcggggcaggtagggcaggccgatcacgtggggcaggtggggaaggctggaaacgtcgagcaggtgtgcgaggcaggtatttgtggcaggtggggcaggctggtcacctggagcaggtacgtggggaaagtgtgaggggcgggtggggcaggtgtgagaggcagatgtgaggggtgagctagtcacgtggggcaggtgtgcagggcgggtggggcgggcgggtcacgtggagcaggtgtgaggggcaggtgtgcagggcgggtggagcgggctggtcacgtggagcaggtgtgagggacaggtgtggcgggctggtcacctgggacagttgtgcggggcaggcgcgcggggtaggcgcgcgggaaccggacgaggcgagaggccggcgggcgcacttgcctgcgaaggctgcggcagcggcggcctcgtcggggccgggcagggcctcggcgcccatgtccatgtgcccgggctccgccgccatcaccgccactgccgtgacccgcggcgtctcccgctccgcctccgagtctgcgtcctcctccgagtcctcgtccctgctcagcaccggctcctccgcctcgcctcctgccgcggccgcggccgccgccgccacagcggccgcggccgccaccgccgccgcctcagccaggcccagctgctttgccgccgagtccgagtcctccatccggactccgccgagccttcccgaaggcgccgtccgggaccgcccgaagcgccggtcgcggagcccgaagcggggcccgaagaggacgcccgagctgggccgaggccgcccgaagccgccgcccgaatagggaccgaaaaggcagccagccgccgagcagagccgagccgagtccgcccgcggagcggagccgaggcgaacagaggctgcccgagtaggagccgaacctgcacgaagccgccgagccgagaccgagtcctgaaccgaggagggtcgaagttccccgaagtgggaagccgaatcagtccgaataggtccgagtcctcacgagggcttccgagagactcggcccctgctctcctcactgtcctgacaggctgaggcggctgtcgtccccggccgacagggctggacggctctaggcagattctcgccggcggccggcgcaattctgcctctcagagagagcttagtgccgcgggtttcgcccgttcccgccgccggcggaagccgagtcagcccgaggccgagccgagacgagccgaatgtccccgaggccgaatgctcccgaacgtcggttctccacctcttcccttccgaaagtgcccgagcggtgccggacggactaatcgggcctcggccgtggctcggacgtccgctcccgaaacgcggcgcggtcgggccccttcgtcaggagacgcgaaaatggccgaaggagcgcgagcgcgcgggccgagaggctgccgggatcgcgacggaccggcgggcggggcgggtaagatggcggccccgcggcgaggtgagctcgggcggggtgggggcttccgggcttgcagcggcgggcgcggcgtttccctgtggtgacaatccggtttccgctttcggtgcgctcacggggccgtgccaccgtctctacgtgagcgagacagctccgtcaccccatcgagaagcgcggcctggcctggcctgggtggcgggcgtcctgcaccccgaagagctcccccgcgcgcgggcgcctggccccgggcagggtgggtgcggagcggctctgggggccccagtccccggcagctcttgtcccgcgcgtggtttttgtgaagacacgtgggcgggatgggcgcagggtttcggtagccttggaactctcgccaaagaaaatcgcgggcgccggtgcctcagccgtcctgcctgagagactcgcctccgagaggaggaagggacagaccaaagcagtaaatcggccatcctgcagaggagccgccttctgctgtctgtgggtacagccagaactcccatacgcgggcgctgaagtgccaaaccttcgtgcgtgttctctagtaattaggtgcattgttttgaaggaataa

SEQ ID NO: 5545 - DNA, 6000 bp, Homo sapiens
acttgtgtgctatttttaagttgttttttataccagctgtatcttaagtagattataagctccttgggacagagcctttatagagtcttataatacttttatgcctatagcacctaagatacagggacaggccttcagatttttagaactggcacaaaccttagagagatcttctcgccaactctaaagtgttgaataatacttgctggttaattaatatgcaagtggtaaagaatgtgaaagaggaacctgtgagtcagatggttgtgcccagcttcagttggaagtcccagtccttcctctcccagctaacagcactttctttccagggttagtttggtgcttgcttggggtaggggtggagaaggatgttgggataatcagagctgagagggtgagtgtgtctaccatggcactcagctcactgtgcttctctcctggcagacccagtcatggcagcctccagcatcagttcaccatggggaaagcatgtgttcaaagccattctgatggtcctagtggcccttatcctcctccactcagcattggcccagtcccgtcgagactttgcaccaccaggccaacagaagagagaagccccagttgatgtcttgacccagataggtcgatctgtgcgagggacactggatgcctggattgggccagagaccatgcacctggtgtcagaggtaaggaaggtagtccctgtgtgactacacacattaaggaaaaataaaagaagaaaggttggtaatggccacctcatcttagttccacatcctctctggtgcagagagccccaaattccacaaaaagaagccacacagcacttgtctttgaattcctcgttatttgattgctgtcctagggccttttagctccacccctatcctttcctggctcctgccctttccttgccagaaaggctgggaaatgagccatctttataagcccatgttactgggtgactgtagagtctcactttggtctaaatctgacctagaatctcgaaatggcaaaatatcaagtcctgaatccattccttcacctgcagaagtgggttgagcttattgggagcctaaggcagggttatctttttttacctggtggcatcccaagcatggtatcacatacttttgataggctggactgaagggctgagacaatcatttattaaatccataatatagtatagctgatagactcctttttcactggaacatcctatccctttacagatgttctccacgcaccttcatgactccctggacagctagcaggcctccagttttatagggtgactactaaaagtatttgattgtctccgtcattcacacacaagtacacctactactccctccaaagtatcccagcaaagcagttaaattatgtcccagatgccctagtttccagttcaggaaggagagacagcctgttggccatccctgtagactagaaggtggatgtggaagggacccctcagccaggcccaaggcccctaccctctgacccaggcctgtcaccactgggtgagaaacaggtctgagacattcctgcagttcttgcctggacagtggtgatcaggcgtgaaggcgaggaccgttgttcattatgaactcatctcgctccgtgctctttccacagtcttcgtcccaagtgttgtgggccatctcatcagccatttctgtggccttctttgctctgtctgggatcgccgcacagctgctgaatgccttgggactagctggtgagtgttcgagtgctgggtagtcagccagagctttgcctgtactttcctacttgtgggagttcatctttgtcagggtctagccttttccccaagctgcttaacccttcccaggattctgcagagacatggccaaagagcaagccaagaactaccatggccaggtgtggtggctcccgcctgtaatcccagcactttgggaggtcaaggcaggagggtcacttgaggccagaagtttgagaccagcctgggcaatataatgagacctcgtctctataaaaaattagccaagcatggtggcgtgtgtctgttgtcccagctacttgggagctgaggtgggaggatcgcttgagcccaggaggtagaggttgcagtgagccgggatcacgtcactgcactccagcctcggcgatggagcaaaaccctgtcccacccagaccccctaaaaaagaacttccgccaccacgtgccagttgttcacttcctatcaggcatcgtgctgagctgtagtatctcatttaattgccagccacagtacagggaggcagtagaattgttcccgtttagtaaatgaaactgcagctcaacagaagcaagtaatctactccaggcctcacagccagcaagaaacagagctgagattccaacccatatcactctgagtctgcgagaacggcttattcctttgcaatgtgcctagcacctcccacccttttagctcttgccccgctctcccctcaccacttctccaggttggctgactctgtgactctcttggcttccaggtgattacctcgcccagggcctgaagctcagccctggccaggtccagaccttcctgctgtggggagcaggggccctggtcgtctactggctgctgtctctgctcctcggcttggtcttggccttgctggggcggatcctgtggggcctgaagcttgtcatcttcctggccggcttcgtggccctgatgaggtcggtgcctgacccttccacccgggccctgctactcctggccttgctgatcctctacgccctgctgagccggctcactggctcccgagcctctggggcccaactcgaggccaaggtgcgagggctggaacgccaggtggaggagctgcgctggcgccagaggcgagcggccaagggggcccgcagtgtggaggaggagtgagccggatgccccacacaccgccagtgtcataccaaagagctgagctgcttcggggccatgcagccctcctgccagccccctgcccttttcttgccctgtctctgaaccttcagaacattgatccttgccgcagccccactagccaagagaaacagagaaagaccattccccctgcctgtccttgcggccctgtcttctgaggttctctgtctggggttggctctcttaaccctttctctgctcccagcctgcctcaccagggaaggttggaggggcctccctctggcttctgcatctgcgccagcaaacatcactgccgttggtctctcatgacttaactggcttccctctgctgctgccttggcttcctcctaatgctcgtgctctcctgtccttctgaagttgctccttggccaaatctccagctcccttcttgttttcctcatcctcctaccctgtactcccaccaaaccatggtcctttaaggcacgctcctgtcctcctcattgcccagcagtagggaggggcaggggtaaggggacctgaggataaagggtggggaaacagggtcccctgaggcctgtgggggctgcaggggaggaggatgtaccttgtgtctctttcaagtgccttaatccgagccagcagggccttctgcttgcctgctgccatactgtatgtaggaaagtgttctgtggctgctttgtgtcaagaaaagagcagtcactctcagaatcttgattccccatcagccaaagcaaaagatggctgctgctttgtaggcatgtgcctgcaagtgggaccttgctgggcattatatgccctgtgggggtttcagagaccctgaaagaggagggaggacccgcctccttgtctgcacaactgcatgcacttctctccccatcgctccacaacctgaaaccgagaaggagttgctgaccagtgcccaccccggcagcccgggaggaacacaggcagctcctttcccttcacgtggtctgcagagagcagggtgagctgccagctgcccctctccaccagggtaccctgtcttggtggttaggggccacttttcctttgaggctctagtggaggtggatgtccttctctgccaggcttggcacatgatgtgaagaataaatgcccaattcttactgttcaggtttgatgtggaatcacagctgcagtgatatatattttttatcagtgcttggttggttttaaataaagtgcacgctattttattatcttgttctgaataaaatgtatttactccaagtctggattgcttccatgtctcctctactgctaaacccatttctgtagtgcagctccgcctcccaatttctccctgtgggggcagtgtgaagctggcagaggggagagctgaaaaggcaggctggtaccaggtacccttccctccaggagcacaaggaattaggaaagcatgcccccattacaaaacgtaggaacgactggcactgctggaaatgcgtgtgcttgctgggcagaggggtcaccccttccctgcagtgtgctgaggtgggtgggcagcctggagaagacttgcctgccctccccttcaccacccacctgaggactttcctgtgccaaggtttccagtcggcccacaggctggaccaattttgcggagggcctcagacataattttttctttgtaagctgcccagggcatgagagtgtgcagctggggcccctgctctgggcctctccccaaactgcctggtaggcaacactgggtcaggacccttgaggctggccttccctcgggagtgttgggcaaccctcaaccctcctaagcgctgcaggacgctgcccaggtggagctggtcaagagactagagctgcctgcacctagagcccttcctccacggcggtggcctagctctgtcagggcaggctcaggtggttggcatctggccccgtttgaccccctccctcctttcctgtccctgcagctcccgtcccatgtgtccctgaattctggttctgactcaggtgtcagatgccttcacaagtgagctgcttgtgggggtgggtgaggcagagaaagtggctttttcttccctgatcagaagcttccgtgagggagccacacagaactcaccgagtccctcctggcagaggcggccgtcctctgttgcttccagggacgtggccctcttcccgacctcggtcgcctgagcgcgcagggattggggatccgtagggcactaggacccggcggggcggagggggcagcccatgtgctgcgattcgctccctcccaccccactgctcccgctccattgtctgggaattgcagccgcggggcgggcggcggcggcggcggcggcggccgggacccagcgggccaggtggggacggcgcggagcgggtgcgggagatgccgtgcgggactggggccacctgagccgcccgcctcgtccccgccttctgtgggaaggatgtgcgcgcggatggccggtcgcacaacagcggcccctcgggggccctacggcccctggctctgcctcctggtggccctcgccctggacgtcgtgagaggtcagcgggaggggagggccggggcgaggggcggccgggcccggccgagtgggagcgagtgatgcccgggagccaccaacctttgggttctcggactgaaccctgagcggggtcgccccgcagcgccctgaaggtcggagagttcttgccctcgggaacctgcccccagccactcgcccctaaggcttccttcaccttgcacgacccggcaactccttcctgacccggggcagcccggcgcaggggcttccccgtcccgcaccttctgcgagggacccctcagcccgggcatcgaacccggcggccccggtcccgggcgcactagcgtcatccccactccctcactgtggtctgtagcgctgcaccctcctagcctccttccgccgccaccaacccacccccctcgggagtggaaagcagcccctttgcctgggacctgcaacagacgcaagccctccctcccccttcccccagggctccctgaccttggcgtctccagggatggccg

SEQ ID NO: 5546 - DNA, 6000 bp, Homo sapiens
attaccaccccataccccccaggaaaaaagggacaggaatcaaaatccaggctaaattacgcaaacacccaggccttgggttctaagataagaaggcaaaaattacagtctgaaaagagcaaacaccccactattaccctagacaggaaggagtcagaaaagttcttccccatagagtaagctctatggggctaatcttcactggagaggtaaccaggccttcactccactgcccacactccacaccttgaaccagctgatgcccctcagctgtctccagccctgagacttctgctttctcttcctctggggaaagtccagagaaaaaaagaggaagcaacaactcatggtccagaaagcaagagatttattttgagatttccacaagtccttgataaacccagaaaccaactctggtttcaggcatggcaaatgcttaaagccctgagcagttgctcttaaacgctaggtgagtgggcaaagccacaggactggccctgctttcagctaatatgtaggcagcacgggcccaggcatcaaggcagtcaccctgtcccacggactcacaccaagaaggcaacagtgtggcttcctgcattgaggtccctcactcggaagcagctaatagccaatagcccccacggaggtaaaacatttgactgctcacctttagccctaatgataggctcagagaactggcctgggctccaattcctgcgaaatgggcaccttgagcaaatcacttaacatttgcaggactcacctgcaagaaaggcgtggcagtaagaatacttgaacagtaagaataacgaacaccagctacgagcaccagagccttacacacaagatcccatttactcctcttaaccctgggaggcatattattccgtgaggaaactaaggctgagagagataagtaattagcatgaggacccagtgagagtgggtggggagttccaaatcctgtgtgtttagcttcaaggcccacgctgcttccttgaccacaggttgtcagatcaagtgagaaaatgaatgtagcacactgtagaagtcaagtattagaattcttcgctgggcgcgatggcttatgcctgtaatcctgcactttgggaggctgaggcaggtggatcacctgaggtcaggagttcgagaccagactgatcaacatggtgaaaccccggtctctactaaaaatacaaaattagccaggagtggtggtgggcgcctgtaatcaatcccagctactcaggaggctgaggcaggagaattgcttgaaccagggaggcagaggttgcaatgagccaagattgtgccattgcactccaccctgagcaatgagagcgaaacttcatctcaaaaaaaaaaaaaaaaaaaggctgggtgaggtggctcacacctgtaatcctagcactttgggaggccgaggcgggcagatcataaggtcaagagatcgagaccatcctggccaatatggtgaacccccgcccccatctctactaaaaataaaaaattagctgggcatggtggcgcgcgcctttagtcccagctagctactcggtaggctgaggcaggaaaatcgcttgaacccgggaggtggaggttgcagtgagctgcgatcacgccactgcactccagcctggcgactgagcgagactccatctaaaaatatatatatatacatagaattcttagtcattgctgtcatgcacttcatcctaactactaacatgcagctcatgttccttgtgcctgcccaggcctctcagtggccctcagccatgccatgccagctctccccatgctaggggtccacctacttaggtaaagatgcacaaggtgacccaagttggcagtaatctctgagaaaggaaggtccagccaggctcggtggctcaagcctgtaatcccagcactttgggaggccgacgcggatggatcacctgaggtcaggagtttgagaccagcctggccaacatggtgaaaccacgtctctactgaaaatgcaaaaatgtgctgggtgtggtggcgcacgcctgtaattccagctaccagggaggctgaggcaggagaattgcttgaaccctggaggtggacgttgcagtgagccgagatcgcgccactgctctccagcctgggggacagagtgagactctgtctcaaaaaaaaaaaaaaaaaagaaaagaaggtccaagggctgcagggaaaaagcttccatgaagctggcaggagaaaatcatgccaccagcctcctagaagatttgtgactcaactacttaactcagagatttgctacccagcctcagaactgcctcctcaattcctccaagggcagaggacgtttcagatcaccagatattcacctaaaacactctccatccctcagtgaaatgtaagagatcttgatcagcaggctcactcatctgacaatatctacttccacaactgttttttttttctttgtaagaggaaaaagtaaatgcagtccgaaaggatctgtagccacaccctagaaaaggtcctggtttactgctctgtgacagacttagaatagaccctgggcacactttcctgacagagagctgcaaagttatattgccctgctcacaatacacagataagccctcctacttcctgaaatagagcaaagcaggagaaaaggaagaatgcagtgaaggaccagcacagtgattcatgcctgtaatcccagcactttgggaggcccaggcaggtgggttacctgaagtcaggggttcgagaccagcctggccaacatggcaaaatcccgtctctactaaaaatacaaaaattagccaggcacggtggcatgcgcttgtagtccaaggtactcgggaagctgaggcacgagaattgcttgaacccaggaggcagaggttgcagtgagccaagatcacgccactgcactgcagcctgtgcaacagagatagactctgtctataaataaatacccaggagttccagaccagcctgagcaacagtgagccctcatctcttaaaaaaaaaaaaaaattagctgggcgtgatggcatccacctgtagtctcagctactcaggaggctgaggtgggaggatggcttgagcccaggagaaggctgaagtgagccgagatcgcaccactgcactctagcctgggcgacagagctagactctgtctcaaaaacaaaacaaaacaaaaaaaccgtgaaaactgcaatgcaaatgcttgaaaatatcctctcatttgttctaagggcaggctgggctgtgatcccagggtgtgctcactttgcagagccccattctaagggagcagtcagcaagctcttctgtaaaggtccaggtagtaaatattctaggctttgtagagcacatggtctgtcacaactatgtcatcaactctgcccatgcaagagcagccacataaacatcttaacaaatgagcaccacggctgtgttccagtaatatttatttatggacactgaagtctgagtttcacataattttcacgtcacaagatattattaacttcttgcgaaaaaggattctcccggctgagctaaaacaggtcacatccaggggtaagaaatgctagttcccatccagcccttagtcttagaaaaaggctctacgcaggctgggcgcggtagctcacgcctgtaatcccagcactttgggaagccgaggcgggcggatcacatgaggtcaggagttcgagaccagcctgaccaacatggagaaaccccgtctctactaaaaatacaaaaattagccgggcgcggtagcgggcgcctgtaatcccagctacttgggaggctgaggcaggggaatcgcttgaacccgggaggcggaggttgcagtgagccgagatcgtgccactgcattccagcctgggcgacagagtgagactctgtctcagaaaaaaaaaaaagaaagaaaaagaaaaaggctctactccaaactcttgcagtgttacttttataatttagaactacaaataaatgaaggggtagaaaatcagtttgttgctctccctccccgatggactgggggacttcaagaatcttgaggaccagatttaggatacaagccctaaaccctcatcttacaaatcaaaaacactgtgacactggggcccaaaacaagaaaatgacttagccaaggtaagtggccgagctggtacaggaattcgggtccactccctctcagctctgaggattccttattctcaaaggtagcttctgttaaagtcggaacatgaggagtgaagggctcaatattcctgccaaggaggtaggtgaacaagttaccccttagcaccggaataattatagaccccgacttcaggctgtgcctaggtccggctcaggtgtccaaagaaccgttccaggcacccgaggggtgatccctgactcctctgctgggtgctcgtgccagctaacaatgggtgaaaattggggtgaggagctccaggtgctttctgcgtcctctgaagagctttcgtgcctttataaccaccgcgttggaaggaagagcgcggagaaaggtgcccactttctaaaagagaaaattgaggccgagcaaggggatcgcgacagtgcgaagcgagatagcagcggaaccagcattcgaacccaggtccctgaactcccagccccgggatccttctcacccctaaccacagtgggacgaagtgaggccgggatctccggaacccgcctctcgctaccaggcgccggagctgccgctcccgaggttcctaggagatgcagaagacactgccctgaatgcctacagccggctggcaatgccgccccagagcagagcggcgggtgccgcctcgccttcttataggctcgcagcacttccagtcgcgcgcgaggcctcctgggaagtgaagtccggagaccaggggtggccggctcccagcgcgccaagctgctaaccccctaactcccgttcctcctcggcgtttcttctccaagtccgaagtcagggtccaggactgctgcgatgcatcagccccgcctctcatcccccatccagaggaggcggaaatgttcaggtgaacgcgaagcctcccactacgagccggccctcagcaaggccgtgcgcagtgtgggcgggagccctaagtcagctagcggcgacgctgggagggcccggagcaggccgggccccgaacagcgaaagctccaacatggcggccagactggccatagagcgggaagagaaagccggggactagcaggccgcacggcgcagacggggcccgcctcctccatttacttccggaatttaaagccggcttccggaagccgggacgatgtccgcatgacaaccgacgttggagtttggaggtgagagtgattgacgaggagtgggttaagtgaccagaagtcagaatttttggtgctgttgttttgggcttgggttttatgctttgttgttgtttgccaaggaagcctcgtttttaagtggattgggaagcgtgaggaatactgccctaggtacaaagggaaggcggcaggtagcggtggacgaattaaagagcttcatgagcttgtgagtctccactgccctaaactggaggggatcgtcgtacgtagagacaggcatgggcgtttctgcataacggatcctcaaaacagccctggatggtggcctatgagtagtggttaagagcacgggtttggcgtcacagttatgaagccgggttctgctgacttgagacctggaggaatgccttgagctctgacttctgtgtcctttcctgtagaataggaataattcccaccttgcagacttgtagggaggattaaaggaaacgatcttggttgacaagtttatcgtggtgtgagtacctaggtagtagctatcagtgttatttaatgcggccgggcgcagtggctcacgcctgtaatcccagcactttgggaggccgaggcgggaggatcacgaggtcaggagatcgagaccatcctggctaacatggtgaaaccccg

SEQ ID NO: 5547 - DNA, 6000 bp, Homo sapiens
ccagccaggagccaggggatggtagtggtggccaaggtgatggagaaatggatgctctgggggtagactagacaagacctgatggtgaactgaatgttcaataagaaatggagcctgtcatgaatagcccccggtctctagagtttttgttccaggacccattgcttatccagacccagaaactatctgcctcctgcaaacccaggtgaaggccataaagtctgcaaagaggcagctgggcccagatgagaccatcagctcctgggttccacacaacacttccgttacacatactttgttttgtgagcttggaaggctgaatcagaggcgcgcgctgtgggaggcagaccctgggagcagcatctgccggtagatggccagacaggctggaggctgcagccatggagcaggggcctgttggtgcagggcaggcagcatggcagggagagcctcccagggcatccccggcaccactcaagccaacagttgttgctcagtcattaccctgagtcacccaacgaaggcggctctgtacacacgagggccagagggcgtgggctgcatttcaaaagttcctatcctgttctcaggtgtgaaactcatacatgcacaagtcaaccacaagataagttcatccaattcaggctgcggttcccagcctgtgacttttgcctctcttcattcccaagttcaagggtggaaatgacttcattgtttctgtgcagagatataagaagaaatgacttgaaagccagaggccaggttgaatgcaatttgtttccatttccctctgttaatctttgagtgtttctactttcttccttgaaactggtggttgtccatggtctgggatctgtgtgccccaaacaagcccagacactccagagatacctgatttgctggtatctgcccagtatttcctggcttatctgctgtgggagatgatctgcttgtagattatggaacgtgccccataatcgtacattgatatgtagtgacctggttttaaaatttttttagaagacaaaggaagtttaaaactgatgttcccttcttaactataatttgaagagtctcaaaaccaaaagaaattttacaggccactgatttcatttagcccattttcagagaaagtgaacattgtagattcccttgagtgatcaagatatttcatatggatatgaattcagttcctggagtaccaactccagagaccagcggaagaaaccagagcccagagtcccaggacagtattaaaggttaaaggacataggattgctttcccccttctgcccttttgttggagtttgaggaaggggttcatagaggcaggtgtggaccagatataggctgccattcatggcgcctgggacaggtcttccaggacactcctgctgtgaagggaacctttgtccttcacattttcccatgtggcctcagggaagtatttctcttccaccatattcctatcttccttagggaggcaccttccaggagtacctccctcagttatgcagaaggaagtcttcaaaataccttcagatcatcgatcacattttatccccacaagaatcctgtgacctaagtccagatgtctttgtcggcatctcacagatgagaaaactgaggctcccagttgggggttgtggtgtttaagttgctggcctgcctgggtctcagcttctgtatccttggatctgatggccacagccagccacagtatacaagacccagcctctgttgttcattcacacatgcctgcattcattcattcattcagcaaccacatattcagtgctaaccatcaaaaagatgaataagagggctgggtgccatggctcacacctctaaatccagcaccttgggaggccgaggctggtggatcacctaaggtcaagagttcaagaccagcctggccaacatagtgaaacccaagtctctactaaaattatgaacattaaccaggcatggtggtatgcacctgtaatcccagctacttgggaggcagaggcacaagaattgcttgaacccaaaaggtggaggttgcagtgagccaagatcgcaccactgcgctccagcctaggcgacagagcaagaattcgtctcaaaagaaaagatgaataagaaactccttaccctcagcaaaggtgcaccgaggggttgcttgcccctttcttaagaatacagaaacagaaatgttctgaagctttcccaggccttcgaatttggaagttatgcacaaagtctcacccacatccctcccactgcaattacatctttgcctttttgtcccgttctacacaagaaaggcacccactccactgctccgtggaagggcaccataaagtcacacgcactggtccttgctatgcattcacctcccgactctctccaagcccagctcaggattgctctccagaccctaggagcctcccagccttttagagtgtagacgggagagagcccacaccttaaaaactaatacctaaacagacaaagcagcttatccagggtcacacagcaaatcagtgacagagtcaggcgctgggactcccacacctgtgcttggtgctgcctcctgctggtcccagcatcacatccagctccttttgtaactttttaaagtctggatttggcactgctaccatctttcacttgtggtccactctggccacaagattttttttcccctgtcctcccctagttctttatgtgcgtgtgtctcagttcccaattagagcaaacttctgttgaaggttcactctatgctaggccctgttggaaactctttacaagatatattaacaggtttcatccttccagcaaccccatgagggaggtcatataacatgaggtaggtcttagggatatggagagacaaaaacacgaagctgtgtgcctggggtcacacagctggtgagtggcagagctggtgtttgaacacaggtaggaggatgcccactcttgatcaggccccagtgctgtctctccctccaccatgcatgggaagttagatgatgtttctgctctcccaaagactgtaggcccctgagggtaggtgtgtcccttgataggcccccagtggacagatgatgggggttcgtattgaacctggtagccttccctgtttcaacttgatagaggatttttggccactccttagtgtaatttccctgctttctggcttggagggatccctgtggaatttcctccctgtctctaaggatttgtttgctattatcattatccctgccaaccaggagtgtttatggagccccaaccaggttctcagtccctgtgtactgaggtcaggttggagctctgtcctaacacatctctagacagtccctggccaggcctccggggtcctgccatccagctttggggctaatttgcaagttaagaacttgtgggtagatggctcagaggcagtcccagcacagagagacctgcagaggccagaggggctggccaccttcagatcccagaggatgctggatttgccctgtgccctgaaaaccaggttgaattacaaagggctgagaaggacagaaagggcgtacagggagggacacagtgtctgcaaaggcaaggaggagggactggggaaggcctgggggagggggagaggagactggggaaggcagtatggggaggagatgaggaggaatagccgaagccctcaggcgcacctgggactcaggcaggtgtgccctccgacccctcgagaccctgcattcacctgctgggcactggcacattccctgcacatgggcttctgtcttccaagagcagcttccggtcgggctcttttgccccctcagccatggggagagaaaagcacctttagtcaccagctccctgtaaccctgcccttgtttgacctccctgagatgttgaggggaaagcgtatctgccattgggtggccatcagggtgacggggatggctcccaggtgcctggccccagaattagatggagcgtccatcctggcacgttctggtcagtgtgtgctgagcttagcagagaccatcatcccctcagtgaagcctcccgctgctccgcatttagcagaaaccaaccctggggctcagagtgtccagagcctcccccaggccttgcagctggagaggggccaagcctagatgtagacccaggtctggctgactacacggcctgccatgaagccagtgccctgtcctgggctggcctcacctgctgccccacactgtccagacatacctgtggcctggtgttgcccaaacctcccgactagcctgtgcttatctgctgtctctactggccctgcttaaccactgccccaggctgggacagaactgaggcctgctaaattgctgcactctccccatgcccctcagcaccagagacagagccctgcactggggtcagccagcaggagtctggtactcagggccactgagctgggcagctcacccgtgggagcctcagtttcctccaggtcaaatggacctaactatagtaaccccctcatagggtcagcttgtggggactcagcgagatgacatacctgggccgagaaacagcgtcacccttagtcgcggctcctactaaggggggccgcaccttgggcgtgcagatgggacttgaggctgagctcagcctcccgcctgcgctgtaacccgggctctcctgccctgctgggcctcagtttcctccttggcgaattgagaagaatagctctttcgtgcttctcctgcagaaggaatgcaggccccccgtgctggctacagacttgcgatactggggtcttccgtgaaccccgtccttcatggggctgggcatgggaacccactgccctcaaaagccagccctcccccacccttccccctgagccctcccaagccacccacccacatgggcgtggtcgtggcccctaagcaccctcagactttgtcacagagggcaaggtgggcggggcacgcacactgagtccaggtcctcctgaaggtcaccagcacagcggggccctgtgttactgtagagagaagtcagttgcttagtttcagcctcctgccggcaccagatgctgaccaggccctcccaggtggtgagcaatgctgtttccaggagaggcatcctagggccagagaggccaaggtgccagggacatggccccaactgtcccctaaccaggggtagaggagtctagacccttgacatcaacacctatgaaaggtggggcagcccccaaccagcagccctggcccagagcctcctctctccttcccctacaactaaaaaggacagcctccactcgaggccttccctccccctctcccccactgcagtgctgactgtttggggaggggctccaccctccggcttccctgatacactttgggttgtatacagcccacctgcctcgaatgagggattctgcctgccccttttcccgaccagtgcacagccatttagagccatggtgcagccggaagctgcccaggggctccaggcgaccacgtggggggaccctccaggccagcgaggcccaagcacagctctgtccaaaggccacaggtgctcgggccctgcctggcgcagcatgccgtccctgcactccatcagggaggccctcttctcggatgatgcccctcgggaactgatagtgccctagggagcgtcctcacgtagccacaggaaactgaggtggaaaccaggcggccagctcgagggatgaggcacagctctgtggaccattagcagcttggagttgcctgttaggttctacccagcatggctttttttattttttcttatttcggaaacccagattgctgatcgacctgtctgtcttgataaccggccaaacccctcgggaattccagcaatgcaggcttggctttagcaatggtcccatcacactgccactgtgggaatatctggtttttaaacaaactgctccatactgctatctcccgtggccccctagagtccttcaaacaaataaggaaactgagg

SEQ ID NO: 5548 - DNA, 6000 bp, Homo sapiens
ttgtttttttctcagtgcactggaaaccactgaagagttttaagcatggaaatgacagtatttaattcacattttaagaagaacattttggccactattttagagggaggcaggatcaaagctgagagaacagttagtctgtgtcaggaaatggtggcttgcaccaggatgatagcagtagagatggagagaactatacagatttggtgtatgtttaagagtagaattggcaagacttgctaatggagaggaaaagggaactgagagaaagaaaataatccttaggtggcaaaaatatattctttaacacaagaggaaaccaatattgagatctagtttattaaaggtattttacagctaagtggccagagttttttaaggcaaggaatggtatctctctgtttcttgtgtcatcaggccatatctgatcctggcaaaagaaactggcatataaactatggtgatgcagacttttttttttttttaaataggatattagaaatttaagcttgctatgtccttttgtggaattcattgctctggtaatagacaatcatttttctgtgattgaagttaattttatattaaaatgttctattactgtacagtgaaaatgatataaaaatcaactgtatagaccattgttttctaggaacctctgagtcaaatgcatgtatttatttagtatatattatgttctcattactgtgctaggtactggaaagaatatagaagtataggatatggtttctgtccttcattaacttagaatctggtttattaaatgaattttataataaataattagaaacgcagttattctatctattgggaaatagctgtttcacttaacatttctgtgacgcagttctaccacatctgaattaaatcttcaacatgaatacagcacaatgtatctctatcttgcaatatactgttacatatttttctcaaaataatggccaatgtatatttatcttgtttccaaaatagattataacttggtatatatcttacaaattctcatatatcccagtctcttttacacattatgtacatttaatcctcagtatatacttttggattgatttgtatgtaaagtatccaccttatcatttcctttgttgctttgctctttggttatggtagcttatatagatcttgaggattctttttatggcaattcagttgggatataatttaaaaagagtcagatttacttagcaaatattttaatgccatgttctaggttaggtactgaagatcatgcaaagttgaagaagagaaggctgttgccacctgtcagtgacttcttttgagttctcatcctatttatattctttattttgtggagaatagtgcccggcgtgtagacaccattaaatgtttactgaataaattaataaaggatgaacagatctatcagggaagagaacacatgagcactgtacagaaagcattgaagagtaaatatcatttaaaaagcagaaataaaatgctactgaatttacagaaaagtactactacttgaagctgggatttggagcaaaactgtgagggaaagggaagggctgacccttaacatcattatgaaaaatgtgacatcgtttgagctctgaagggagtattaggattcagaaaggttgtaggcagggagcacaatgctcaactatgtttttaatgctgaggttttttctttataactcttgtcttatgcttgttttgcagacaatgtatttcaaaggcattgaagcagggaaggttccctattttcctcatgcagatactatcatctattccatctctacagcaatttgcttccaggcagtaagtataactttttgaaatgagaaattgaatgattcctgtttctaatgtacgttaatcaaatgggagagaaacaaactctgggaacatttctatttacagtattacattttaagcttcttttttgttttgttttgtttttttttcagcaagatagcttaccagcttctaatcattaatgttaacctaatgcgctaggtcctttttatgagtacaccaatttttaggttttaatagagtacaatttataagtaaattattgttccagtaccttgggaagaatgccccaatttaattatccttccctttgattaaaaaaaaaaggataatagggatatgctgataataggcataaatataaataattgcatttctccaatattattcagaaggaggatggggaagaactagtttcatataagcattgttcaatctctgaattctgtaaccattattattgacattaacggtgttagggctgttgtaaaatttttgggaaaacttttatttgctctttctcataaaatgctgccagcttgaaaaactcattaaaactaatgaagtatcaatatctcagtaaatgcttcctgataatgactattcacttaattattatttcaaaagtgacttttttttttcttttttttttttttgagatggaattttgctcttgtccaggctggagtgcaatggcatgatctcagctcactgcaacctctgcctcctgggttcaagtgattctcctgcctcagcctcccaagtagctgggattacaggcatgcaccaccacgcctggctaatttttgtattttcagtagagacgggttttctccatgttggttaggctggtctcgagctcctgatctcaggtaatctgcccgcctcggcctccccaagtgctgagattacaggtgtgagccaccgtgcccagccaaaagcaacatttttatttgaaggcatatttacaaaaattcttgatagttaccaacttaaacatcaatacacctttgtgtatttcatcactttcagttttcatttatatttactaaaagaattctcaaatttaatactcaggctgtcatggaagttcagactttgagaccatcttactggaagttccttttaagactcaccaagggcaagtaagtgactacgtagttttcttaaaaatattatgagtggttttatctttttgagggaatattctttcagtggtaaagtaggtatttatatataaataaaatatgagtaacttaactaagaataacatggggcgttttttgagtgagcattattctgactattcttttccctataatattgtagatgttttaagtggtctagattaatatcatgttgatttgctaactactaattagctgctacataaatacttaagtctgactgtttgaatcactgtccatttctttttgattaaaaatattaaacagattcattaaagatcatctccacataattaactgatttccattttggaaatagtcatattgtgttgcttcttgttgtaagtatatgttcctctaccttacatatcatttttgctttgttttgttttctcccctgatcttaatctaattctttgggaggcattttgacctaatagaaagagcatgggctttggagtcagacagacctaagtttgattccagctctgctaccttcagctgtgttgctatggaaaattatttaccctcgtgagcctaagtttttttcggtctacaatgaaataataatgcatacattgtatggttgtaggaaaattaagatgcttatagtagcgctgggtaaattgcatgtatgaattgctatcattattaataataatagcaaatactagtatagtgctgacaatgtccaacatatggttttaagaggcacacatacaatatccatgtatacataaatatgcatttaatccttaaatcctaactgtaagagttaggttctgttattatccctgttttacatatgaggaaactaaaatgtacaaaggggttagatagcttgccagagtcactcagttagtaaatgaaggagctggaacataaaccaggcagtctggcttcagaactttccctcttatccatgtcactgtagatcctttacattgttattgtttaatcattttttgtcatttagttttctgcacattaataagttttactaattgattattttggaagggaacttactttggaaaagtactgaaagtcacatttataggctgtcagaataatgctggccagtgattcaaaactaatttcattcagctgttttctccagaaaggaaatgcttgtgaataagcacagagacccagaaggtctatcctgtacattagctaaatttgtgtgtttaaaaaatgttatatatcttaggttaggtaatggataacgttagggtatatttttactgtgttgtgtctattaaacatttgaaaacctatatgctgtttgccttttagtcattaaatgtttgcacatttgaatgtgttttcatttgatggtgagacattatgatgtcaattatgagagaaattacatttaatgcttttgcctcattggtaatgttagctcatttattgtttagtttcctgtgaattcattcatcataaaaataataatgaacctaattttctatttgatacagtctagtggaaagaattctagaagggtttaaaataatggttgtaatctctgcggtttcagatctggggattatctctttaatccttaatcctaactggattatctctttaaataaaatatgagacagtgtatctcgaagaagagccttcatgtgacttgaatctgccattgaatttagatcctttgccacgttagccttttctgttttcccatcccacataagataagtcaactaaaatgaattattttattttataaactatattaatatttgtttactgtattctttgttttacagatttgctgtcatgaaccgaaaagtccttgatgtttttggtactggtgcatctaaacactttcaggatttcatccccaggttggatccaagatacacaactgtaacaccagagttgcccacagagttttcctgaagatgactgtaacttattaatgtgactaaatgtttcatcttgaagagttaattatgttgaacacaaaggagggggcccaagctcgaacttcagtgttatttcagttagagatactcttttcatttgttttgtttttcttatgaatcagaaattcagaagctttttaggaagatgttgcttaataattaagcttcctccatagccagaataagattctggatcactgtagtgactgacattatatattattgatcaaattatgtccacaagcaatattatataatctacgtagaagtgtaataacaaacaagagtacacttaaaattactttaaaagatgtctttagttcattccaatataattcttgattaaaattaggattatttctacattttaggatttacaaaggatcacgggtacatggatttggtctatatatttttttaaagttttgaattggtatctgtagtagtggaatgttatagatttgaagtaactctccacggacagtgctgctttcgtgtagagcaatttaattggagaagtggccattcttacttcagggatgcaaagatgggtctcataccatttggataaatgtcgtggtatccatgctttttttcaactaataacatcatctctcttcatgaccagttaattgggctatttggcagcccagtgaacctatgtactaatggcaagttaggggcaaatggaaatggacacatccgataaagttgaaatgtatgttttaatctttcacagaagtattacacttgaatatttaaaaacaaaacttttaaacttcctataggtttatgatgtttgttttcatttatatggacataatccttcatagctcagtttatatgccattgttgtattagaagggatcaaaatcctatggaacaaagtagtcttggcaagttggcagtttgtgtcctctcagctgtttaacttatgtaatggatgttttgcacctgaaaacactataaaaatccagtggttgtttaaaaagtccatttgtcactaattccattcaggttctccaaccttcttcttgaatatcattgtc

SEQ ID NO: 5549 - DNA, 6000 bp, Homo sapiens
atatatgtgtacacacacacgcacacgtctctgcctgtttattagagtggcttatttagtccattcatatatattaatggcttattttgtgtgtgtgtatgtgtgtgtgtgtgtgtgtgtgtgtgtatgcatgaaggaaggggtaggaaatagagctattatagatgtgtgtgtgtgtgtgtgtgtgtgtgtgtgtatgcatgaaggaaggggtaggaaatagagctattatatattggaacaaagtcactatattttatcagaattaagttactattaaaatagaccatggtaacttcaagatgcatactataatccctagactagagcatgcagtaggaaaaaaatatatatagcttaaaatatgaaaaaagtaattaaaatggtatactaaaattacttgttagacataaatgacagcaggaaatgaggcacggaggaacaaaaaaatgcatgagtgacagaaaacaaatagcaaaatgacaactataaatataaccacaccaataattacattaatatgaatggactaaataaaccgtcccaataaaaaggcagagattgtcaactatgcaaattctcaaggaatttcccttttatgcatagttttgggaatgctagacttatattaatggaaataagccaagaaagaaaaataaatggcatccaagaaacaggggatccaaaacaaggaaaagcctcttctggaagctgcagcaaaaggtagggtgggtggaaaacaagaaaaaggcaaagggaatttgtaagatggtgcagaatgccccaggaggacagacagccagttcaattttaaagagaatattctcaaaacaggtctctaggaataaaacagaaataagttatctgaggttaaaatgtctagaatttaatttggtcaacatttgacagatcttttagccctttggaggaaaaacatagtgatcagtatttgggaagataaacaagtaaaaaaacaatgcaattattaaccccagaataaaacaaaagtgttaggccaggtgcggtggctcacgcctgtaatcccagcatgttgggaggtcaaggcaggtggatcacctgaggtcaagaattcaagaccagcctggtcaacatggtgaaaccctgtctctactaaaaatacaaaaattagccaggcgtggtggcaccatccttcattccagctactcaggaggctgaggcaggagaatcgcttgaacacataggtggaagttgcagtgagcagagatcatgccactgcactccagcctgggcgacagagcaagactctttctcaaaaaaaaaaaaaagtgttagagaaaacataacccataatacactacttggatctgcattcattcattccacaagtatttactgagtgctcactctgtgtctggccctgcggtaagctgtggactaaccacaataagcaaatagatcaaatctctgctttccagaggcccacattttagtggatgatgacagatgcttaaaaaaaaatcagtctgcaatatcagatggtgattcatactttacagaaaagttacaagtctacatagattgaaaagtggggcaggcctctattgtacatgcaggagtcacggaataaagtggcatttgaacagagacctgagtaaagtgaaggagacaactgttggctgcctgtgggaacactgttctagaagccacagacagtgcaatgtcctgaagcaggaatggagtgttctcagccatttaagggaatggaagggatccagtgtggcaggggatgagtgctgggagaaatcaaagagatggctcaggatcgtatatggccttattggccctggtaaggactttggatttacagagccatgataatgaaactaatgatttcaacaaacgagtataatgcaactgctatgaaaatagcagggtggggaagagggagaggctgtgagagagctccaggaagttggtaggtgatgcctgacaatgatggattaacaaatgaccacatgcacaaagcattaggttggtgcaaaagtaattgtggtttttgccattacgtttgcacccacccattaactacaatggtggaggtaaataccggaggaaacagctgaaagggttgaaagtggctttgctgggggtgaggagggacagaacatgaggctgttgcttttcactataagtctttcatacgagttgattttctgaaaactgtaagcatttttttaaaagcttatgaagttatttttttttatttttttttattgatcattcttgggtgtttctcgcagagggggatttggcagggtcacaggacaatagtggagggaaggtcagcagataaacaagtgaacaaaggtctctggttttcctaggcagagtgtgtgtgtccctgggtacttgagattagggagtggtgatgactcttaacgagcatgctgccttcaagcatctgtttaacaaagcacatcttgcaccgcccttaatccatttaaccctgagtggacacagcacatgtttcagagagcacagggttgggggtaaggtcatagatcaacaggatcccaaggcacaatttttcttagtacagaacaaaatgaaaagtctcccatgtctacttctttctacacagacacagcaaccatccgatttctcaatcttttccccacctttcccccttttctattccacaaaaccgccattgtcatcatggcccgttctcaatgagctgttgggtacacctcccagatggggtggtggtggccgggcagaggggctcctcacttcccagtaggggcggccgggcagagacgctcctcacttcctagatgggatggcggccgggcagagacgctcctcactttccagactgggcagccaggcagaggggctcctcacatcccagacgatgggcggccaggcagagacactcctcacttcccagacggggtggcggccgggcagaggctgcaatctcggcactttgggaggccaaggcaggcagctgggaggtggaggttgtagccgagatcacgccactgcactccggcctgggcaccattgagcactgagtgaacgagactccgtctgcaatcccggcacctcgggaggccgaggctggcggatcactcgcggttaggagctggagaccagcccggccaacacagcgaaaccccgtctccaccaaaaaaatacgaaaacccgtcaggcgtggcggcgcgggcctgcaatcccaggcactcggcaggctgaggcaggagaatcaggcagggaggttgcagtgagccgagatggcagcagcacagtccagcttcggctcggcatgaaagggagaccgtggaaagagagggagagggagagggagagggcttatgaagttcttgatgatgggtgggaccctcatctgtcaatgtgtaagatgtgaaacagccctgacaatgtagctggtgctagagggacgggcctgtgtccagggttggaatatgctgtgcagaccaggaatgctttacattccggggtggtcttttctagatcactgtctcagtctgcttgtgctgctacaacaaaataccacagactgggtaacttataaagaacaaatttatttctcacagttctgaaggtttggaggtccaatatcaaggcactggtatgtggtgtctgttgaaggctgtagcctcacatggcagaaagggcaaaaaagggaagcaactccctccattcagccctttataagggtgcttaatcccatccacaagggaggaaccttcatggcttaatcagctcttaaaggccccacatctaatactatcacaccggcaacacctgaattttggaggggacccattcacaccatagcattccaatcctggccccccagaattcacgtacttctcacaaacaaaatacattcattccaccacaattgccctcaaaagccttaaatcattccaacatgaactttaaaatctaagtccagaatcttatctaagtcaggtgtgagagagactcattcactttgagataaatttcatcctgaggcaaatttctctccagctgtgagcctgtgaattcaaatgagttgcgtactttgattcaaatacaatggcgtgacaggcacaggacagatgtttctagtccaaaagggagaaacaggaaggaagaaaggagtaacaacaggtctcaagtgagtccaaaactcaacattagatcttaggcttgagaataatattatctgactccatatctcaccttctgaacacactggggtgggtgttgggcccccaaggctccaggtgataccacctccaaggcttccctaagtattggcctactgggggctctctgcagtggctccaccccggtgacaaatctctgctcgggccctgaggtcaaagaaatcctttccatcgaggtggaggcggccgtgctcccacagctcatacagtatgcatacctacagagtcagcaccacatggatgccaccaagatttataacttgcgccctctggagcagtggcccaacctgcacctggtcctgcttgagccacagctagggtgacggaggaatgctctgctggaaatgtggggagcagagacctgaggtggccctaggcagtgatctctgagaccccgcaggcgcctgggcccttcccctgaaactgttctgccgcaaggctctaaccctctgggcctctaatgagcaaggcagccccaaatgcctttggggtcattctccgaaatggctttggagtcattttccgaaatgactttggggtcattttcccgttctcttgataactagcacctggcttccttctacacatactaacctgcttatcagtcctgtggccatacccgtggttttctctcctacacacacgtttttctctttttcatggctaggctgagaatttttcagatattgacctttagctttccttttgatggtaaattctgccttcaaattatttctcttttctcacgtttttttttttgttgatgttgttgttgtttttgagatggagttttgcttttgtcacccaggctggagtgcaatggcgcgatctcggctcactgcaacctccctctcccgggttcaagcgattctcctgcctcagtctcccgagtagctgggactacaggctcctgccaccgcgcccggctaatttttttatgtttagtagagacagggtttcaccatgtttgtcaggcttatctcgaactcctgacctcaggtgatctgcctgcctcgccctcccaaagtgctgggattacaggcgtgagccaccgcacctggcctctcatgtttttctataagcagttaagagaagccacacagcatcctgaacactttgctttctatctcttctgccaaatatcctaggtcatcattcttaagttctgccctccatgaagtcctaggaaacgacataattcaggtaagttctttaccactttctaacaaggataacctttcttctagtttccaataccttgttctttatttctgtctgagacctcatcagaattgccttcaccatcggtatctctatcaacattctgttcatgaccacttaggcaatctctaagaacgaggctttccccacagctcatatcccacatctacagctctcctcttcttctgagccctcaccagaatcatccttagtgctccgttcatggcaatccaggcttttttcagcactcacttcaaagctgttccagcttgtattcattatccagttccaaagccacccccacatttttacatatttgttataacccctggttataaatgttataaactcctctggtaccaatttctgtcttagtccctgttgtgctgatatcacacaatacgcagactgggtaatttataaagaacaacaatttatttctcactgttctgaaagctgggaagtccaagatcaaggcagcagcatctggtgtctgctgagggctgcatcctcacatgcaggaggacaaacaggggaccagctccctcca

SEQ ID NO: 5550 - DNA, 6000 bp, Homo sapiens
atgcctcatcaatttaacatttttttctgagaaaaaaatgaaaaaacattactacattaaatatgtacattgaggccgggcgcggtggctcatgcctgtaatcctagcactttgggaggctgagacgggtggatcacttgaggtcaggagttcgagaccagcctggccaacatggtaaaaccccacctctacttgaacccaggagctggaggttgcagtgagccaagattgagccactgcactccagcctgggcgacagagtgagattctgtctcaaaattaattaattaattaatttaatttaataaaaataaaaatagcaatcatgtatttagctcattaatatgcaatttggacagggctcagtggtcatgactcatctgtgctctacaaaatatctgggacctggggacttaccaggcatctctcacttcaagtagaattagagtctctgtgtgtggtctctccctgcaatctgcctaggatggccccggcgtagccaaatttcttacatggcagcttgcttcccctatagccagtcttcaaagagagatgtagactctcttaagctaggctggcacagcatcacttttgctgtattatattccttatagcagttacagaaccctccagatttaaggggaggggacaaagaaggctacacttctggatgggaacaatgtcaaagaatttgtggccatctttcttttgccatatggatatatgagatttgggtgttgggattaaaagagaaaagtccagggtaattactagatttctagactgggccacagtggtgatgtccacacagatatagactacatgtgagagtatatagtgagactatatagagaggggtaacattttggatatgttgaatttgagatgtccatgggaaatccaaggggcatcaaggaggcaactgaatataaaaggctgagaactcggcaaaagaggtctgacctctagatatgaaagtggaaataatcagtcttcggaatagttctctctactgtggcacatcagtgtcatgagcagttataacttagataaccaggaatttgtaaataataacagttgaagtgtggccaggcgcggtgactcacacctgtaatcccagcactttgtgaggccgaggcaggcagatcatgaggtcaggagattgagaccatcctggctaacactgtgaaacctcatctctactaaacatacaaaaaaaataagccaggcgtagtggcaagcacctgtaatcccagctactcaggaggctgagcaactggaacagtgctggtaactgcgatggggaaagtaagtgtggggagagaggttaggacttcagtttcagacatgttacatctaagatacaaaataggccgttgaatatataaacctggacttcgggggagaagcttagactggaggtatacatttggggatgatcggcatataacaatgcagtatttaaagccagaagactgggtgagattctcaggggagtgtttgtagatggaaaggaccaagaactgaactctggacactccaacatcaagaggttggggaaaagaggagcatctaggaaaggagtctgaaaaggaacagttagtgaaataggtagaatcaagagagtggcgtccttgatgccacatgaagaatgtgtttccacgaggaaggagcaagcaattggtcaaattctacaagtagtcaaataagcttagaaataacagttcaggccaggtgctgtggctcacgcctgtaatcccagcactttgggaggcagaggtaggaggatcgcttgaggcctggagtttgagaccagcctgggcaacataggaagaccttgtctctacaaaaaataaaaaataaaaaatttggcagggcatggtggcacaagcctgtggccccagctactcgagaggctgaggcaggaggatcacctcagcccaggagtttgaggctgcaatgagctgggatcacatcactgcaccccagcctggataacagagcaagattatgtgtcagaaaaaagaaatagcagtttagtattagacagataatgtggatgccattgataacccggaaaaaagcagtttcagcaaggcagtagaagcaaaagcctgaaaaacatggatttaatgaggccagatgcagtggctcacgcctgtaatcccagcactttgggaggccgaggcaagtggatcacttgaggtaaggagttcgagaccagcctgaccaacatggtgaaaccctgtctctactaaaaatacaaaaaacattacccaggcagggcagcgcatgcctgtaatcacagctacttgggaggctgaggcaggagaatctcttgaacccaggaggcggaggttgcagtgagccgagattgtgccattgcactccagcctggccaacaatagcgaaactccatctcaataaaatatatatatatatatatatatatatatatatatatatatatatatatatatgagaatgagagagaaggaattaaaacactcttgagttttgctgtgggtgagaggagaagagatatggagtagtagctgcagagagtggaggtcgagggaatgtttgtatgcttagtacatacagtactaagagaaaaggggaaaagactgaaaatggaaataattgaattgctagaatgatgtccttgagcaggtgttctaaggaagtagaaaggttgtctctgcataagctcagagacagtttatagtaacaggaagggaaggcaaaatatgtggttacagatgctggtaggtggggagatgtcattatagaggaagtcctcccttcctccttccttctttccagatgggtgtctttctggccatgctggagcacagtggcaggattgtagctcactgtatcctccaactcctgggctcaagaaacctcctatagctgggactacagaggcacacaactatgcctggctagttttttaaaaatttttattagagatgggggtatgttgcccaggcttgtcttgaactcctggcctcaagccatccttccatctcagcctctgctttaattttctaaatgaagaagcaagctgagagtcaggatgacaaaggaggcaatggaggttataggagttatgaaatattcatttagaacagtaaatggagaaggcaaatacaatgtgtttgctgggcagcattatgggcccactcaaggtacatggtcctgatggagttacagggaggcatgtcagtatgggtgtatagttttctgttttctttcttttctttttttgagacggagtttcgctcttgttgcccaggctggagtgcaacggcgagatcttggctcactgtaacctccaccttccgggttcaagcgattctcctgcctcagcttcccaagtagccgggattacatgagcgcaccatcatgcccagctaatttttctttttttctttcttctttttttttttttttttgagacagtctcgctttgtcacccaggctggagtgcagtggcgcgatcttggctcgctgcaacctccacctcccaggttcaagcgattctcctgcctcagcctcccgagtagctgggattacaggcgtgcaccaccatgcccggctaattttttgtatctttaatagagacagggtttcaccatgttggccaggttggtctgaaactccttacctcgtgatccacccacctctgcctcccagagcgctgggattacaggcgtgagccaccgcgcccggctaatttttctatttttggtagagaccgggtttcaccatgttggccaggctggtctcggactcctgacctcaagtgatcctcacgccttggcctcccaaaatgctgggagccacgcccgacccgggtgtatagttttctccagtcatgttcagctacagatttgaatgtagtcgaagttgtagtttttaccgatgaagagttaggcaatgaagtaatttaatggtattcaggataagaaagaaacaccaaagaagtgtgggacagtgaagattttgtagaacaatggattccaggtagaatgaggggactgcactgccaaagttggtgtcccagagggagtgaagtggaaagatagaaaatgatggtcggaaccagataaatgaaacggagaatgacagggaatggttgtggtcactggtaatagaagtgctttaacttctattggctatcactaaggaacaaaaccttccccgctggagattagcattttcctcgattttgaacatctactcccacaatatcttctaaacacccactatgggcccttactgcattgacagccaagtgcaagatcacgggtggaaggaatggcaaattcctttcacgtatccaagtgagtagcactcaggtaacctcagcaagtggcagcaccaaggtttaccacattacgtttcattatacaggaatacacgaatacagtctcttggggaggggaaagaccaaaaccaaaggcctttccctcactaccccttcctcaccccgccatcccaagtgtcgccactgaagagcgaagggaggatcgccaaagatttacagacggacaccctaaccgagggagaggtgaccataaacccgggatccggcagaggacgccgaaaggccgggactccccggacctcgcccctcctggtcgactgagccccgcgttttagaaacagaaacaaacccggccccgccccctgccctgcggccgctgagaaaagagcaccgccctccggaggcgttccagccggccactggaaggttcccgcagatagagtctgcctcccctgcccccttctcttctggattcctcgctgcccaccctcattctcccggtggaagcctcgcaacgaagggccggagccgcctttctgctcccggaatgcttcacctgtccgcagctccgcccgccccacccccggaagtgacggcgaccgcgcggccctgcctttgttccgttgggcgtcgcggcgacggcgggaagatggcggcggcgggagccctggaacggagcttcgtggagctaagcggagctgagcgcgaaaggccgaggcactttcgggaattcacagtctgcagcattggtacggaaatggccagggagggtgcgatcccatctgtcccctcgggctcctctcatgggtcccagggtccctgacgccctgtttcatcctcctgagtccacatgcctctagccccgggatcagagattccttgatgtccgacgttttcctcttttctttgtatgggttgtcagtctgtcactctctgctttgtcagctcccttagtccctgtcatttctcagaagacgcgtgtgcaggctgaccacgttcattttgcagggactgcaaatgccgtggctggcgccgtaaaatacagtgaaagcgcgggaggcttttactacgtggagagtggcaagttgttctccgtaaccagaaacaggttcattcattggtaagtgttgtggttcgccaaactcccctggaaggtagggtttggtgtataaattttcgtcgctgtacccaaagtgctattctagaagcggtaattgacacttagggaaagagaaagattgttttttcagttcgtatcagaatcgggaaaactgagacacagagttctagaagagatacctctccccctccccccccccacccccacacacacatacaccaagcaacaccagaagcagaggaaatgtagcttaggggaataaagcccataagaccaattttaaacatgaacccgttatgtttttatagtgctttacagcttccttcattgtacaaatacgttcgagcttcaatatgtcaggcattgtgctaggtaccaggacgaaatgaacaaaactgcaattttcatcatgcaagacgttgtagcaatgtcagaatagatgtagacccacttttcatggggaaattttttggaggaaaacttgccctagaggaaaaatatacgggttatgagaggctaataagaggaccaaatataattagtg

SEQ ID NO: 5551 - DNA, 6000 bp, Homo sapiens
cagcatgcacaccatcacatctgagcaacatgcttagttaactggggggaaggaggtagagccctcagtgctcctgaggtagacagaagttacccatcagtgtgagccacgctgcaggcattgtcccctttggctggggctgacataaagagataaggagcaggtgggttaggcctatgctttgctgtattctgagagacttgccatcttcagagttcttgtttctatactgcagagtttcccactaggctcagaagggccactctttttctgggttctctacctatgttggagaggggaaggaaagaggaacaggacatatttattgagagcccactttgtgcctttatatattatttcactcaaatgagacagaaccctgcaagatggataaactgaggctcagagagcttcagtaacttggccaaggtcccatagcaagcaaggggtggaaccagattcaaagctaagcctagactcctcacttccccacttccaccagacacacgtccttcagatactggtgtttgttttctttccattatttctcctcttttgctgtctgagttgaggtcaaagcctgttctcatcccgggaaatgaaaccaaatcactggtgactgtaatggatccaaaagacccaggcaactttggaaaacaccagcagggctgccatcagccctgtttcttgaggtcatggtgatgttggcaatcactctgaaggaagaggacagaaatatctcttatctttgctttaactgccaaagcagacacagtttttagagctgggtgccaagtcaggggtaccatgtagccagagatcctggcacacatctggatagctgttcgaagaatcttcctgccaaagggggttggggtagtggtgaggacatctgaggaggaaagggatcctacagctataaggatggggtggtgcatgatgagggtcctaggagtggccattctgacttcagggtatggccaagggcaatatgcatgggtagggagggaatggggaggaaaatttcttggcagtctcccctttatcctctgctcttctcctctactttttaggcctccaagcctcagcactcatcctgtttctcattcttaaaggcctctctgttagctgaagacccaaaagagggttgctaggagaataggttgtaagcctagagtcacaaatagccatcagacaggaagggtctgcctacaggggcatcagctcagaggaaagcagagctgaaacacagtgataatgtcatttgagtctttggatccagccatgcctgaagccctgcacttttaaattaaggggaccaaaaatttgcattttcacataagaaattttcaactgggtatctgtcacttataagaagaataacgtgaatagcattctaacactgaaacagtactggattttctagtatgattttcaagtacaggtcttctataacagccaagggaggatgcagagaactttaggatagagccattgcacatggaaagtccagaatctggagacactgaggagaggaagagagctggccagcccctgcctcagcaggcctctgctctagggatagggtaagatactcaagtctggcttcatgtctgaagctctgtagggaagcctggagaaaggataggccagccccaattcgagggttctgcaacctacagtttttcctgaagttgttccaggtaatgatggttgctaccttctgctgagcctatgctacatgaccaatgtattacactgtctatcgttttatttctcacagcagccctgagaagtagagatattggcacaattttctagatgaagaactgaaagctcacaatggtgcagtaactaactagtcacatagctagtaagcagcagagcagggattcaaatctagtgtattagactccaaaacctgtgtttttaacaaccatattgtatgttacttcctccaagatgggtcaatgaggcaggggacgttgattggctatatggagaattaataataatcttttctgttggtacagccctagagagtttacaaagcacaattgtatatgcagtctcactacatccattttacagatatggaaactgaggctcagaggtaggaagtgatttactcaaagtcatttgggcaaacaggataaaccacccagagataactctccttaaattaagcaggcagtctgtagtctgcgaatactcataatgtgtggggggaggaaggagctggcctcaccacactgaaccttgagggcagtgatggtatcagtctgtccaaggaaggtctcagacaggtgaggggaccaacaggtattgcagccacagacccaactgcagaacacaaatcccactacaccaaagggctctgaattcacaaaaagattcccagttccagtcgggcaccatttatttttcagcaacacttgatatgggcaaattccagttcaactagagagattcagcttcctggtgttcccagggggatctagctctgaaaagagcccctttcttctgtcaggacatcctcagcaaaaaaggctgcaggtctgagctgagcagcctggagagtggggattccaactccccccgagagtgtctacctgcctggcttcctccctgaggaaagtcactgtcccagcccaagccctaggggccctcactgttggacctgccctgatgctttgccaaactcagaggcacctctcctagacggacaaggcaaagctgactttcactgttccctgggtgatctgcacctggaggagtgatcaggcagggatccaggtgatgggacagaaggggccagggcagccactgttgttcactgctggaagtgtgccaggggactggaaggtgaacagcaatcccacctgtctcctagagactctgtcctccgtgtgtaggggaaagtaggggatgggcacacagggaggaatccagccctggggcttccttgaagccaagtgagcagccttctgtatttgttttcccacaaacagtctttgaaactggggcaagtgttgaaggcagaacagagtaaaagaagcagcttcatgaggccaaacccagtctctccaggtctaggtagtccagcacaggttctgggagtaaatgccagctttaccacttgatttctttggtacgaccttaactttttgccatcctttcactagtatttgagaaccctctgcatattagggcatcaatgctaagcaaaaaatgggttcagtcaccttcctggaggttccaatcagtggaggagacaaatattaatccaacaaccagtacccccctacccctacccccacagaaagtgtcaaatgcccaagagatagatagtatataattagagagacttcactctctctggaaggtcagagaaggctttcctaaagaaatgataatggagctgaggtctggaagaagcataggagtttcctgaagagggtaggagggggcactgcacacagagggaacaggacagtcaaaggcaggccatttggcaacaggtgactggaaggaactggaagaaggcccatgaggctgaagtacagagtgaatatgcagggtctaggcagaccatgcaagaatgtgggtttctcctaagagcaataggaagccttttgaggtgctcttagcagggaagtgagatgatcacacttatcgtttgagaagattactctggcagcacagtgaacaacgtattggaatggaaccaaggagcattcaggaggccagacagaaggtatcaggtatttgcctgtaaaatgggggtgatgagaatactatcttacaagctgttgccaggatccaatgagatactgcattttaagtgtctagtctagtacctggcacatagtaaaggctcagtaagcgtcgatattgttacttttatcattggttctttgcagagtgcacatatttcttatccaggtctgctcctgcgtgatggggtggagggagtagttgtggtttccagagtgaaaacgtgatttgtgtcaaatcacaatgtcgagaccagaatccaggatgcctgaaggcccgattagaatggcttaaaagtatggattattcaggaagaaaaacgggttccaatcgctcctactaaggacgctggagggatggtgaacgatcctttagatggtaagccctagcacttattgagaaaaacaggtgcttctttggtcggagagcaggtgtagggctcgcagccgcgtgcgctcccgcggaggcgggggaccctcgccactcccccgccccacgcccacccgcgggcttccgactgcacctgctcccccggctcggaaacgcgggccgggtgccgggctgcaggcagagggtgcccgggggaggaggtcccgaaagcctcctccacacgcctgcaccggctgccccctccccagtcacgtggcccggtgggtggggaccgacctgaagttggagaaatccggagcgctcccaacctcggagggagtcgccagtcctccgggcccgggcggtggaccctggagccccggctggcggcgtggaggtgcgtttctgagaagccgagcagcggcgcgggcggcgggactcgaggcatggcccggctgtcggtgatccccgggtcggccacggcgtggacaggtgagcaggtacccgcggccagcggcagagatggccggggctgccagggcatcgggccccagagcccacgccagtccaggggatgcggggcccccacgcaggagggggcggttgggtgaaaaggccgcggtggattctcggactgccgggtcagtccccaccagcgccgccgcctcctcgccggctttgccaccgggtgagcaggggacgcgggacgcgggacgcgggacgcgagggagccgcgcggggcgtggactctgtgccggccccgccccccgcgcgcgcactggctgctccccgcgacgtcacgctcggctataaaaggcgcggctcggggcccttgcggcgctggaggagctcgaggctgaggctgccggggggctgtgggctaccgggccgccggcgcctcagcgatgttttactcagggctcctcactgagggcggccgcaaggagaccgacatgcgggaggcggcgtcactgcgacagcagcgccggatgaagcaggcggtgcagttcatccacaaggactccgccgacctgctgcccctggacggcctcaagaagctgggctcgtccaaggacatggtgagcccccgccgccgttctcgccccggccccggcggcttcgcgcccgccgttttccgaggcccggccgttgcggctttcactgagtcacggcccggcccgccgctgcccttggctcgcggtcgctgcgtcgcggattcctccccttccagtacccctgctgcggtttcggtggggattccgtcgtagcttttctagcttgcgctcccctcggctgtgcctcctccctggatgtctcttctccagtagaaagaagaggtcctgccctgccctcttgccctcgggtcttctttctttttccttattcttaataccgaattttgttcacggggcttgtgcctcctatgctgtgtggctgttcctatgacccagacagaggtgattcctaatggctttccgtgagggggaaagaagtggaaagagggttttttgacagttgccagatccagaggacttctgttgaatccattgtccccctatgcaaaacccacttctctagttttggtcctaactttgaccttccatcctgagtggggagagagaaaaggggccaaatgtgaaggtttcctgaacccccaacatctcttcatcattctcctcttccagccccgcccccaaggagtgggtagagggaggaagccaggctgctgcatctcaccgaccagctaatgtgtgcatctggagctggggtgggtgcagtctttttttctagcacagttgttcctggcattaagtagaagcacctcaggacagggggcctggggtcaaagatggt

SEQ ID NO: 5552 - DNA, 6000 bp, Homo sapiens
gcaatcatggctcactgcagcctcgacctcctgggctccaacagtcctcctacctcagccccccaagtggctgggactacaggcagatgccaccacgcctggctaatttttgtgcgtgtgtgtgttttctgtaaaggtgaggtttcgccatgttgcctaggctagtctcaaactcctggactcaagcgatctgcccttcttggcctcccaaagtgctaggattacaagtgtgagccaccacacccagtcttatacctgtattcaaatttgatatttgccccttgctagtaactatctcctagagtttactgtgagaataaatgaaataatgcatgtaaagataaatgtatgtagtagggatgaaataaatgtcacatctttcctttctgccttctgtatcatctctgaactcaggtctgggaatccaggtttctggattattctctatgttgtgattggaaggttgggcagaagtcacttgagtagatacgcagtggtctgcaagatgatccctgcactttccacccttccagaacggtgaaggagggaacaagaagcagttctcctggtccatccctgcagaccttaccctgtggcctgcttcatgggaatgagtactttcagggcagttagccagtactacctgtgaccatggctggtgaatgctcctgtttctgcttcaagtttctccttgctgtgagaagaaacctgtggaggttctggggggccagatatgtgacttggtagatccccgagtgtgttcccagagacattgcctcctgcaggagccaaggaaacacagaagaggcccataggactgggggactttggacctaacaactgtgggctggtgggactgtggcacgggggtggggctgccaaagtgggaacatgattccagctgctgatcacttcactgcttgccctggcttgaagtaagtctcagtggttggtctccagaaactccatggaaatactgcccacaggttttggtcttctcccattttcctctccttttccctctttgtagggatgagggttggggtttctgagctgtaacctgataggacggctctggcagttgaagtcctggttataattcctcctaaacaggagaccctagcctgcccacccccactcccacaagatggggctcgtatgtggtcctgggtcctgggaagccacctgtggggagactaggtgtcaggggagggagttgaagaacaaagtggatgaaagaggcttctcccagctcccagaagatagggcaccaggccccagaccattgagtcctgagtttcttgaaaccagccatctctgtgacatctctggctgccctgctgggctggagcttctgggagcagggaggtagaggagggagctggactggtgatgtgggtgctgggacagaatagtgccagtctctcagtgactagagtccctggtttctgcttttccaggacagctggggccttgtgaaaatcagagagggaacacaggcgagaggaatggagagccttgtgcttgtgactcagagatacccagaccagggtgggggccttgggaggggacgaccttgtgatgagggggaacaaaagcaaaagctggaggcagaagtctgagatgggggtgtcacaggggcttttctgaaatgtgaaaatgaatacatgggcagattttgcaacagcacccagcctgctgtcttctcacactctgctccccagccccggcctgttccccctctcccaccctgtgcttcctctcatctttcaccaggctgctcttctgcctcagccttcatctttttctcatctggttccttctgtcccatctacaccccctgtccactctttccctgtttcctgtgttctcttccctggtgccctgttcatctgtttcggtctctttggctgcttgccctggcccccgtccttctatgctttaatgtggggcccatgggaactggagttcatagcaaaacaggaagagccggtgagcaggaaactgggaatggggcagggggtgaatgaccagcagtaacctcagcagcttgcctcccacatctggactggagcatctgcagggttctcagcctctcccctgtagcccaccagccctggctgcttccattacagcacttcactggcccaagacgcaacaagacaagattgtcctggactctgacacagcaaagggactggagtgaggacatctgggttctgatcccagcccagccactaactgtgtggtcttggaaaaggccctcacatgagtttcagtgttctctgtcaaatggagctcgggttacttaccctcctttcctcccagcgctgctctaaggaccagaaaagatagtgaagggtttgtgctgtgtatggaaacaagtacaaagttcaaaatccaccaagttaaagcaatgggaagacctacagctgaaagaactgggagggtgatgataactcgtgccatttctcaaacactatgtgccacacgttgtgatagactctctttctttctttctttttctttctttctttctttctttctttctttctttctttctttctttctttctttctctctctctctctctctctctttctttctttctttctttctttctttctttctctttctctctctctctctctttctttcttctttttttttggagttttgctgttgttgcccgggctggagggcaatggcgcgatctcgggtcattgcaacttctgcctgccaggttcaagtgattctcctgcctcagcctcctgagtagctgggattacaggaatgcatcatcacacccggctaattttttgtatttttagtagtgatggggtttcaccatgttggccaggctggtctggaactcctgacctcaagtgatccatctgccttggcctcccaaactgctgggattacaggcatgagccaccgcaccctgcatgatctgtagtttcaatcccacaacaaccttgtgtggtaaaaattactattatccctattttatttatctttctttctttttcttttttttattttgagatggagtctcagtctgtcacccaggctggagtgtggtggcacaatctcggctcactgcaacctcccagattcaagtgattctcctccctcagcctcccgagtagctgggattacagacccgcatcactatgcctggctaacttttgtatttttagtagagacggggtttcaccatgttggccaggctggtctcgaactcctgacctcaagtgatccacccgcctaggcctcccaaagtgctgggattacaggcgtgagccaccgtgcccgttctatttatttttcaacacaccattgctggctcaactattcttattttaaagatagggaaacaaagattcagagacgttaagtaacttgctcaatcaagatcacataggtaataagaggtttaggatttgaacccaaaatctgagcccagagtctgaacgctaaatcaacatgctgagttgaaattgactacagcagttgtgatggcgtgtgcctgtaatcctagcactttggaaggctgaggtgggaggatggcttgagcccaggagtgtgaagccagcctgggcaacatagtgagaccctaccccaaaaaaggtaaaaaaaaaaaaaaaaaggaataataaaaaaaattgactagggctaataagtacgggatagacgagaataatatttcttttttttttttttttggggacagagtctcgctctgtcactcaggcaggagtgcagtggcgcaatctcggctcactgcaagctctgcctcccgggttcacgccattcttctgtctcagcctcccgagtagctggaactacaggcgcctgccaccatgcccggctaattttttgtatttttaggagagacggggtttcaccgtgttagccaggatggtctcgatctcctgacctcgtgatccgcctgcctcggcctcccaaagtgctgggattacaggcgtgagccaccgcgcccggccgagaatatattatatttttcttgttattcattcaacaaataggaacacagtacctactctgttgccacatctatgccagccctgtttcaggggtgttgggggagatgaaatcaataaaatatgatgtctactttcagggatggatttcatgccccaggcagcagagtaggaagaatgactatagtctcagtagctgctggttggagcctgccatcacttcagatggggttgttccccagaagaggcaacccgcataccttcccaggtccatcctgggctgccacctgagttgcctgtcttccttctgccacctccacccctatcccaggcctgccactgctcatagcagatttcctatcaaaggctctcctggcctcctctcttatctgtggcccccgcagggcacccactttcagaaactccctggaaggcccagcacctgcctctctccacccctggatttctaccagcttggctgaggcctggggctagtggggagagcttcttggcctcttcccagaggcaagggaggaggagggaggctgggaaagccgctggggctcagtgtcgcaattccgggccgtgctgggacctttgctccacgaggtgcctatggaggggagggaacacgattctggaggctgctgggattggggtgggggttcctgggaggcagtccttttgcaagagctgctaagagcgctgggtaaggagaggaaggggagagacatggaacttggctggtctgcagggaaatgccactgttttggccgggagtagggggcgggagtggcgggagagggggtggccggctggggaggagccagcctggtggagaagctgccctgtgggcgggggtgaggaggggagggctgtggtcaccaggcaggaaggaggggtggcctgacccctcggcagtccctcccctcagcctttccccaaattgctacttctctggggctccaggtcctgcttgtgctcagctccagctcactggctggccaccgagacttctggacaggaaactgcaccatcctcttctcccagcaagggggctccagagactgcccacccaggaagtctggtggcctggggatttggtgggtctgctccttagcagtggcctggggctctgtgtgtgtatctggggtggggtcggggaatgtcctaaggatctgagaagggggtttctggggagaagtgaggggtgatggtgatggaagcttgggacaggagcaggactctgggtcccagaataactcatgaggggctcaggggaggaggtcctctatgtgaattggggagattcttggagacaggtttgtgctgggaccctggaaagtggcacgagcgaggttctctaataagcagcgtgtttcactgggtggagtgagctgtcctcagtgttggagtgagggggaaggggcccaagagaagcagggcagatgcacccaaacattccctgctggcctggaggggactttgggggagaaaagccggcacggtggctgggagcccagactttggagtcagaggagggttggagtcttgactctaccgccgcctaactgtgtgaccatagttacttaatctctttgaacctcagtttgcttatctgtaaaatgagtttaagaatagtcctgagccaggagcagtagcgtgcgcccataatctcagatactcaggaagctgaaacctgattgcttcagcccagtagtttgaggcgatagtgtcctattattgcacctgtgaatagcactgagttccagcctgggcaacatagagagaccccatctcaaaaaaaaaattaatagttttgacctcagagggatattatgaggaaagcacataaagccttataacaggctgggcgcagtggcttactccaataatccccacactttgggaggcccaggtgagaggatcacttgagcccaggaattcctagactagcctgggcaaaatagggagaacctgtctctaaaaaaca

SEQ ID NO: 5553 - DNA, 6000 bp, Homo sapiens; identical to SEQ ID NO: 2730

SEQ ID NO: 5554 - DNA, 6000 bp, Homo sapiens
tttttgtataaggtgtaaggaagggatccagtttcagctttctacatatggctagccagttttcccagcaccattggttaaatagggaatcctttccccattgcttgtttttgtcaggtttgtcacagatcagatggttgtagatatgtggtattatttctgaggcctctgttctgttccattggtttatatctctgttttggtaccagtaccatgctgttttggttgctgtagccttgtagtatagtttgaagtcaggtagtgtgatgcctccagctttgttcttttggcttaggattgacttggcaatgagggctcttttttggttccatatgaactttaaagtagttttttccaattctgtgaagaaagtcattggtagcttgatggggattgcatcgaatctataaattaccttgggcagtatggccattttcactatattgattcttcctatccatgagcatgaaatgttcttccatttgtttgtgtcctcttttattttgttgagcagtggtttgtagttctccttgaagaggtccttcacatctcttgtcagttggattcctaggtattttattctctttgaagcaattgtgaatgggaatggtgctcactaccacgcccagctaatttttgtatttttagtagaaaagggggtttcaccatattggccaggctggtctcgaactcctgaccttgtgatccgcccacctcagcctcccaaagtgctgggattacagtcgtgagtcactttgcctggccaataacacaaatttttaagatcccatggccaaaggcttctattggctttgcttaacccaagatcaacccctttggaatacatcagttgtacccatttgaaataataactcacatagctatgaatctgtcccaggaaatggtaactccttaactgtaagaggagatatattcctttgttgttctaaccttatgagataattaactaaaaattattacctagtgaaagattatttcctaatgggctcttgggatatgaaaaattcaagacccacaattttcatccaggagactgtatctactgggaacaacatcctctaaaggactgtctccaaccaagtggaagggctcttaccaagtgcttcttagtaatccttttgctattatattagaaggaatagactcctggccgggtgtggtggctcatgactgtaatcccagcactttgggaggccaaggtggatggatcgcctgagctcaggagttcaccaacctgggcaagatggcgcgaccccatctctactaaaaatacaaaaattagccgggtgtgatggtgggcacctgcctgtaatcccagctactggggatgctgaggcaggagaatcacttgaaccctggaggcacaggttgcggtgagctgagattgcatcactgcactccagcctgggtgacagaatgagactccatctcaaaaaaacaaaaaacagaaactagaatagactcctggatccatgtctggatctgaagagggctccatctcctgagggactgtttccccagaaggtgatctctgtttcaaaataagtcaatgacaggtctagaacaagataacatctgatgtaggtggctaaaacccaagactccaaaccaggcctgtatctaaacaaatgcttaatattagcaaatgttaatacatggggaagactttcctttacaagctcccattaaacttctttctttttgtccttagttttcatgtctcggcactactatcattaactgttgcccataaagcaaacctctttttgcaatgggcttaggactatgctaatagattatttaaaaaaatgctgattgaacatgtggtctcatgcccctttccagtagttctggctttcctggtgggtatcttctctccaaggaaagaaatatattgctccaaggagagaagatattgcatagaatatcagaaatatatttgtgtttcttaaaaacagtcatggtgcttgacagtagtatgatgaaggataaagtacatcactagcctattaataatactttaaaggctgggcgcagtagttcacacctgtaatccttgcactttgggaagccaaggcgggcagatcgactgagctcaggagtttgagaccagcctggccagcaaagtgagaccctgtctcgactaaaaacacaaaaattaatcagtcgtggtggtgtgcacctgtagtcccagctactcgggaggctaaggcaggagaatcacttgaacctaggaggcggaggttgcaatgagccaagatcgcaccactgcactccagcctgggtgacagagcaaaactccatctcaaaaaacaaaacaaaaacaaaacaaaacaaaacgaaacaaaacctttacagagtaaaagccatggaaggagcttcttagtaaaagaaactagtttgttaactttaatgctggcactgtcccaactaagtaatgaaacaacgacactgttccaattaagagataagacaccttgatttcagaatggtataacacaaattggggatggttttatctggcttatccctccttctgtcagcccagccaccttgtccttgccaccccaactttttatttatttattttttttgagacagagtcttactctgttgcccagcctggagtgcagtggtgagatcttggctcactgtaatctctgcctcctgggttcaagtgattctcctgcctcagccttctgagtacctgggattacaggcatgcatcaccacgcccagctagtttttgtatttttagtagagacgaggtttcgtcatgttggccaggctagtctcgaactcctgacctcaggtgatccacccgcctcattctcccaaagtggaggattacaggcgtgagccaccgtgcctggccactttgcccctttatgttgggaacaaagaaatcataccaaagatatctggcccaaaagcactggagatatggcatggatacccaaagaactgtgtattcacaccattatattacaaagtactgactggcatgccatttaatgtatttattgattagctccaaatggaacattttggctatgtggcactaacctatgaccatggttacttccaggatagttaggatgatgtttttcaggttatgcttaatcatatatttgagtagtttgtactttgccaaaacctgcaaattttccttatttatgatctcattgggttcatcctgtgtttcattggtatgatcacttagcttccatcttcataccacaactgagtgttgaagatgttatttggcatatagaggtcctaaccaattatacccaaaagatagctacataagtattccattattaaacaatagttattcttatggaaaaggccattattacaaaaccgtatggcttttgacatactcaccgaagcccagggaggaacttgcattatcataaaaactgtgtgttatgtctgtatcccagatgaatcagataatatcactacgttaatggataatatgaaaaccttaacaactaacctttcagatccaacacatctttaaacaactggctaagcagctagttttgatcttgaagacttggtggcaaaagctttgcttattctaggaatcataatcatttgttgttgtcttgtttttgtctgcactattagactgccactgcgcctggctattaatcagattttaaaataaagttaaaaaaaatttttaaacaaatttacacgaaaagcaagtacagtggttctcgaacatgattgggcgacagactgtacagcttgccagaaataggtttctctcatgaaaattcaaccccctccacacacggccatctactttcttcttcagcagggactgacaccagggcaaccgtattttcctaaataccttaggaaagtagttcaaaacctagatatatcttggtcagaacaaaacctggcaaacactcatgataaacggtatatataattccttaaacgaaatatagaggtttgtaatataaaataatccatctttgtctgtggaattcctactaatgaaatacgttcttggagacccaaagactgaagttataccacttcttcttaatcttttaaatattatttgcaggccaggcatggtgacacgctcctatagtcccagctcctcaggaggctaaggcaggagcatcgttggagcccaggagctccaggctgtagcgtgctgacagcacttgtgaataacctctgcactcagcctgggcaacatagtgggaccccatcactaataaaaaagcgagatcaacattatttattctgttactcgggcataaaataaatattaagcacttactacatgccagagtctattatgtctgctgcagatattggctgtcatagagttataactaacaggaaaccaaataattacgtagtataattttaagtggtgataagcacgattgtttcccccaagccatgcccttaatttctaactcttcagatagtgtttctttaaaaaatttcttgctaatttaaaataacttttgttttgaggcaggatcccactctgttgcttaggctggaatgcagcggtgagatctcggctcactgcagcctccatctccagggctcaagccattctcccgcctcagccacccgcgtagctggaccacaggcgcgcgccaccagatctcagttctctcaacaggactctcattgctaagatccaaggatccattaatttccttttccttaactcttctagcctctgcagctttctttcctcatccactttttaaacaaacgcaggcttaaaaagcaaggaatatacccgccacactctcggctcccaaaccgctctttccctccctctgccggccacgcctcttataggcccggaagtttaccccaccctgcaccgtgattcaccggaagcgctctagggaaccctggagcttccgcgcctgcccagttttgctccgaaagacttaccgaggagggagcttgcggtgcgttctgggaaagttgctgggccagctcctttgtttccagtctgagcgttgcgttcggtttcccgagggtcttctgaggcaccgcggctgcgggcttctgagttcccggctctccgcagggaagcctcctcttcgtacctcgttttttggctcgtggggggtcctcccaccgctggccgacgcagccagcatgtccggggtgcgcgcagtgcggatcagcatcgaatcggcctgcgagaagcaggtccatgaggtgggcctggatggcaccgagacgtacctgcccccgctgtccatgtcgcagaatctggcgcgtctggcccagcggatagacttcagccagggttcgggctccgaggaggaggaggcggcggggaccgagggcgacgcgcaggagtggccgggcgccgggtccagcgcagaccaggacgacgaggaaggtaaggcctgcatccgctgcccgagtcccccggtctgggtcccagcacccgcgcgggcctccgcctctcccgcgatgggggtgatcttgtgcgtgcgagaacttttgagtgtccctctagcggaagcgtaaggatacttggtcgtcatctttttgttgctgccggacaaggtaggacacgactttacgtaatactcctgcgggtctccttgaatggcagcgtttagagacactgtcaaaccgtgaaatgtttaaatgaatgcttctctgtagagggcctttaatgtagcacacttagtggctaaaagagccctagatcggggctctgccccttgccggctgtgtgaccttgggcgagttactttgcatccttgtgcggtgtgaatgatgatagtagcacctgcagaaaagaggtctgttttgactgaaatgtgtgacgaggtccaagaggtaggcgggtccagatcatgtagaacccagtaggccgggataagcgtttgactagtgttaagaccactgaaagcttttgcaggataagtagagatggttttgttaaagtttact

SEQ ID NO: 5555 - DNA, 6000 bp, Homo sapiens; identical to SEQ ID NO: 2731

SEQ ID NO: 5556 - DNA, 6000 bp, Homo sapiens
gactacaggcacctgccaccacacctggctaatttttttggctttttttttttgtatttttagtagagacagggtttcgccgtgttagcctgacctagtgatccacccactcggcctcccaaagtgctgggattacaggcatgagctactgcgcccggccccagccggcagttttatataatggagtgtatttgtgatttttgtttgtttgagcttgagctcaaacttttgaatcagctaaacttgtattctttttttttttttttttttgagacagtctccctctgtcacccaggctggagtgcagtggtgcaatcatggctcactgcagcctcgacctcctgggctccaacagtcctcctacctcagccccccaagtggctgggactacaggcagatgccaccacgcctggctaatttttgtgcgtgtgtgtgttttctgtaaaggtgaggtttcgccatgttgcctaggctagtctcaaactcctggactcaagcgatctgcccttcttggcctcccaaagtgctaggattacaagtgtgagccaccacacccagtcttatacctgtattcaaatttgatatttgccccttgctagtaactatctcctagagtttactgtgagaataaatgaaataatgcatgtaaagataaatgtatgtagtagggatgaaataaatgtcacatctttcctttctgccttctgtatcatctctgaactcaggtctgggaatccaggtttctggattattctctatgttgtgattggaaggttgggcagaagtcacttgagtagatacgcagtggtctgcaagatgatccctgcactttccacccttccagaacggtgaaggagggaacaagaagcagttctcctggtccatccctgcagaccttaccctgtggcctgcttcatgggaatgagtactttcagggcagttagccagtactacctgtgaccatggctggtgaatgctcctgtttctgcttcaagtttctccttgctgtgagaagaaacctgtggaggttctggggggccagatatgtgacttggtagatccccgagtgtgttcccagagacattgcctcctgcaggagccaaggaaacacagaagaggcccataggactgggggactttggacctaacaactgtgggctggtgggactgtggcacgggggtggggctgccaaagtgggaacatgattccagctgctgatcacttcactgcttgccctggcttgaagtaagtctcagtggttggtctccagaaactccatggaaatactgcccacaggttttggtcttctcccattttcctctccttttccctctttgtagggatgagggttggggtttctgagctgtaacctgataggacggctctggcagttgaagtcctggttataattcctcctaaacaggagaccctagcctgcccacccccactcccacaagatggggctcgtatgtggtcctgggtcctgggaagccacctgtggggagactaggtgtcaggggagggagttgaagaacaaagtggatgaaagaggcttctcccagctcccagaagatagggcaccaggccccagaccattgagtcctgagtttcttgaaaccagccatctctgtgacatctctggctgccctgctgggctggagcttctgggagcagggaggtagaggagggagctggactggtgatgtgggtgctgggacagaatagtgccagtctctcagtgactagagtccctggtttctgcttttccaggacagctggggccttgtgaaaatcagagagggaacacaggcgagaggaatggagagccttgtgcttgtgactcagagatacccagaccagggtgggggccttgggaggggacgaccttgtgatgagggggaacaaaagcaaaagctggaggcagaagtctgagatgggggtgtcacaggggcttttctgaaatgtgaaaatgaatacatgggcagattttgcaacagcacccagcctgctgtcttctcacactctgctccccagccccggcctgttccccctctcccaccctgtgcttcctctcatctttcaccaggctgctcttctgcctcagccttcatctttttctcatctggttccttctgtcccatctacaccccctgtccactctttccctgtttcctgtgttctcttccctggtgccctgttcatctgtttcggtctctttggctgcttgccctggcccccgtccttctatgctttaatgtggggcccatgggaactggagttcatagcaaaacaggaagagccggtgagcaggaaactgggaatggggcagggggtgaatgaccagcagtaacctcagcagcttgcctcccacatctggactggagcatctgcagggttctcagcctctcccctgtagcccaccagccctggctgcttccattacagcacttcactggcccaagacgcaacaagacaagattgtcctggactctgacacagcaaagggactggagtgaggacatctgggttctgatcccagcccagccactaactgtgtggtcttggaaaaggccctcacatgagtttcagtgttctctgtcaaatggagctcgggttacttaccctcctttcctcccagcgctgctctaaggaccagaaaagatagtgaagggtttgtgctgtgtatggaaacaagtacaaagttcaaaatccaccaagttaaagcaatgggaagacctacagctgaaagaactgggagggtgatgataactcgtgccatttctcaaacactatgtgccacacgttgtgatagactctctttctttctttctttttctttctttctttctttctttctttctttctttctttctttctttctttctttctctctctctctctctctctctttctttctttctttctttctttctttctttctctttctctctctctctctctttctttcttctttttttttggagttttgctgttgttgcccgggctggagggcaatggcgcgatctcgggtcattgcaacttctgcctgccaggttcaagtgattctcctgcctcagcctcctgagtagctgggattacaggaatgcatcatcacacccggctaattttttgtatttttagtagtgatggggtttcaccatgttggccaggctggtctggaactcctgacctcaagtgatccatctgccttggcctcccaaactgctgggattacaggcatgagccaccgcaccctgcatgatctgtagtttcaatcccacaacaaccttgtgtggtaaaaattactattatccctattttatttatctttctttctttttcttttttttattttgagatggagtctcagtctgtcacccaggctggagtgtggtggcacaatctcggctcactgcaacctcccagattcaagtgattctcctccctcagcctcccgagtagctgggattacagacccgcatcactatgcctggctaacttttgtatttttagtagagacggggtttcaccatgttggccaggctggtctcgaactcctgacctcaagtgatccacccgcctaggcctcccaaagtgctgggattacaggcgtgagccaccgtgcccgttctatttatttttcaacacaccattgctggctcaactattcttattttaaagatagggaaacaaagattcagagacgttaagtaacttgctcaatcaagatcacataggtaataagaggtttaggatttgaacccaaaatctgagcccagagtctgaacgctaaatcaacatgctgagttgaaattgactacagcagttgtgatggcgtgtgcctgtaatcctagcactttggaaggctgaggtgggaggatggcttgagcccaggagtgtgaagccagcctgggcaacatagtgagaccctaccccaaaaaaggtaaaaaaaaaaaaaaaaaggaataataaaaaaaattgactagggctaataagtacgggatagacgagaataatatttcttttttttttttttttggggacagagtctcgctctgtcactcaggcaggagtgcagtggcgcaatctcggctcactgcaagctctgcctcccgggttcacgccattcttctgtctcagcctcccgagtagctggaactacaggcgcctgccaccatgcccggctaattttttgtatttttaggagagacggggtttcaccgtgttagccaggatggtctcgatctcctgacctcgtgatccgcctgcctcggcctcccaaagtgctgggattacaggcgtgagccaccgcgcccggccgagaatatattatatttttcttgttattcattcaacaaataggaacacagtacctactctgttgccacatctatgccagccctgtttcaggggtgttgggggagatgaaatcaataaaatatgatgtctactttcagggatggatttcatgccccaggcagcagagtaggaagaatgactatagtctcagtagctgctggttggagcctgccatcacttcagatggggttgttccccagaagaggcaacccgcataccttcccaggtccatcctgggctgccacctgagttgcctgtcttccttctgccacctccacccctatcccaggcctgccactgctcatagcagatttcctatcaaaggctctcctggcctcctctcttatctgtggcccccgcagggcacccactttcagaaactccctggaaggcccagcacctgcctctctccacccctggatttctaccagcttggctgaggcctggggctagtggggagagcttcttggcctcttcccagaggcaagggaggaggagggaggctgggaaagccgctggggctcagtgtcgcaattccgggccgtgctgggacctttgctccacgaggtgcctatggaggggagggaacacgattctggaggctgctgggattggggtgggggttcctgggaggcagtccttttgcaagagctgctaagagcgctgggtaaggagaggaaggggagagacatggaacttggctggtctgcagggaaatgccactgttttggccgggagtagggggcgggagtggcgggagagggggtggccggctggggaggagccagcctggtggagaagctgccctgtgggcgggggtgaggaggggagggctgtggtcaccaggcaggaaggaggggtggcctgacccctcggcagtccctcccctcagcctttccccaaattgctacttctctggggctccaggtcctgcttgtgctcagctccagctcactggctggccaccgagacttctggacaggaaactgcaccatcctcttctcccagcaagggggctccagagactgcccacccaggaagtctggtggcctggggatttggtgggtctgctccttagcagtggcctggggctctgtgtgtgtatctggggtggggtcggggaatgtcctaaggatctgagaagggggtttctggggagaagtgaggggtgatggtgatggaagcttgggacaggagcaggactctgggtcccagaataactcatgaggggctcaggggaggaggtcctctatgtgaattggggagattcttggagacaggtttgtgctgggaccctggaaagtggcacgagcgaggttctctaataagcagcgtgtttcactgggtggagtgagctgtcctcagtgttggagtgagggggaaggggcccaagagaagcagggcagatgcacccaaacattccctgctggcctggaggggactttgggggagaaaagccggcacggtggctgggagcccagactttggagtcagaggagggttggagtcttgactctaccgccgcctaactgtgtgaccatagttacttaatctctttgaacctcagtttgcttatctgtaaaatgagtttaagaatagtcctgagccaggagcagtagcgtgcgcccataatctcagat

SEQ ID NO: 5557 - DNA, 6000 bp, Homo sapiens
ctgtggggagactaggtgtcaggggagggagttgaagaacaaagtggatgaaagaggcttctcccagctcccagaagatagggcaccaggccccagaccattgagtcctgagtttcttgaaaccagccatctctgtgacatctctggctgccctgctgggctggagcttctgggagcagggaggtagaggagggagctggactggtgatgtgggtgctgggacagaatagtgccagtctctcagtgactagagtccctggtttctgcttttccaggacagctggggccttgtgaaaatcagagagggaacacaggcgagaggaatggagagccttgtgcttgtgactcagagatacccagaccagggtgggggccttgggaggggacgaccttgtgatgagggggaacaaaagcaaaagctggaggcagaagtctgagatgggggtgtcacaggggcttttctgaaatgtgaaaatgaatacatgggcagattttgcaacagcacccagcctgctgtcttctcacactctgctccccagccccggcctgttccccctctcccaccctgtgcttcctctcatctttcaccaggctgctcttctgcctcagccttcatctttttctcatctggttccttctgtcccatctacaccccctgtccactctttccctgtttcctgtgttctcttccctggtgccctgttcatctgtttcggtctctttggctgcttgccctggcccccgtccttctatgctttaatgtggggcccatgggaactggagttcatagcaaaacaggaagagccggtgagcaggaaactgggaatggggcagggggtgaatgaccagcagtaacctcagcagcttgcctcccacatctggactggagcatctgcagggttctcagcctctcccctgtagcccaccagccctggctgcttccattacagcacttcactggcccaagacgcaacaagacaagattgtcctggactctgacacagcaaagggactggagtgaggacatctgggttctgatcccagcccagccactaactgtgtggtcttggaaaaggccctcacatgagtttcagtgttctctgtcaaatggagctcgggttacttaccctcctttcctcccagcgctgctctaaggaccagaaaagatagtgaagggtttgtgctgtgtatggaaacaagtacaaagttcaaaatccaccaagttaaagcaatgggaagacctacagctgaaagaactgggagggtgatgataactcgtgccatttctcaaacactatgtgccacacgttgtgatagactctctttctttctttctttttctttctttctttctttctttctttctttctttctttctttctttctttctttctctctctctctctctctctctttctttctttctttctttctttctttctttctctttctctctctctctctctttctttcttctttttttttggagttttgctgttgttgcccgggctggagggcaatggcgcgatctcgggtcattgcaacttctgcctgccaggttcaagtgattctcctgcctcagcctcctgagtagctgggattacaggaatgcatcatcacacccggctaattttttgtatttttagtagtgatggggtttcaccatgttggccaggctggtctggaactcctgacctcaagtgatccatctgccttggcctcccaaactgctgggattacaggcatgagccaccgcaccctgcatgatctgtagtttcaatcccacaacaaccttgtgtggtaaaaattactattatccctattttatttatctttctttctttttcttttttttattttgagatggagtctcagtctgtcacccaggctggagtgtggtggcacaatctcggctcactgcaacctcccagattcaagtgattctcctccctcagcctcccgagtagctgggattacagacccgcatcactatgcctggctaacttttgtatttttagtagagacggggtttcaccatgttggccaggctggtctcgaactcctgacctcaagtgatccacccgcctaggcctcccaaagtgctgggattacaggcgtgagccaccgtgcccgttctatttatttttcaacacaccattgctggctcaactattcttattttaaagatagggaaacaaagattcagagacgttaagtaacttgctcaatcaagatcacataggtaataagaggtttaggatttgaacccaaaatctgagcccagagtctgaacgctaaatcaacatgctgagttgaaattgactacagcagttgtgatggcgtgtgcctgtaatcctagcactttggaaggctgaggtgggaggatggcttgagcccaggagtgtgaagccagcctgggcaacatagtgagaccctaccccaaaaaaggtaaaaaaaaaaaaaaaaaggaataataaaaaaaattgactagggctaataagtacgggatagacgagaataatatttcttttttttttttttttggggacagagtctcgctctgtcactcaggcaggagtgcagtggcgcaatctcggctcactgcaagctctgcctcccgggttcacgccattcttctgtctcagcctcccgagtagctggaactacaggcgcctgccaccatgcccggctaattttttgtatttttaggagagacggggtttcaccgtgttagccaggatggtctcgatctcctgacctcgtgatccgcctgcctcggcctcccaaagtgctgggattacaggcgtgagccaccgcgcccggccgagaatatattatatttttcttgttattcattcaacaaataggaacacagtacctactctgttgccacatctatgccagccctgtttcaggggtgttgggggagatgaaatcaataaaatatgatgtctactttcagggatggatttcatgccccaggcagcagagtaggaagaatgactatagtctcagtagctgctggttggagcctgccatcacttcagatggggttgttccccagaagaggcaacccgcataccttcccaggtccatcctgggctgccacctgagttgcctgtcttccttctgccacctccacccctatcccaggcctgccactgctcatagcagatttcctatcaaaggctctcctggcctcctctcttatctgtggcccccgcagggcacccactttcagaaactccctggaaggcccagcacctgcctctctccacccctggatttctaccagcttggctgaggcctggggctagtggggagagcttcttggcctcttcccagaggcaagggaggaggagggaggctgggaaagccgctggggctcagtgtcgcaattccgggccgtgctgggacctttgctccacgaggtgcctatggaggggagggaacacgattctggaggctgctgggattggggtgggggttcctgggaggcagtccttttgcaagagctgctaagagcgctgggtaaggagaggaaggggagagacatggaacttggctggtctgcagggaaatgccactgttttggccgggagtagggggcgggagtggcgggagagggggtggccggctggggaggagccagcctggtggagaagctgccctgtgggcgggggtgaggaggggagggctgtggtcaccaggcaggaaggaggggtggcctgacccctcggcagtccctcccctcagcctttccccaaattgctacttctctggggctccaggtcctgcttgtgctcagctccagctcactggctggccaccgagacttctggacaggaaactgcaccatcctcttctcccagcaagggggctccagagactgcccacccaggaagtctggtggcctggggatttggtgggtctgctccttagcagtggcctggggctctgtgtgtgtatctggggtggggtcggggaatgtcctaaggatctgagaagggggtttctggggagaagtgaggggtgatggtgatggaagcttgggacaggagcaggactctgggtcccagaataactcatgaggggctcaggggaggaggtcctctatgtgaattggggagattcttggagacaggtttgtgctgggaccctggaaagtggcacgagcgaggttctctaataagcagcgtgtttcactgggtggagtgagctgtcctcagtgttggagtgagggggaaggggcccaagagaagcagggcagatgcacccaaacattccctgctggcctggaggggactttgggggagaaaagccggcacggtggctgggagcccagactttggagtcagaggagggttggagtcttgactctaccgccgcctaactgtgtgaccatagttacttaatctctttgaacctcagtttgcttatctgtaaaatgagtttaagaatagtcctgagccaggagcagtagcgtgcgcccataatctcagatactcaggaagctgaaacctgattgcttcagcccagtagtttgaggcgatagtgtcctattattgcacctgtgaatagcactgagttccagcctgggcaacatagagagaccccatctcaaaaaaaaaattaatagttttgacctcagagggatattatgaggaaagcacataaagccttataacaggctgggcgcagtggcttactccaataatccccacactttgggaggcccaggtgagaggatcacttgagcccaggaattcctagactagcctgggcaaaatagggagaacctgtctctaaaaaacataatagtaatataataaagccttagtacaggctaatatatggcaagtaaatgttagctgatattgttgatattgataaaagggaggatcaggtggagaagggagctgaggccagaaaggagcccagttctagaagagtataatctgggtccttcctgcaggacagtgccttggtaatgaccagggctccaggaagagatgtccttgtggctgggggcccctgtgcctgacattcctcctggtaagcttcattccatccctctcccctgagcccagaccgcaggctccacgcctcctgtaggaatcagcctccttcattacctgccttcttccttcctccagagagcagtccagagtcattcttagtcgtgcttgcctcccgcccagatcacctctcccctggttccagtgcctggcccttgcaggcacccgcccagtcctccccagtctggatttgctgctagagagttggccagctgagtgcttaccctgctctggctttgaagagttttatctgatctctgaaatgcatacactccagccccccaaagggacaaggattaacatcttcatttaaggtcctgagatgtaagaaactacaagtgactagtcctagctagagcccacacagactctagggtcccaaagcctgagctgggactttgctgccctctaagggtggggataagtttgcagtttcccagctaggacgctgggccgtggagccgggatggggcctgagacccccttgtgcctctcttttggagctcagactctgcggtggagctgtggaagccaggcgcacaggatgcaagcagccaggcccagggaggcagcagctgcatcctcagagaggaagccaggatgccccactctgctgggggtactgcaggggtggggctggaggctgcagagcccacagccctgctcaccagggcagagcccccttcagaacccacaggtgaggagcttctgggtttggaggaggtaggggtccagattccaggtcctggatctggaagaggttccttgggggtttttactttatatataatctcatggttaagttcagaggctttagagctaactaaatctgactgatctaagtgtgaattttgtctctaggcctttctgagcctcactttccttgtttataaaatggaaataaaaattatggttgtcataa

SEQ ID NO: 5558 - DNA, 6000 bp, Homo sapiens
gaaaaaaagcatgcaaaaccctctgccctcacagaacttcaacatcctgtggggaaaggaagtagatggtgatgaaaaacggtgatcctcaagtttcaggtcttgcttggtgaatgatgggaccattttctgaaatagatattacaagaggcagaacaggctttcggagaaataatgggttcaacttcatctgtttgacaaaggtttggatgtttggcagatattcaagtggagctacccagcaagctgctggatatgcatatttggataattctggaatagatgtggaagccatggcatatcaattgtataaaatccctgggagtgaatgagataaccctaggaggatgtatggaagcaagagtcacaactcaaatgattacagggctcaggtgagttatgaatgtatgtgaattgggtcatatgtgaaatagagtgttgtttttgtggctaaacagagagtatattctgtctaaggcagcaagatttggctggtggaccaccagtttgcaattcctacacttttggaacttctttctatgcctcttgtctcatttttcaaataaatatttttatggcaggcagctagctgttcatgaaaacccatttcctcttctgagatactcattgcagttcctagcctccttgccattactagtggccgtgactgggttctagccaacgggatatgagctcaattttcagccaatgccttaaagaagagggtgtgcccctccatactctctcctcttcctctggcttatatacatgatgacgaagtctagaggattttggagtcacgagatggaaggaaccaggaataaggccacctcccaaccaggacatcttcttttgactattatctgagtgaaaaataaatctttgtgatgtttgagccattatacaagtttggccctgtttgttactacagcctagcctaacttaagaaatccactgctaaaccacactaatcctggctgtgacatctctaaggtcagggaccatgtctgtccagttcattcatggatcctcaacacatagcccaggacatagcatgcagtaggtacttaatacaatttcttgacaacactagctgtgttttattgagcatgttttatgtgccagtcactgcactagatcttttatatattgtgcattatttcatttcatgtaatgacaactctataaagcaggttccaatattatacttttttcctcgtaagaagattgagggttggaaagcttatagctggtatttgaaatgaggcagggtgactccaaaacacacactctgaaacaccagtacatgaccacatgcatactcatttcagcattttaactcaagtattttctcccaccaagaatgccctcaacccctcctccccaattattgaagcctgccttctgcatccttcctagcacccatacaatcattctaccctttaattagtccagcaggaatttcatatatatcattactacaacagggattccatgtatttgtctgcttctagaaataagttatcttgagggtagcacaatatcttagacattattcatctgagtgttccttaaaacatacgggaagatggagaacctgccatgtgccaggcaccctaggcactgaggactaaactgcaaataggacagagacaatcttctcttttgaaaagctctattcttgtgggagtaaacagacataaaaaacgcatcacagcacaatgtaacctccacattaatagacgcagaagaagagcggggaaccagttctttctggaggaggaaagaaaggactcccagagcaggtgacatttacctgagcttctgaagagtgagtagaagttctccagttgtttaagaggaatctcaattagtgggaaaagcatgtacaaaagtgtggatacatcaagatgcaggagttcttctggatggatgaggtattggattgctaaaatgtaggattccttcatggattcattaatttattcaacagatactgagtaaacctagaatgtgtcagggattgcactaaatgtaaaggattcaaaagtgagcaaaacagacatgatccctacccttgtggagcttagaatccagcagggatggcagctgactacaaagctctagcaatcctgtgtgagaggaaaggaagaagggatagcccacatgtaagtgagaagctggagaagtgggctggtccagattgcaagagacctttgacaccattctagggagaaggaaatctctcgtcaatctatcaccaagtcctgcctctcctgcctccttgatagctctcaattgtgtccagtcttctcaccgccactattctcagtataggtcatcatctcttccttgaatgaacgagatagtcttctaaaaggctttcttgcctgtcatcccccacccccacccattgtcctcaatgcaaacagagggatctttaaaaaatcaaaatctgttcatgttatgccctatggtaggcagaattctaagacagccccataatctccatcttcctgggggctactttggtgattatattacagtacacagcaaaaggggtttttcagatatagttaaggttactaatcagtcaaccttaagacagagaaattatccaggtaggtttgactaatcaagcactttaaaagcagagttttctctagctagtggcagaagaggatggtagattgattagaagcaaaggaggactggatggatttgacatgtggttgctgactttaaagttgcagggaggggggtggatatcctacagaaaggatctgagagagttctgtaggagctgagagtgaccctggaggacagccaacaaaagaatggggacctcagacctacaactgagaggaaccagatcatgcaaacaacctgaatggatttggaattgggtattcccccagagccttcagacaggaacttgaaccagcctataccttgccttttgcctcggacatcctgagcaaagtatgcagcagccatgccaagttggacttgtgatctacagaacagtgaagtaatagatgggtgttgttttaagtcactaagtttgtgataatttgttacataacaatagaaaactaatatacctccgacctttccaaccccccaataaaactactggggatttaccaggcccaggcagttaatcgctacaccagttccattagggaggtatttttattatcaccatttcacagaccaggaaactgaagctcagagagattaatacttttcctaaggttatagagctagtacgtggtgctgaaatttttacttggctgttctgactccagatttgcactctatgggttctcattgtctttaagataaatccaaatacataagcatggaattaaaggcccttcctgatcccattcctgttcaattatccaacttcagttttaggcactcctctcaaattcctgacagcccccataactaacatgctcttgattcctgactgcactacaatcccttctagaatgctgcttgtccctcccctccatctgctttccttttggcagactctaatggtcctttgggtcttgtctaacacacctcttctagggaaagccttccttgcccctccaagatgggttggatgccactccagggtcccccagaacctcatgctctcccttatcagaggacacaggacattgtgttgggaatgtttacttggctgtgccctcccactagactgtgaactctttgcaagccagaactggcgattagttcattgtcaaatccctagcgtaggacctggagcagagaggtactcaataaatatttgctgagtgaatcattgaatgaacaaaagtgctttagccaagaggcaatggggagccatctaaggtcttgaagaaagggagtgagcttattattacacctgtgctcacaaggacaagttcagggcaaaccttgcactcagtggaccatcctcatcagcagttaaggatgaaacaagttcatttgcattgtggccttgggtttcttgcactgtaaagcttggctgttatctcttctggaccacatctgaatattagaaaatgccagaagccttcacagtttccccttatggaggtggaaagcataaaaatagcttgtgacttgggtctgggccctgaactcccactagaatgaggagcccctctcccaaaaaggctgtgggaagctgaggtgaaggtgacgtggagacccacttacgtgacactacagggaacgggcagccgcctctgaaggtctgtccccctccagcccataccgttccatgcctgcacttgctcccggagcacattgccgaatcttgttctccttagatatgcaaatattgcttcctgtcgagaaggactgggaggccttccgctttagaggcagcgcttatagcgctagctggtcgtggaatgcgattacagcgtctccattggagaccgctgagtgcctcggtttccctgtctgtgcaaagtgcactccccagacgccgctgcctcgagggaccaggaaatgcgtctgggggcgccaggaaagatgagaagataaagtcacgatgcgtccagctagctatagacacaagcagaggagccagtaggccaaaggagacgcacagctgatccgtgccgaggcgcgggctccactccctgaagtggagggacccttgaatctttccttgcgtaggcgcgcggcagagcagcgatttggcgaaaagggccgagactcaggatgcctgcaatgcgagcgaggggcggacagggcgcacggggcgcggcaaggctgcgaggggcgggcctgggccctgagcctcctgcacttccagccacagctctgggccttgggggcgggaaggggtggagccacgtggggaggagcaaaacccggaggtcccgggcaccttgggcagagccagagcggcgggagccggtcctgggcgcgttgccccgggagcgcccgtcgtccgggcagagcgcagccgcaaccgcgaccacagccgcagtcgctttccagcctgccttcggtgcgcagcgggggaacagggctagtgcagccgccggaggggggcacgggctcctctcccatcccagagctactgggctgcccttgctgtcctcgccgccccagcagaccccggccggacctgccacctgcgccctggttgcgccatggatccttcggaaaagaagatatcggtgtggatctgccaggaagagaagctggtgtccggcctctcccgccgcaccacttgctccgacgttgtgcgagtgcttttggaggacggctgccggcggcgacggagacagcggcggagccggcggctggggtcggccggcgacccgcatggcccgggagagctgcccgaacccccgaacgaggacgacgaggacgacgacgaggcgctgccgcagggcatgctgtgcgggcccccgcagtgctattgcatcgtggagaagtggcgcggctttgagcgcatcctccccaacaagacgcgcatcttgcgcctctgggctgcctggggcgaagagcaagagaatgtgcgcttcgtgctagtgcgcagcgaggcatcgctgcctaacgccggcccccgcagcgccgaggcgcgcgtagtgctgagccgagagcgcccctgtccggcccgcggggccccggcgcggcccagcctggccatgacccaggagaaacagcggcgagtggtgcgcaaggcctttcgcaaactggccaagctcaaccggcggcgccagcagcagacaccgtcgtcctgttcgtccacttcgtcgtccactgcctcgtcctgctcttcgtcgccgcggacccacgagagcgcgtcggtggagcgcatggagacgctggtgcatctggtgctttcccaggaccacacaattcgccagcaggtgcagcggctccacgagctggaccgcgagatcgatcactacgaggccaaggtgcacctggaccgcatgcggcgtcacggggtcaactacgtgcaggaca

SEQ ID NO: 5559 - DNA, 6000 bp, Homo sapiens; identical to SEQ ID NO: 3212

SEQ ID NO: 5560 - DNA, 6000 bp, Homo sapiens
ttataggaccaccactgtatctgtggtgtgttgttgactgaaatgtcacgcggcacatgactttatttgtttagaggttctagcaagggaacttagctatgaagaaaagtccttacctttttaaggttatgtgaagttatgatctctaactgatttggcagcatcaggaagtgtaaacacagaaaggtgaggggggaagggtttgccatgtgttcatatcagtttagttagcttaatatcaaaagattataatttagataacaaagtgttataataaaagtaaaaattctggtcaattctctcttccatattccttttctctgccactttcttaagtcattgacgatgacttaaggttcctcaggtgcagcatacttttacctattttctcctttgttaagacttagacactaagatctctaagaacagaggccctgtttgtcttgcacattattttatcatagcgtctagaaaagcctggcacatggcaggaaggcaagaactatctgttgaataaatttagtctatattggcagttgcttcaagtactggctaaagggtctgggcagagtattggaaggataattattttttaaatcttgcttctgccacttagtatctgtgggattttggaaagttactcaatttctaagacttggccgggcacgatggctcacgcctgtaatcccagcactttgggaggctgaggtgggcgcatcacaaggacaggagatcgagaccatcctggctaacacagtgaaaccccgtctctactaaaagtacaaaaaattagccaggcgtggtggcaggcgcctgtagtcccagctactcaggaggctgaggcaggagaatggcgtgaacccaggaggtggagcttgcagtgagccgagatcatgccactgcactttagcctgggcaagagagcaagactgcctcaaaaaaaaaaaaaaaaaaatttccaagacttgtctgttttcttgtattggatgggcacgatacttggacatgatactttttgaaattattgttatgagcattacatttttaaaatgtagtgtttttagcacataggaggcaataaaaaaaacctgctccttctccgaacactccctgcctctctacaacataccttttagttggaagagcctaggaaatacctaggaaatgtgttattcaagttttttccttctgtttttggtctgctcctttacaatcaaagcaaagaggccttcaagttgagaactaactagttcccaaaggactgatgggttcactgtaaatagtgtttggcacttagaacctttatgcctgacacacagttcaacacatattttttgaaagagtaaattaattaacaaggtactgaataaggatgatgctccaaccagataattatgggatggacatgctttatttatttttagaaacagtgtcttgctctgtcatccaggctggaatgcggtggtaggatcataattcactgcaggcttaaactcctgggctcaagggatcctcctgcttcagcctcccaagtagctatgactataggcttatgcctccatgcccagtagacatgctaaatgtgtgaaaaagtgggcagattttatcaaatgagaggtttggagtgatggtgtgtccgaatgcgtgatttcaaagcgttctcattcattcgttcaatcaccatctactgtgtatctaccttgcatcaaccataatactagcatggatgtatctctgcacccccatgttagtgcaattagtcaatcacaataataattagagaacagaaggatatatgagtaacaaaaggaaatcagtaactgcttattggtatgtgaaacagcatgacatccaagtatgtcaagtagtgtgatactgtctggagtgcatttaaaggaatcagaagagatgaggctcaacaagtagtaggtaggtaggggaatttagaggaatgggaagagacaaggctcaacaggtttaggtggccatgtgagttggcacatgtggaacttcaggtaagatatttcttaaatagactgaagaaactgacacagagaaaacttaagtatataagataaagtaggtcagtaatgcctattcttagttctaattccccatcttcttctaaattggtccatgtatttcatttcacaattacacataaacctctacaatggtcactgattatttacatacttagaaacttctaaaatgaggccagatcatgaagaaccatgtatgccaggttgagagttcttaatttcatcctttagggtagcgatgggggagttactggaagattttaatgcaaagaaaagacaatcacattttggtttcagaaggatctgaattggagagtcagggtataaaagacagagaatcagctaagaagttactaaaacagtctagtataacagagatcataaaggctggaactaaggcaacagaagtggggttagagatgggatgtgtttgagagataaaagtagattaggcttgatgagggaaataagacagaaggagaactcagaatcacagctttctgagcggagcttctggacatgtggtgaggccattaacggatatagggaacagtatggattaaagatgtaggatgctgggcaagggcaagagaagttcagtattggccatggtgagttggcatctgtggaacttcaggtagagatatttcctgaatagaccaaggaaactgacacagaaaacttaagcatataagacaacataggtcagtaatgtctacccttagaacaattccccatcttcttttaaatttctccatatatttcagttcacaaccacacataaacctcttcaatgattactgattatttacatagttagaaattctactatgtatacttggaaaaaaataaaatatttctaacagcagcttgtttgttaatagggtaaacatgtcaacaattattgtcacaaaagtggtctgaaagaacctctttggtaaaagtaatagtgtaatactttcctgttatgtacttaggaatgactggcattttccctaaggataaaatattcagctgttgatagctagaccatgttagtgttgacctcagattggggtttaccaatgcagaggctcaggccaatcagtaacttatacagtggaacccatagaccagtagcaatgatggctgataacatgtcttgagaatttggtaattccactgcccagtggacgtggggcagcaaactgggcaccaaaccacagatggattgcagtacactgaaggaattcattatagttttgtgaaattggaggctggcttgacaaagatgaagcctgctgggattaaaaacttgtgtgttcttggcaagagcatgttgctgcagaatttcaccagccatagtggggaaaaaagaggggtgagggggcgtggggaaaatgggagaccacaaaattcctgatatgatacataaaatgttaaatatctatcagctttgcatcctttgagagtcaccagattgaagcacagtattttggatttggctggcagatggtgtacacagactttctgagaatgttagcatttcatttgaaactagcaagattacatgtgactatcatggtaacttagcactcacatatttttcaacttatccctaaccctgggttgaatgtagaggctctaataacatataaaaggctttgttaatgtatggtctgggtctcattgaatagtatttcaggatgtaatacttcttttaaaatgtccacagggcagtgtcaacgtctttccatggaaatctggctcacccaataagagaaaagaggccaaaggtaagaaagactaaaccaggggagatggcaggcagtgatgtctggactgtttgaatgggacttctccatttaccgcccctctcacttccttctatggtctggacctttaatcaccacagcagtcagccatgtagggtcaagctaatcgctgttgacatcatcctactacttcccttttcaaattccagtgaagctatgtgtttcctgtcctattccacaccctagagaatgaataccggccagctagtatctaaatttagaatggcagcaacgtgtcgggttttcggagtagagataaacaaaaccaggtgacatttccaagcctctcaaggaaaggggggaaaaaacctttctggggtaagtaaataaggagagcttcaatagttccatggtagagagaggcctgctggaaggttcagaaaataggccgtttggaaccttctcctttaagccaggagggcggctttgggaggcgtcttgaaatacattcttgactctgctgggaaagctcggggagccagaggcctaataccccccacttcaggggaagctgtgaaggcagctgcacctcctttgtcaagctgttggtttcaaccacagacacgaggacacacttgaggtggggggataaggggagaagcctgccgccccgccccacccccgccagcacaccgccctcgccattcctctcccgccccgccccgcccggcgtctgtgaccccgcgggccgagcctcaggcgacctgttggcagggagagtcacgtgatgcgccggctgtgcactcccctcgggcgggcctcctgttgcgcccgcctggcgagttccatcacgtaacgcgcgggcgccgcccagctcttccctcgctgagcgagggagggcgggcgtcgaagaggaaagggaaggggaaaggggcgggagaagggaggaggggcggtgtccgagtcacgtgacccggggcagcccggaaagctccgaggaggagcctggcgccgccattttcctgcagctgcctgttcctcttaccctgcccggctccagctgacccgggaaggggtgggctgaactgaggcgggggcaagggagtgcccgacatcttgtccgactccgcgggtgacacgagccggttctctctggactggtggcagcgcgcggccccgaaccgcgccccaggccggcaggcggggaaggagccggtgggggtagggggtgcggtggggggtggggaccctccggctcttgggggtcccagtccccgccggctgctgagcgggtggggtggtggaggagctgcagagatgtccggccagagcctgacggaccgaatcactgccgcccagcacagtgtcaccggctctgccgtatccaagacagtatgcaaggccacgacccacgagatcatggggcccaagaaaaagcacctggactgtgagtgaagccgaccgcggcccccgctccccggcgcccgcgcgacccgcgcgcgtccttctctctctctcttgtctttcacccttctactgcctcttccctccctgcgtcttctctggcacggccggtcctgtgcccgttgagctgtgttcttttgcttccatcacacctgccttcacggcctccgctccccgtctcaaaatctgacaagccactcccctccctattcctaggggaccctcgtctccctgcccggtgcgctaccacaccccatcatacccaaccaacttgcttccccacctggcttctcaccccctacccgtctccactgcagccttctgctcttccttcccacccgtccggtgccgcctcgtcgccctcgtctgagcgtctccaagccccattgtttcttcatcagcctccttcgggtttcagtaaacgcctggttccttgcatccagatccttgttatccctccgggctgcctccctggaagggatcccccacttcctttgctccactagctgcttcgcccatcccttcctggctttctgttccaccttccctcctgcttttgggttaccttttcatcgcctctatagtagcttcagtgtagtttcttcgactcattttaaataccatacccagttacccgacttttatttcagattaccttctttgtgggagtgaaagtaaaaggattcaatttggtgtagggaaagctttctggaaagttgggatttttatttgcctctggt

SEQ ID NO: 5561 - DNA, 6000 bp, Homo sapiens
acacgctgagagctgtagttcagaaacagaagtggggggccactgttaccactctgcttagaaactttatgggttgcctctcatgcaatctgtagcttcagagcacaccttcgatcctgtctcttccctcaaacagctgtgggctgcccctcctcacccccagggctggaaggttagaggaagaatgctatcatttatacagagggatttaaaaaataacagcttaaaaaattacagctacatcaatcaagaaaatgtattgacataaaaactgtccaataatacagttaaatggaatggagggtacagaaacagatctccacatatttgaataactaattctcaacaaaggtgcaaaggcaattagtgaaggggtattcttttcagcaaatggcgctgaaacaactggatatccacatgcaaaaaagtgaattttgatctagaccttataccatattaaaaagtaactttaaaatgtatcacagatataaatgtaaaacctaaaactataaagccaaaagaaaacatgacagaaaacatttatgaccttgggtttagcaaggaatattcagttatgacaccaaaagcataattcataaaaatgtaaataaagaggctttatcaatattaaaaacatctgctcttcaaaagatcctgttaagagaacttaaagacaagccacaggctagaaaaaactactttcaaatcccatatatgacaatggacttctaacagaattcataaagaactctgaaaattcaacaataacaaaacaattcaattttttaaaaaaaagcaaacaaaagatttgaacagacacagacacacagaagaggaatatataaatatcacaaataagcacatgaaaacatgatcaacatcattagtcattaatgaaatgcacattgaaaccataatgagataccactatctacttgttagaattggtaaaattaaaaatgctgactatatcagttgttgtccagcttttggaagaattagaactctaatatactgggtggaaatgtaaaatgatacaatcactttggaaaattgtttgacggttaaatgtacatgtattgtcttggtccatttgggctgctataacaaaataccatgaactaggtagcttataaacagcagaaacttatttctcacagttcaggaggctgggagtccacaataaaggtgacagattcaatgtctggtgaagacctgctttgtagctcctagatggcaacttcttattgtgtactcacatggtagaaggggcagggcagtgctccatgacctaatcactccccaacacctcctcctactaagactatcacattggtgattgggttttgacacacagatttggggagaacacaaacactcatatcacagcacctactaatttatccagccatttcactgctaggtatttacccagaaaaaatgaaaacacatgttcatacaaagacttgtacaacattttcatagtagctctatttataataccaaaaaaattggaaacaactcagatatttatccacagttaaatggataaacaaactatagtatataaataaaaagaataaaaagaattaactattgatacatactataatttagctgaatctcaaaataattatgctgagtgagagaaaccaaatgaaaaaaagatacactatattatatacaattctaagaaataaaacctaatttatttggcacccagatcttcatttctataccagtttcaaataaaaagtctcaaacttccttggataaatggctgattctacgactggggcaggaaatatacaagatgagtctgatgagtctgtagcatcttgtaataccagaaagtaggaaagtccacacatacacacacatacacacaatacagagagtgggtcaaggagcacaagagtcaactgaaaaagcccccagtgccaaaaactggaaaaatttgagcaacaaagtattcatgaatccatacaaagaaaagactgaataaagaagtaaatgggggagaagaagcaaatcttcctcacagaattccaaataaattatgtagatactccactccaaaggagggctagcataactccctactcccccacacttccttaagtgactcataatgatttccttccaaagagtacagagtatgcaaagagggaaaaaagagtaactatgcaatggagaaacctgacaaacactacttcagccaggtgatggagaacaacattaacagtcataagtcatgttgacaatatgtacccttcatatgatgtaataaatacagtacattacctctttgatttccaccccgccaaaacccaaaaccctagtctactcatgaggatacatcaaatcccaatagaagggcatcttgcaatatacctcaccagtactcctaaggactgtcaaggtcatcaaatacaaggaaaatctgagaaactctcacagccaagaggagcacaagacatcataacaattaaatgtggtgtcctggatggaatcctggaaaggaaaaaggacattaagtgaaaatgaagaaaatctaaataaactatgaatattagttaataacaatttatcagtattagttcattaattgtaacaaatgtaccctattaatttaaaatgctaacagagaaaattgtacaaatgatatatgagcattctctatattatctgctcaatttttctgtaaatccaaaatcgtttcccaaaagtaaaatctattaataaaacatctaaagcaaacagacctaaaaggcatatgcaaatgtataatttaatgtttaataaatcagatataaatatttttaaaaacctaatatttggtgacagaaagcagattagtggcttgccagaaagtggtgattagtactaggggaaggggatgggacagaacagtatgaagggatttaaaaaatggcatgaggaaacttttggaggcaaagggtatgtttatcattttagtttcacaggtctaacaacaaattatacaatttaaatatatgcagcttattatatgacaactatatcttgataaagtggtttttttccccaaactatagaaaaaatacttccacatttaaatcctcttctccaaaaacagtcttcaggaatatttgaagttagccccatcacacctgaatttaatcagtgaattttgttcattcaaagattcatacatttgggaagttcctgtgccaaaaatgctaatcacccagcatcaaaatttatggaataatggtgatttaggacatgctggacatctttattgttgttttcccacttcaagattttcaatcttttggaaacaacctccccagacattctgacaagggaattattataaccaaccaaaatcaagccaaatatagtttgtcagatttaaaatgaggccaagtgccaattttacagcagcgaccggaaaatcaaattatatggcatctgacatttaaaatcacactcctaagaaggctgtcatttgatgtcttgggtttgggttacagtacttaactttataatactgggtaaccttgtgcctcagttttcccaactatgaaattgggataacagtacctattttgtgagactgttgaaggattacagttaacacaggtaaaaggcttacaagactacctggcaatgctgtcctgattttacaaattctatacactgtgtggcattagccatcaggaaaatataaataaatcagtgagataccacttcacacacttggggggctataacaaaaaagacagataaaaaatgttgtcaaagatgtgaagaaactaggacccttattcactgctggtggaaatgtaagaagtacaatcatttgaaccatagtctggcagttactccaaagaccacacctagagttgccatatgaaccagcaattccactcctatgcatatatccaggagaaaggaaaatatacgctgcacaaaaacttgtacatgaatgttcattagcaggatttttcatggtagccaaaaggtgtaaacaacccaaatgtccaacaactgatagagatggataaataaaatgtggtttatccatacaatgaaatattatttgtcaataaaaaggagtgaaggagtgaagtactgattcatgtggaacatggatgaaccttgatccaaaatagccaaatcacaggtacaaaaagcatattagtggctgctgggagatttaggcggaaatgtggaataactgctagtgggtattgagattttagagtcatactcatgttacaaaattaatagtgctgatggttgcacaactctgagtacatgaaaaatcaatgaactgatactttgagtgagctgtatgatactggaattacacctcaataaagcatggtaactgttttaagataggctggaaagagaaagcctgaaaacaacaataatgatattaataaattagtttacttctctagtctcatatacttctgtgcccacacttgctcctgttctattcataatggtccccttgcagttgccatattatatcctgccatttgatgcccggtgaacattctatacctgcttcccagaattctctttacctttcctctatctgcctaacttccacatatctaaaattaatcagagtaaactatttactagaacaaccaactccaaatcctagtaacctaacatgataaaggtttgtttctcactcatatagcccctccccagatgatcgaggggtccaggctccttacctctagtggctcccccaccttctggagtcttctgcattctttatacatggttgagataaactatgagtcattagcacagctagaccttgaggtcctacaagaaaatttgcaaatcattcactctgttttgaacaaggtatatttaagatgatgttaaaatacccaatggtcttgggtcaaatacagtttatgactgtgtatctaaaatatatattgcaatattcttccctttttctactgacttcatgaatttagcggggatccattttataagctcaaagataattacttttcagactaagaatatttagggtaaaaagtactgttcaacatctctactgaggatgttatgatgtagcacactgtataagctggagctaaaggaaactttccttaaagtgctatttactaaaaattggaacacattccttaagacaaatcgaagtgtggcacacaacatccaaacttccatcatagatacagaggtgttaccatctcccactcccaaatttctttgtcacgctgaggatactcaagaggagcaggacatgttggtcgcagcaggagaaacttgaaagcattcacttttatggaactcataagggagagaatctcttatttagtatcgtccttgatacatttattattttaaaagataatgtagccaaatgtcttcctctgtgttaaatctttacaaaactgaaatcttaaaatggtgacaaaaattctacttctgatagaatctattcatttttccaattagatagggcataattcttaatttgcaaaacaaaacgtaatatgcttatgaggttccatcccaaagaacctgctattgagagtagcattcagaataacgggtggaaatgccaactccagagtttcagatcctaccggtaattggggtagggaggggctttgggcggggcctccctagaggaggaggcgttgttagaaagctgtctggccagtccacagctgtcactaatcggggtaagccttgttgtatttgtgcgtgtgggtggcattctcaatgagaactagcttcacttgtcatttgagtgaaatctacaacccgaggcggctagtgctcccgcactactgggatctgagatcttcggagatgactgtcgcccgcagtacggagccagcagaagtccgacccttcctgggaatgggctgtaccgagaggtccgactagccccagggttttagtgagggggcagtggaactcagcgagggactgagagcttcacag

SEQ ID NO: 5562 - DNA, 6000 bp, Homo sapiens
gcctcagccctcccctcctcccaagtagctgggattacaggcacctgccaccacgcccagctaattttgttttgttttgttttgtttttttttggtagagacgagacaaggtttcttttttttttttttttttttttgagacagagtctcgctctgtcgcccaggctggagtgcagtggcgtgaacttggctcactgcaagctccgcctcccgggttcacgccagtctcctgtctcagcctcccgagtaactgggactacaggtgcccgccaccacgcccggctcatttttgtatttttagtagagatggggtttcaccatgttagccaggatggtttccatctcctgacctcctgatccgcccacctcggcctcccaaagtgctgggattacaggcgtgagccaccgcgcccggccggagacagggtttcgctatgttaccctggttggtcttgaactcttgggctcaagcaatctgcccaccttggcctcccaaagtgcctggcctcactcccctttttttaaccacacaatttgttcaagggtatgttcttgtacaagattcaaggggtgcagaagtaaaacatggaaattcgccctccccagagctcacctctgtggccagcggggtgcagacttccagccctctgcgtgctcatggtcgtaacatgtgcacctaaacacacgtgtttgtgaaacattgtcctgccgtggggaacgcaatgggcacttccagggcgctgtgcccctgccaggctggaatcttgggcccctcttgttcacatacagatacacccctgatgcctgatgtccagtgaggaaccaaggctgcggggaagggtggcccccacccttcctcttgttatcaggcctcagacacactaggaggatggaggcgagttctctcagctgcccatcccactgaggggtgcccggccgtcagtgtcttgtctgcacttacgtcccagaacctctagagcttgccccccagggcgggcactgctgggagggtgcgagcaccgctgcggcacagaggcccggttcttggctgatcttctggggcctgggcctgccctgaggtggtggggacagggtgtggcctggccctgctgggggctgctaggccaacgggaccctccccaagcgcgccgcacactgcagggtctccaggcacctgggctcagctagtgactgacccatttgtttgctaaatacgcagttttgtttttaatacatactcgtgaaattttccagaactggccttggaccagagaaaaatactttgggaatttttcaaaaaaatcccttcagttccacttggaattaggaaaacgtggcagatgcacttgaatcattttagaaaccaaattcacccccgcccacacagccgacccagaagacccagagacagatcaaaccatgctgttgcaggggcacctcccccaggaggggctcacgcctgtgttgcccatgctctctggctctcctgagttctgggtggccatggaggctgtttccctggaattccccaggccccggaggaacgtagggcaaggagctgctctggtcccagcagccctccaggcacctgtgggcggtgggctccagggagcgcctcgcaccaccttccctcccctttgctctgttctccaggcaccaggggcaacctgacagaggctgagaggccgctggccgccagcctggccctcacggctggcaccgccctcctctctgcccacttcctgctttggcaggccctagtgttgtgggcggactgggccctcagcgccacgctcctggcccttcacggcctggaggccgtcctgcaggtggttgccatcgcggccttcaccaggtagctacggacacccgggataccccacactggggccctcctcctgggcctgaccagtcccccagctgtcacctccccattcctggacaggaagggcacttttcctagtgactggccatagatggttttggatggttccatctgttctggcaggagtgggagcaggagccagggcagaacaaactgctggaggccctggtgttgggaacagctgcggggagggtagggaccagacagaactgccttcaagatgagtcccaggagcgcacactcagccctgtcagtggggtctggctttagcagccaggcctccacagacccccatgggcccccagggccgagagggaggacagagcccttcagaacagaggcctcatctcactgcatcccccatcaccccctagttccccaatggtcctaatttgtgttctgagatcccagtttactccgtggccaggccccacctgtgtttccaagtcgggctggagacgcaggatggggtaggccttgtgctctgagcaaccccagctctgcctcacaggcaggcaggcccggtgcaagagtggactctgggttcctaaagcaataaatgcaaacaagccaacagctctgctgcctagcaatttccatcttagccacacttctcccttcaggggcttcggaggagaggtcagggctaaggccggggatgagactgcaggagagagagcagcggagggccacattcggagcctccgtccactccagttttatcagcttttgccttttgcacggagtgctaaacaaattctagctctgtgtttttttcccattcccagatttactatcagttctccttaaaaagtatctaagctgttacagtagctttcccttcacttgattctattgtgtgttttctatgtttggaataattacacccaaatatctagatattttctcttcaccgcattttgtaaataaagagatgtgtatgcctccctgaattctcctaattatggccacctcccccaccccatctccagttctcctgccctgcaagagagcacaccccacttgccagctggtcagttcctggctggcctcgccctcgggccctggctgccgggcgccttccgctcggtggactcctgagggcaggaggctgcgggactgtcctgggcctccactggggctccctcggctggggtggctgtggctgtggcacctggacagtctttcctgcctgtcttcgtggaagcggtgggagcacccagttgtcctgggccgacttcctttgacctgtctgtggcccccagtggccacggtgagctgcaggacagccctgaggacccacttcacacaccagcgcctgagcgcctcgggccacctccctcaccagcgcctgcactcgcagaagaccagctgggcacacctgccatctggaggacccagcccacaaaccatgcagaccagggaaggaccccctccctgaagctggagacctgttgccttcatggttaatggatcctgatacctccagtctcagcgagcacacaaaggcagtggtcacctgttccacagggaacgccatggctccaggtgacccggagtggatggggcccgagaggccagcctggactgtctcctgagggcaggctccgcactcaaaatcgtgttgacaggcacccgtttaggagtggagagggaccccaccccccagctgtcctctccagcgcctgtttcccacttggccactcccagctctgcctccaggaagggtgagggcacgggtgcaccgaggggttggcgtgtgtgaccctgagctctgggtcagggcaagctcatgcatggagcaggatcacggcaggttcctggagatcaaacggcaaaggctgtaaaccaggaagccaggtcttgcctgggctcaggggcaggcactgggcccgaaggaggagggccacttcctgccagccctccaccgagctcacctatggcgcctccccaggaagtgctccggccagcccagggtaaacacgctagccctgcccctctgggaccatagcccggggacccagactcttggccacgctcattcccacccctacccaggaccggcagccggagccttgggtccctgcatgggcctggggcgccctgtgccccttcacctcgtcctcgtccagttgactgctgtggcagccggtgctacccgctgtgtccactgcaccctggccctgttctgagcggtcacagcagctggggagaagggccatcctggaagccgggcagatgaggacggaaccagacagtcccactgtggtgggcagaggtggggcctgggcctgaccacggggcagtgcaaggagagaggcatcctgagagggcctgaggtgtccccacctcccctgacaccccatccctcagtgcccaggctgggcagaaaggggggcctggaggagcagctgcactgtgaactcagggctccaggcctggggtgggcatggctgggtcctgcctgacacccacccactcaccgaagcctctgcccctgggcctgcggtgggcccggtaagggaagtgactctgccccatgcctggggcacctgaggggtgcacctggcccggcggaggctctgacctccccagggctggagccctccccagcaatgcgccagcgctgcccccgaagtcccattggcagcgttcccccgtcccccggcctgctggggcgcagctaggccctgcccaaggaagagctcgaggcctcgccctgctcatcccgcggaggcggccctgcgccccgcctgtccccagcgccccagctctaggggctaggcccgcggaggggcacaccaggcgggtgttggggaggacgcagagggctggggctggagcccaggcggggcagggggcggggcggagctgggtccgaggccggcgggggcgcctccatcccacgccctcctcccccgcgcgcccgcccgctctcgggtgactccgcaacctgtcgctcaggttcctcctctcccggccccgccccggcccggccccgccgagcgtcccacccgcccgcgggagacctggcgccccggccgaggcgcgaacagacggacgcaccggcgagcgccgaggggacaggccgagcgcggggcgccggaggcaggtgagcgctgcggacacgggggagcgcgcccgcccgggcctcagtttacccggtggcgatgggacgcggggcttctggttcaggacaccgggacgaacgcggcgtcgcagggcgcggggcacttggagggcggccgggccgagggcgcggggcaaggggctgggggcctggtcgagtccccacctctcctggacgggtcctgctgcagcccggcctgcccccgtcggtcctgggcggcggccggcgagcaaggatatttttaagccagcgatgggtgactcacctgccccgtcctgcccactcccagctctggggcttggtgggggcaatccctgcgtccggagagcgctggtggtagggaggcttctcccggttctgtgagcagcaggaccctcccgagggcctgaccgtggaggtagcactgcacacccactccctgtgggccggagccaggaggcacttcctgggtgtcggagcccagaaggaaaccagtggccgggaagcaccagctgggtcagtctccaggtcagggttgggggtgggagtttcagggaggaggggaggctgggacaggggctgcagaggccctgccaggagaggcaggagggtgggctggcaggagcctgtgggcacgcgaacttcagccatcctagattcctggtccctgcgtccagctgcctggcgttgccccttgctgcggggtgtccctggtggcaggggagggggaggcagggccgggcatgcccggacctctgcccccacccaccccgtgctcagtcctgggtcggctgtgctgggaggcaggcccagctggcggcggcccctcccctcgcggcccctcctcccctcgcggcccctcctgggtcccagcctctcccgggcctgcttagcacccaggccttgttggcatagctctcccaccgggccttctccgcctgcctcggtctcctttcccaccctcagcttccccagcttatcccttcctccctcaagccatagcttc

SEQ ID NO: 5563 - DNA, 6000 bp, Homo sapiens
gcagtcattcttacaatgcacacacatctgtatgcaggatgagagttttccttaggtaaattctgagtctgtagcttttatatgagtggagcaaaggacccagagctcactgcagaggatctaaacaacctttgatgctggagatcgtgcttggtgattataaacttttatttttaaaataccaaacgagaaagagagggccaatgaagtaagacaatgttacaaggagtagctctttataaggagtaattctatcaatgacaggttaaatgacatcactgcttacatctcaccacgccagctgctgacttattaactggaatgtgtatatggtgcattaataatgtggtgtggggcctgcatgctagttgttcctttatttcgtttatatggagagtgtgtgtgtgtgcatgtatgaaatccacctttattttcatggcctctggattttgtgttatgcttagatgggccttttaagattatagaacttctactcatatttttttctagtgtttttataggtttgactacatgcacttaaattctcttttcctatggtttatgttttaatgtaagtacagggtagggggcaaattttatgtgtttccctatggctagctagttgtttcaatagcatttattgaaaaatccatcttcttcccaatcctttaaaattcactttataactcaattttcctatactttgggtctatttctggatgctatgccttttaattcgtctattggtctgtttctataccaataccagactattttattactatagtttaatagtacactttgataatgtatgagatcaaattccccagtctatcccttctttcctttttcaaaagcatattgtaaatttttttgagctaatgcatttctgaaatggcttgcctgaacacttcactttgctatactaactagaatggattcttcctttcttttatattctccagaaagtgaactctagtctgctcatcccagtgaagctgggcaaaattgatgccagttttttgaagacagtgtctatctgttcttcagagcttctgttgagaagccatgtggccactggtgctttagcttcctctagccaaacggaaaagcccctttcacatctgagcaccaagatctttggaatcttggccatgtctgcaagcaagatctagtctaaagcctaattacacagtctaggacacattccaaatgaggtattactgctctcccattctgagctgctatggccatcccattaaaaaaagagccaaggaaggtcttttcaaaagcagctgaaaaagctataaacactggttaactcattaatgcctgattttttttttaattcccattttttgtacacccagatgtcaaccttggttaacagatcaaaccattcacaaatgtcaaatcccaaagaaacgcaatcagaatcttccagaacaggactctgaagtctgtattttttaaaactccccaggtaattctaatggatccaatcattggatcagagtcagggaaactactgtagattatactactttatcctcactaacttcatctgtaaaacaggagcaagaaatatctatttcatagaattgttaagagtgatacctaatatgtatcacatcttgactgtatgccaggcactgtgttaagggctttccatctatcatcacattgaactcttataacagccctatgaagtagacactagattatcccccttttacagatgaggaaactgaggtacaaagaggttaagcaatttgataaaagtcatccagctagcaagtgtggagggcaagcatatcaactgctagggttaacgtgaggattatattaaataatgtatttaaagcatctggtacacagtaggtgcaaataaatgctctctcttatcttccttttatccacatgattctactcatgcccagtaaaatttacattgaggacaatattttgaccttagcagtgccctatgaattgaaagttcagtatcctggaaagtagaaaagaaaagggaagttaggtagtagtggaaggaggtgtttgggatctccaacagagagaaccacaaagaaaggtgtaattacacagggaaaaacaggtgcacatgagggaagacagttgcttggccactgagggtaggataaggcagggtgataacctttaaaagaggaaagccagggtacaagatgagaatctcagaggaagggagtccacaaagacacctatttcagcccgcctcccactgcatggtaatccaattctcacttggacattttttgtgacaagaaactcaattaatcaaggcagaggatgctctagctgttagaaaattgttcatattgattcattctagagtttctacccacaggttctccttcaaccccttaaggcccttaagtataagtttaatttctcttctatttgacagttcttcacatatatcaagacagttaccttgtacccctggggcaaaaccttctgcttcctttaatatttcctcatatgacatagtttctagcctctttacatcctggtccctctacttgtgcatgtagataatttctttctgccaagtcttaattgcagacaatacttcatgtgggtactgaccaacactgggcagcacaataacacctatcttgctttacatgtcagacttccactgatgcagcctaagagcgtttatttattttggcagccacaattcactgtggactcagattatttgtcacctaagaccctttatcttgctcctgtaagcatctaagacacctctgcctccggctggcttcacacagggtgggactccacatttacccctgttagagtcagcccactgctccaatattgtatgtggtttgtgtaacagcgtctcttcccctcctggctttgtgtcatctggacatgtgatgcgaatcttctggattttccttcagaacactgataaaagttctgatgtctggacctgggagagaggcttctgtcattctgagggtaactggtgtggtatagaggctttgaaataaaaagaaaaagtctagtttgaatcacggctctgccacctactgtgtgacctttggccagctagctaaattctgagtttcagtttccccatctgtaaaatggggcaataaaagcttcctcacagtgtggttataaagattaagggagaacatgaggggaaagtacttagcacagtgtctggtacgtagtaggtgctgctggaatgctgactccctgcaatcttcttttcggtcaacgtcgactcatcaatcagcatctttaggttatggttacttaaccagttattagtccaattaatgatactagcatccagcccatatttcttcatcttgtctatgatatcttgtcaagtgcttcgcttaagtcccacttacctagagtgatctcctcatgaaatgggggcagagacaaaggagcaataagattccacctgcgtgtaaacttcggaaaaatagcaagctaccgacggaattgcttgacctcgaaaacagtcagcattcagaccacaagcacatattgggcactccgtgcctgtcaatgagctggggatgggcaatggtgttacagagattaaaaaacgcagtgtctgtgttcaaggaacttaccaggctagaagtctagagtcacgggggccagtctgggtaacagaattaggccaatttatttaattccatttgttcatgtatccagccaacagatatttatggtgcacttgttgggtgccagccccgcccccaccactccaccctaccccagcaggcgctaaaggagagctgacatgatggataacgaaaaagaagacgctgtccttctattcagggagtttaacatctggaagagccgggagttctttgtgctaaaggccctctacaaagtgcctgagatgcaaaaataagtcactttctctgtcctctcagcaaccgagtcgcatgtcgttatcaaatttttattttctgtaactgtttccttccgtcttgctccgtagacagctttttgcagcagagagcgctgccgcggggctggtgtctactcttcagtaagtggtcaaaacctggctactggaaggaaatgcaatggaatcgctccgcgctcgagtattctctttggaactacgggaatgacagctccagtgggacacttggaggtcatgatgaacgcaaagaacgtgagaacacttgcagtcctcggggtggaaatgccttctagaaatactaagtatccgttctctcgttgagactttggcaaaccagggattttaggaagggtctggcactcaacgttcctaaaattggtttcctagatggagccggagggagagagggagtcaggaactgctgcttttcgtcggaatgcccggaggggagaagaagaaggaggaggggtgagggcgggcggccaaacgccagccggcaggggacccagagaagagggacatcccgggcgaccccgaggagcgcggcttgggcaccgcagtggccgcggctagtgggagacctgaggggaaagggagagggcaggggcgaggaacccagggagcgcgcgcggattggtcctctcctcggggcgtgcgctcctgtgcgccaaatgattggtggcaggaaagtagcaggtaaaccggctcccgccgcctcgccattggtcagcggcctctctagccgccacacaactggccagcgggctgccgagccgcgcgcggattggctgggggcggccgccgggaccggctcccttcgggcgttcggattggctggcgggaagaggcaggtatccgggcgctgcggctcctccattggtgggcggggaaggggggttgggcacagcgattggtgggcggggggccgggcctgggccggcggggagcggattggtcggaaagtaggttagtggtgcgacatttagggaaggcagaaagtaggtcagggacggaggtgcctgtttacccgcgccggactcaccgccgccgccgccgcgggatccgagtgcgggcgcgggcgcgggcgctcccggcgagccacggtgagtgtcaggccggcggcggccagcgacgcgatcccgcgcaccccgtcgggggccgttagcaccctcgcgggcgctgcgcccctgccgccgccccgggggcaacccggccgccgaagaaccctgcccgacgtgcccgctgccggccttaaagggcccgtgaccgctccctgcccccacccgggccgtggggaggctgcgccccttaaaggcgccgcgcccgtccgcccccatcctcctcgcgggggctgccgctgcgggctagggcaggcagaggtgctgcaggagcccttaaaggggccgggaaagtgttcgctggagtacccaccgcccttccgcgggcatcgctacctggcggggggagggggcagctagctgcctcttaaagggatagctctgcccttgggggcagtgactcggccgaagaggactcctagatgtgtccccgggagcttcggggatccccgaggggaccatgcctggtggctgcccctcaagggcgttgggcgaacggtgccgcgtctgcccttcctccccgcttcacttccctttcgggagcccgcgaggctgggtgggggcggggagggcgtctccgtcgggcttggggagtccaagtccgcccgccccttcggccctgtagccagggctggcgctgcacccgggaatccccggccggcacggggccgaccccagcctgcgaactttcgtggggcctgtgccgtccaggtcctgggcggccctcaaggatgccccgtgggtctgcgggcaggtgcgcgtcggcctggggatgtcgcccggagcccgggtgcgggccggccttggagtcccagagctccgcggagggcgcagcgagcctggctccagctccgggtttgacagatgtcagggaagaaaaggttcccgctcggctattgccgggcgttgacatcccagagagcttcccgt

SEQ ID NO: 5564 - DNA, 6000 bp, Homo sapiens
aggtggtcggggcacagcttggttttatacatttagagagacatgagacatcaatcaatatatgtaagaagtacattggtttggcctggaaaggcaggacaacctgaagcaaaggcaggaaggctctaagtgcggtgggagcttccaggtcacaggtgatacacaaagggttacgttcttttgagtttcccattttgagtttctacctttccaaaggaggcaagtcagatatgcatctatctccgtgagcagaggagtgactgaatagaaacagggcaacaggagacaggtttaccctaagcagtttttcatcttgagttttccttagtgattttggggacccaaaatattttcctttcacaaattctagtataccttgctttcactctttctgtccaattctttgtttgactgaagcgtttcagaattaagctgcaaacattgtgatcccttaccctaaatatgtgagcatctcttatgaacaaatatttttttaatcataaccatcatataattatcaaatttgggaaatttaacattgttacaatactattaatctaacacatagtccgtattcaaatttcaccaactgtctcaatactgtcctttataataattttttcatgatccaggatttgtgtgttggattttgttgtaaggtctctttaatttcctttgatctggaatagctcctcagttgtattttgtctttcatgacatttacattttttgagagtacaggtcatttgttttatagaatggctctcaatctgcatttgtctagactggtctttctcacagtgtggtctgtgactggtgctggtctatgcctggctgttacctaatggtgagaaggccaaccaacattactcatgctgttggaaacttttatagcaattcaaaaataattttatgtcttttgaatctaagaataaaaattgagggcttggatttttatgtctttttatttcatttctctagtaattcatttttatttcacaaaatgacagttcttcgtgggttggacacttattttttatttttacttttattttttagaattaagaaaaaataatagagacaggatcttgctatgttggccagttggtcttgaactgttgccctcaagcagtcctcctgcctctgcctcccaaagtgggtgagccaccatgcctggccaggttggacacttttaaagagtccttcagcacagctacttggaacaacaatggtctagaatgaggtgttttttgtttgtttttgtgttttttttttttttttttttttttttttttttggagacagagtctcactctgtcacccaggctggagtgcagtggtgcaatcatggctcactgcagccatgacctcctggccttgagccatcctccctcccacctcagcctctcaaatagctgggaatataggtgacaccaccacacccagctaatatcttgattttttttgtggagatggggcctcactatgttgcctaagctgattccaaactcctgagctcaagtgatcctcctgtcttggcttcccaaagtgctgggattacaggcataagccactacacctggcctagacagattttttgaagctaaggactgtgctttagccatcgctgaattcgtcactcctagattgtgcctggcagagttcaataaattgttgctgaggggcaacttgaaatgtcccattcctttaatagaaaagctttcctttcctttttttttttgagacagagtcttacacttgtcactcaggctggagtgcaacggcattgatctcggctcactgcaacctccgcttcccgggttcaagtgattctcctgcttcagcctcccgagtagctgggattacaggcgtctgccaccacacctggctaagttttgtatttttagtagagacagggtttcaccatgttggccaggctggtctcgaactcctgacctcaggtgatccacccgcctcggcctcccaaagtgctgggattacaggtgtgagccaccgcgcccagcagaaagcttttcttatactgagccaaaatctctctccaacttgcttttgccttcaagaacatcacctaacatgtgtactcacatacacaggtgttagcttttcagagacttacaagactggtaccatttcttaaacccccaggctactccaaacaaaatgggctcagctcctttactcatttgtagtgattaggattaggttctgctgaaaatgagaacattttaaataagagtagcttactgactttatttcttatgttccacaggtccagaggtgtccttctaaagctggtagaggtttcacgagtcatcagggacccagaacccttctcttttgctgtccctttgtcctagtgcatggtttccacactgtggtgcaagatgtctcctcaagctctaggcattacatctgctatcctgctgtcagaaagaaggaaggggaaaagaagatcatttccttctctttaaggacatttcccagaagtcacacagaacatttccatttatattactttggccagaacttggtcatatggccacatttagttccagaatgattaggaaatgcagtcttttattgatccctgtgcccaggaaaatattggaggcctttttcaaggaaaaaggggaaaacagatattggttgacaaatagcagtctctgccatactgtccctggatacatgtctttgagtgaatgtcccttatttaccattctgattacttgttggatattttcaatatgtgttacaatatggttccaaaattgtatgtgatattccaacagcaagttggatgcaatgtgtcataaaaatgacctcagtgtcaaccagcatttgaataccgtgtctcaatgctgtgcaccaataaagaacacagaaagtcagagttttccataaataattcctgagaatatatgcttattttgtttgagaagcatcgtgaggtatctgctgtgtgctttagggttgaatggaaagttggcaaaagtattaaaagacatgttcaggccgggtgtggtggctcacgcctgtgatcccagcactttgggaggccgaggtgggcggatcacttgaggtcaggagttcaagaccagcctggccaacatggtgaaactctgtctctactaaaaatacaaaaattagctgggtgtggtggcaggcacctgcaatcccagctacttgggaggatgaagctgaggcacaataatctcttgaacctgggaggcagaggttgcagtgagctgagatcacgccactgcactccagcctgggcaacagaacgagactctgtctcaccaaaaaaaaaaaaaaaaaaaaaaaaaaaaaaaagatgttcaaatagacatgatattggtaaaaacgaaaacacaggtaatgacttttcattctaatgaaatataaatagagaaacctgccggttttaccctttagagtaaaaagggtacaaaaaaattaccaaaacagtaaaaattaccaaaagagtaatttgataatttctacagggtgatgtgtatgtgtcacaactttgtgaatcactattctgggcatgtataagaagtcgtcatatacctccattgggaatgttatttaatgatgtcactaataccagacaaggatgtctcctcaggtaaggctccttggaggaggcagaggttgagaagaggtgtaatttaggttttaaaaattcaatagctggacttaaccttgcatatctctacctgttataacggtggtccggaaggctgcgatctgaaggcccctcagctagttgctgccactgtgggcactctgcgcatctttcacttctgagctctttctgtatgcactctgttctgcagataagtgagaatgtgactatttgcttagtcagtgacagtgtctctaaccctggaaaggaagcttttactctctcagttttagagacatgtgaacaggctggggatatgaggtcacttacccactgtcttataatcagcagatggcatggttggcattggagtttaggtctgtctgtgcttttctgtacattacatcctttttaatgatgcgaaggaaaaatgcagtagggtcaatgagacaaatggaatgcaggttgctggggaaagaatgcaggttctgcgttataaatgcacacacatttactgtgccacttgggttctgaactttgcggttaaattgatttaaaaactggtgtagaggtggtaaaacttaatcaccgaatgagaatatttgggtttgcttcaggaggtcgcaagccacttcttgattagtagaaatgggaaattaagggccaccttcaggcgtttaactgaattgtcctggggatttaatttgcctttcgacttaatgctaaatttttgttgtttttggtttttaaagtaatgtaagtttatcgcgccaacggtaagatgtcgctctggacgcgtgcacctgctctcgcaatcaccgactgcggtcagcatcttccttagagcagcgccccgggccacttggatcccggtctcaatttactaagcgaacccagaggatgccccgagtcctggaccgcagagccgctcgcgagaggcaccggggctgtaaccgcgcaacctcgtgccgcgggcggaggcgagggaggattccccggccggtgcccgcccccgggctaaagtgcggcgcgggtggggctggtcacgcgcctggcttcctgcagtgcgaacctgggaaatccaggcgacttcgcagttgccgaagggatctgaagaagtgggatgtgcaaaagcgccggctggaaatcccggctgtgtctccgtcaactctttacgcaacagaggtctccccctgcccttggtttctaccgggccgcctgctcccactcggcgaaaaaaattacacaacagcagccgcggcgatgacgtggagggctgccgcctccacgtgcgcggcgctcctgattctgctgtgggcgctgacgaccgaaggtagggggcggctggggtgggctggggcgggggctcctggcgccagagggtcctcgcgggtcggctccctagcatcccgccaggggacctcaacttcctgggggctgagagctctattttcttttctatttcttctcctttttttttttttttttttttgagacggagtctcgctctgtctcccaggctggagtgaagtggcgcgatctcggctcactgcaagctccgcctcccaggttcacgccattctcctgcctcagactcccgagtagctgggaccacaggcgcccgccaccatgcccggctaattttttgtacttttagtagagacggggtttcacagtgttagccaagatggtctccttgacctagtgatccagccgcctcggcctcccaaagtgcggggattacaggcgtgagcccccgcgcccggcctgggggctctattttcaagcgtccctcctttgtgagaagcggagtccccgatgcaacaggtttacattgaaggcctgccctgtgcagggtcgacacctgtgagagcggaaacggtgcttccttggatgtcgcgcgtttggtgcctcggtatttggcgcctctctcgcatcatccgaggggccggaggagagaagaaaatcagggaatcggtaaattggaaaaatcattcatccgcatatcagtgggtcctcctggctttgctaagttaggtctttactgagagagggaggggagtgttttgatcttgtggtgaccttcaaacgttctcttgcttttttgggaactcgtatgggcgtgttctgcgttaacttaaacaggagactaaaaggctgaaacgcgtatgtagagatatttaaactcatttctaactagaagaatggcaattaaacaacaagatgctgcttgacccttactaggctggccaaaatacgctcctgggtgccgggtggtggaggtggaatgtaggaatcccggaggcgcgctctgggcgccccgagtcactgcaggtggaggagagccg

SEQ ID NO: 5565 - DNA, 6000 bp, Homo sapiens
gttgtgagccccctatggaagccataaatgaaatttaaaattgtctaggagccacataataaaagcgaaaaaaggtaagtgataattttaacattgttttagttaattctatatattccaatactgtatttcaatatgtgatcaatgtaaatcctactgagatcttttacattcttttttgtattaagtgtttgaaatccagtttgcattctatagttagagcatatcacagttgaggacagccacatctcaaatgctcaatgtcagaagtagctcatgactacagtactgcattctgcagatctatgcagttcagtgacagctttcctcatcaaattgatagaccaagaataggtttatacatgtaataaatctaccacctttttttttccagttgagaaagaaaatgaaatgtgactatgggaaaacctggccaaaatttatattatatgcccttacattatatgctcttatgacactatgtgatgtggtcatttgttaatttaatactcatccacatctcaattatactgtgagctccctaaggacagggaattggttttgttcactgcagaaatccagagcccacaacagtgtctggcacagagtgccagacaataactgtttgtcagataaataaaggaatgagaaggagtccttttgcttcatacaacaaccctacaaggtgggaacagttcttatgttcatttcacaggaaattgagactcagagataaactgagtttctcagccatacatagctaggaagtagtgggacccaggagcccaggtatatcaagccacctcaaagcccattctcttagttacctgagtctgtggcctcctgcttttatattgggggtagaaactgtgtgtgcatgtgtgtatgtgtgtgtgtgtgtgtgtgtgtgtgtgtgtgtgtgagatgtatttgtgagggactcagtgatcttccaccaggcagcttctcagtaggcagtttccaccacccactataatttggagtagagtaagccttccttggctgaatcctcaagtgaatttctattttcttctcttattggagagaagaatgaaaatcggatgaagggaagagagagcagagaacaagaaatatggaaccatagaaaccatgagtcacagaagtgactgggggagtcgaacgtctccaattatctctgcttcttatgaagtgaatgaagctaaggcagacttggtgtcagtaaactttttgtaggtaaggttttttttttccttggtccttctagtgtctctgctccttttatcttcttgtcagttgccacatgttcctactcttattcaagtttaaatattttttttgaaagtttgaaaggtctgcgtcttaggtgctttgtgagagaggtaatgatattgacgattaaaaaaaaacctgtgataacaaaactaacatatattgagtgcttactatgtactaggcaaaattctaagtgtttcccatgtactaacttatttaaaagatcctatggaaccattaagtcaaccctatggatgaccttaaaggcagatatactagttatctattactgcatgtgaattatcctgaaagtcagtggcttagaacaggaatgaacatttattacatctgccagtttctgtgtatcaggaatttgggggtatctgggggttttattccagctcaccgaaaggtcaatcatatgttagccaagggtacagtcatccaaagactttactggggctggaggatctgctcccaagatggttcactccaaggctggcaagagagcaggaagctcagtttcttcccacatagacatatccacaggggtgctcgagtgtccttacaacatggtggctggcttcccccaagacaagtgatcaaagagaacaaagaagaaactgctatgtcctttttgactcagtcttggagttacctactgtcacttccacaatatccattggtcacatatggcagccccattcagtgtggaaggacactgcacaaaggcatggatgctagaaggtgagaatctttgagagccatctcagaagctagcttccacaacaattgccttgtagtgtgtaccacgaccacacaaaagctaatgtttctcgagcaattactatgtgcaaggtatcatgccagatactttatatatgttatctgtttaaatcctggacagcaaccctaagatccaggtgatactgtaatccccattttacagataaggaaactaggactcagagaggctaataacttgcacaaggtcacagagctagtttgtggcaagtgaaatgagcataggagcacatctcagacacaccacaagttcagtttatgctattttcacctgtaatgttgcagaggctgctgtggggagtaaatgagaaaatgtttgcaaattacagagcattgtatggaggcccacagagagacgacattctttcttccctccttcagcaatgtgaaaccgtgtcagaagcacacatgcatggtcagagtgtctcttggtaaataagagacataaagcactttgttttttatttttattaaaccaatcttaaaaaagattgattggctccatagacctaaacgattagcactgaaacctctcacatttcctggaaactgaatgttttgcgcttggaattctaaagaactgggaaaaaggagagtaataaagtataaagaatagtttcatctcctacccagcttatacggtgaggaggaggttggcagtgatttagtataagtataaaaacaacagtcgggccgggcacggtggctcacacctgtaatcccagcactttgggaggccgagatgggcggatcacgaggtcaggagatcgagaccagcctggccaacatggtgaaacccccgtttctactaaaaatacaaaaattagctgggcatggtggcgggtgcttgtagtcccagctacttgggaggctgaggcaggagaatccctggaactcgggaggcggaggttgcagtgagccaaaatgtgccactgcacccagcctgggcaacagagtgagactctgtttcataaataaataaatagataaataaataaataaatacaacagttgaccttaaataaggttttacattagtccaaatgatttcaaagacattaatatatttatatttaaaagtgtgtgtgcctgtgtgtatgtgagagagagagaacgagagagagagtcagagtcaaacttgcaaagtaaggaagttgatgtgtccaaagaaacctaaggaaataagaactatagcagtgggtcagttgcattatctttccgtatccctaatgtttggaggcaaatgagcagctgtaggagaaattatttgcttatttgcctcctcagatattattatcaaaggcaggaggcctcttcccaacaagcttcccggaacaatgcacatacccacatgcacaggacattttgcataaaattttaagggctttaaaattctttgaagcccatgggacgatctccataatattcatcaatcccaggataaaagccccgaatgccaaatcatttagataattgatttatattttccatgtgtactatgaactatggaacttaacctttcctccctcacatcacattttctcattaccttgaacaatcattggtatttttaaattttgacctgatcctttttagcctttatgtttccagactacagcacgcaattacagagtaaagtaattgaatcttaacacccttgagggtgtctccagggcatcccaaaatctgacgcaggcatcccttttataactgcccctgtacccataccttcccctttctttcagccaggtggagtttgtgtaaataaactcaacccttttgaggggtggattttagggatgcagttctattgttttgacaaatgtatacagttgtgtaactacctctataatcaagattagaacagtcccactgcccccaaaagttttaatttattgatccatttatcaattgatggacacttgagttgtttccagtttttggcaattatttgcgttagtcttttgctttttttgggtgggggatcagagagagtggagcacagaagtgtcatccccttcttccaccatctaagtcttttggggcttttcaccagtgccctctggaagcaagtgcattggtgcagctatattttttgcatttgggtatctgcctttcatgaccttttcctttttttaattttattttttccaaattgggtcccaaacgttcaacaggtcaaggtggacactatgcagacaaaataactcatgtggtccacgctgtgtgcatggtaggtgtcagctgctcttaccggtggctcccggatcatcagccttggaatcagccaccatgttgttaaaaatgcagaatctcaggctccacgccagatctactgaaccagagtcagtattttaacaagatcgtcaagtgtgccggatgcatattaaagtttgagaagcactggtattccacactcgctactaaaaatatactacaattttctcataagatttgaccctttattttaactttttctctctcggtagtaaactcactttgtagtttgagtaaagaactcaagttttggtctgggcgctgcatctcgctgggtgtggaagcaaaggcagaaatgagagggacaaaaggaagcagagaacagagcccaggctgttagaagatcctcgcggccagacctgggaggctgaaaggctgagagaccgaaaggctgaaccctccgccgcgctcggcggcccctcggagtcaggacacccagggtaacatgcgggtggccacgcgcagcccaggcgcttgcaaaacttagcggagccgggccggggccgggcccggggaaggcgggagggaggagggccaggcgggagggcggggacggcgcggcgaggggcggggtcagcgccgaggccgcgggggcagcaacgacgccgggcagcgggagcggcggccgcgccatgtggctgctggggccgctgtgcctgctgctgagcagcgccgcgggtgagtcggggggcggccggcgaacttcccgcggggcgcggggcgcggggcgcggggcgcagcggccgggtgcgatcgcgtcctctcccgggcgcgggccgctctccgggcgtgggtgagcgcggagggcggaccccggcgccgggctggcccggaccctgccgaggggccgccgcggggtgcgagccgtcctattgtgtgggcgtgcgcgccgggtcgtgttgtgctgtgtgcgcgggcggggctctgtgtgcagtccgggtctggggagcccggcggctgccccgattgggcgtagctcgagtgtggctgtgtgtgtgttgtgtgtgttgaggaacggaggcggggaaaggaaaggagaggagaggagagaactcttccctggtctcatcttcccagacgcctggtcgcgcgcggctgcgttagcctcctctgggcctcttcccgagtctctggcgtgcactccgtgcctcagtttccccacctgcaccgcggagggagtagcaaagctgcttcctttcattcctctctgggactgtttggtttgggtaaagtgagttgaagcaaggccggatctgggaattcatttttccccactgatcctgggaaccgaagctttatttaagacgtctgaccaccctacttgccccgcgatgggcgccctgaccggcgaggggccctgggagaggacacggggcttcatccggcggccctttgaacctggcatcaccaccgcgtgtgcatcccggggcctggaccgcagcaagcctctttcccttccagacagcgtgctgttcccaggaacttttctgctgatgtgggcatgatccgaattccagcctgggagcccttcctcctctgcccctgcccgccgcccacagctgtcagctgtccctcctggactgggcccgcccttggccccttgacgtttatttctgggcatctgatgcctagaatgtgggtgac

SEQ ID NO: 5566 - DNA, 6000 bp, Homo sapiens
ggcttcaaataaatttgcaatgaaaaaacatatttttaaatggctttctattttgctgcaggaaaggaaaacaaaatctcgggacccaaactcactaagccaaagggaaaattcaagctaggaattgggtcacccaaacctgcctcccattttgttcctaaatagatagctacaaaaataaaaagctatataactccctaacaatttgctcacaagggaattctttgtgagccccaagatcttcaccctaaaacagttctgctgaatgacaccctgatgatgtaaattgacagcttatcatcacaggtatgggagaaaggacagaactataagtcatccctccattcacctgagacaaatgcatatttgactgcttatataaaaatccagattcactaagcatgaaatgaatgcataattaactattcctctaccccctcctttcacatgtaaaatgcagattcagtgaatgctgatcaaagactcaaaggaatgcaaccacttgcctcttttatctaccctccctttttttcccttttctctttcccctaatgcccacacttttccctttaaataatgatgtccccagacgcactttggaaaaagcacgaatcacagatgtttcctatggttttctgttccttttttcctggatgtgtcctaaaccttagctaaataaatctctaaatttttgactgaaagctgtctcaaatattttttgggttacagcagctattgcatctagatatacaatataaattaatgtaaaatatcatatgcttgtaatttcatacatgctagagatatcatcccaatcagggaaagctgcaagaagaaagtgttggtggtaaagcacaacttcctagatttttgctgtcagtgggctggttggaatttaaactctttgagtattaaaaacaaatcagtcttcataactgattatttctgctattattgttacctattggagcctctaggaaaaaaagaggcaatagagaaagagaggcagtctccgttgctaatgtgctcttgtgggattagatgtctgatcctttggagcagaccatccatcctgatgtgggtcagtttggactccaagtctgacaaagcagaacaggcttcagaaagccttgtttgtcacttggaatacagccgtcactcctgcagcatctaagctttggtgctgctgaagaaaggccactggctgttttggagtcctgcattcacagaccccagctgcctggaactgactctaagctaaaacctgacactatctaccacaagctgtttcaacctcagcacaagctgcaatgaactggaagtgtaagcagacagcaagggtttccagggattataggaatttaatcaactcagcaatcagccttttacagcctaccatcctgtagcctgtttcttcctaaaccttgcatagaatgcagtcatgtggttggttaaaaccagctcctaacagatcccagcaacctacagatgaatctgagtgaactttcctcattaccatgctaaagtctccaccccggaggagctacagcttcattaccatagcatgcaacctatgtgttggcacgatgactcactgcatctgtgcaactgggacccctcctctgcatgtgccgatgcaccctctcccctctccatcacccataaaaccctcctgtcacttttcgtagggaagactgctttggagaatcctcacagtgtcctccttacttgtgccaagtaataaaactgctattgatccacacctgtgttctcatgaaaagttgtttgttactaaacgaatgatccccgttttttttcgagtaacagaagtgggcatgtatggtttcttctgatagcaaccaaatacatgtcatttgtccacatcaatcagtcctgcaattctccaacactgaccgcatgttcaacaatccgactcaattccgacgctaactatccagagttaggctcagcctccacaggtaaagtctccaggctcagcaacaaatggagttccctggctactcacatttctacctggctgactacaaatggtggagaccccctaaatcccctttaaatttgataattccctagaacaacttccaaaatttagaaaactgctttacttatgattgtcagtttattataaaggatacaactcagcaacagctacatggaagaaactaagaagaaactaatatggggggcagtgattgtgcacagcttccattgttaaagaaaaaattatctaatgatacaagcttgatatccactgcactgggattttgcagcaagagagagagatggggctcaaacttgaacacagcacgggcaagtgggaattcataggcaaggagaagcatacaggtcagtggatgcaaaattacaaagaggaaacctcaggggcaagagagattctggttaaaccacactaacaggattcttgctgaagacaggccggggtgatcagacatcacctggaggacagtgagaaggatgaacccggtcagatattgagggtgggaagttcctgctaaactgacttggcagggtcctttgctaaaattagattttacaaggaagtacagatgtgcctaggaagaggtttgggaacctgactaaaatgtggtcacacagagaatctttgccaccatgccctctccagccaggccagtctcccaccacatctgtgttcacctgccccaaagctctcccaaccccgtcatgtaggggtttctacggaggctgcataatgtagacattactgattaaataatggtgatcagtccccaacctgaagttatccagctctccctcctcaaccaagagccacctcattagcataaactcagatttgtttgacagagactccttctgaataacatgacatcctatcactcaggaaattccaagggtcttaggacctctgtgtctggaactggggtcaaagaccaaaaatatatttttttatcatgccacataaggcataaataaacttttattatgctacaaggcataaatttatttaaaaataaaaatttttattatgccacaaggcaaaaacccagactctgggattgttgaatgcagactcttgtgggggcccccttaaagagttttgtgatcctaaatatttcaaaatggagtcacttacgacaagtgactcagcccacagtgaaactgctgaaccctcaaaatgataaacataggtataaaggactgaggtaataagataacatctgctgtggccagacacccccaagacctgatgagaaactgaaaccaaaaggtggctgagataatgaccatggacactcctgcagagggccataaaaacagcaaagaaactgaccacggcaagacacctgtagaagctctgcccgagaaagctctgaggcttcctcatgatatccacagcggtccctggaagctctgcccaaacacagcaacatcgttcaacagtgttttgagtgaaacccagaggcatgctaacctaaacaacagaaatgggggttttttgttttgttttgctttgagacatggtttcactccagttgcccaggctagactgcagtggagcaatctcagctgactgcagcctgacttctgggttcaggcgatcctcccatctccgcctcccaagtagctgagagtacaggcacatgccaccatgcccggctaatttttttttctgtatttttagcagagacggggtctcgccatgttggccaggctggtcttgaactcgtgggctcaagtgatccacctgtctaggcctctggttgggtgtgaaaatatggcccagttctggccaatggagaagggaacaggtcatctggggaactgtgggaaagacttaactccctgaaaaaaagacaaatgagaattatctttccctccatcttttgggcatagccaggtaaaaatgggccactcaaggctgctacagccatgggagtccctgcagggcaacagtgcagacccaggaccagtgcaatggagacagcctgctgagtccttggtgaccttggtgagccactaaacccaacctgagtcaccctcttcctgcctttctgttaccgagacaatgggtgtccaggctgttgaagcccttttgagtttagttctgcttcttgcacccaaatgcattttaatggggccatgagctcccaggctccacatggtctaaggtacccctcacctccagggcatccccatggaatgaaacaccccctctggccttctcccaagacttctggcccaatattttctgggtgtctttacaagacaatgtcctatggggtgcactggggattgacatctccctgcctccgaatgcctccccttcctggagtaggaagagctgcccagggttctttttagaagagacctttattttggccaggtgcggtggctcacacctgtaatcccagcattttgggagaccgacggggaggcagatcacaaggtcaagagatcgagaccatcctggccaacatggtgaaaccccgtctctactaaatatggaaaaatgagccaggcatggcagcaggtgcctgtaatcccagctacctgggaggctgaggcaggagaatcacttgaacccgggaggcagaggttgcaatgagccgagatcgcaccattgcactccagtctgggtgacaagagcgaaactctgtctcaaaaaaacaaacaaacaaacaaacaaacaaacaaaaaagaaaaaaaaagaaaagacctttatttctcaagcaagggcagaaattcagggctccccttcgactctggctgctcccaaggtggctttaaagcaccaatgagtccatggcttgtgtaagaaatgattagtccttccatctagagaaatagctcctttttaaacagttgtctcttttaaacagtgtttagtatttaagtgaggttgaaacagtgtcaaaaggaaagtgaaagtgaaattctctccttcagcataaaagctgatccacaaacaagaggagcaccagacctcctcttggcttcgagatggcttcggtaagtttcccagggctttgcattactgactctacagcagttgggcagctccccctaggaaaggcctcagtccaggctcctggccttgggcacacagctccagagctcgtctttagaaggctgtcatggaaaactgtatttgtcttttaaaagtgcatctgcccagctggacagggagtcctctgggcagagtccacctcctctgcgtaactggcacagtgcggggagcccgggactcccatgtagtagagagctgtggggtgccgggtgtcaaatctacctcagcctgaggagaagccagagtgtgggcaggtgggggactctgggttgtgggaagcaagcaaatcccaacatcgtctgcttctgctgtgactggggctcagtcccttctcggccccaaacgatgctttctctctcctcgttcctctgtggcatcatccagccttctaaggtgcattctaatctcagcagctttctgaaaactgaaatttctcctcctatcagcccagatgtaccgattggcagaagctctagggagagcaggctgagctcggtggtgtgtgactaaaaaggaacagcggggctcaggctattactagaaacaaaaccattccgggaaggagtcctgcaaattctggagggcagcccactccaacagcaccacctgatcctggggaagggctttactgctgccaaaacaaatcagggcttttaacagggagcccaggccaaagctcatatctcactggccaccagctgaggttgccagtaccttgactgtggttttagacattcagcattgcagttaaaagcccctctctctccccacatggaaaccatctcctgtggtgccctgacatacagaggaggagctgggagggagtcctggccctgctcctttctcctccctcttccttgtctatttccttgccccattctacgccaggcccttcactgggtcctggaggt

SEQ ID NO: 5567 - DNA, 6000 bp, Homo sapiens
cgagggcttcgacgaggagggccgcaacattagcaagacccgcgggtggcacagcccggggcggggctcgttggacgaggggtacaaggccagccacaagccggaggaactggacgagcacgcgctggtggagctggagttgcaccgcggcagctccatggaaatcaatctgggggagaaggacactgcatcccagatcgaggccggtcagtgtggcctcgccaggccgtgggcacccgcagggcaataagctggccagggactcaatttctggagctgtaaaatggggggaagctgatgggatccaagtttctaggattctctgggagaggcgcccgcgccaatctttcgccctttaaatccgccaggcattcttggagcgccccctcccgggcaggcgttgtaacaggcctttcggtcgtgacgcgcagagtccggggaaggacgcaccaaataaattgcgcaaagaccccgtggtaggacctgcggggtttttttgttttgtttgttttgttttgttttgtttttgagacaggatctcactctgtcgcccaggctggatggagtgcagtggtgcgattatagctcactgcagttcaagtgatcctcccgcctcccacttttttttttttttttttttttgagacggagtctcgctgtgtcgcccagactggagtgcaatggcacgatctctgctcgctgcaacctccgcctcccgagtagctgggattacaggcgcgcgccaccacgtgcggctaatttttgtatttttagtagagacggagtttcaccatgttggccaggctggtctcgaactcctgacctcaagtgatccgccggcctcggcctcccaaagtgctggaattacaggcttgagtcactgcgcccggcctttgttttttagagatgacgtcctgctttgtcacccaggctggagtgcagtgttgtgatcatagctcactacagcctcaaactcctaggctcaaggtatcctccaacctcagccacccccaccaccccgagctgggaggacaggccggcaccatcctgctcagctaattttttattttttgtagagaaaatttcgacatgttgccccagctggtctcaaactcctgggctcaagtgatcctcctgcttcggcttcccaaagtattgggattacaagtgtgagccaccatgcccggcgagacctgtgtttttaatggaatcatcccaccagttgcaagagttaactccttgtcttatgatttgcgctggttgaggaggtgtacgtctttccattagtcagttgctggttacaatttctaagcccctactacgtgctgggcactgtctggcaccccctcaaactacttcatcagagagtaagaaccaataacagtataacaatggttacatattgagcacttgctgtgtgccaggcacggggcttcccctggattgtcaccttcaaacttcacaacctccataaagagctatttattttttatttatttatttttattatattttttgagacggggtctcactctgtcgcccaggctggagtgcagtggtgccatctcggctcactgcaagctctgcctcccaggttcacaccattctcctgcctcagcctctggagtggctgggactacaggcgcctgccagcacgcccggctaattttttgtatttttagtagagacagcgtttcaccttgttagccaggatggtctcaatctcctgacctcgtgatccgcccacctcggcctcccaaagtgctgggattacaggcgtgagccaaccgcgctcggctatttatttttgagtcagattctcactctgttgcccatgctggagtgcaatggtgcgatcttggctcactgcaacttccgcctccccggttcaagcaattctcctgcctcagcctcctgagtagctgggattacaggtgcctgccactatgcctggctaatttttgtatttttagtagagacggtgtttcaccatattggccaggctggtcttgaactcctgatcttgtgatctgcccaccttggcctcccgaagtgcctggattacaggcgtgagccaccacttggccaagagccaagagctgttcttttttttttttttttttttagtttttttttgagacagagtctcacttcttcacccaggctggagtgcagatgtacgatctcggctcagtgcaagctccgcctccctggttcaagtgattctcctgcctcagcctcccgagtagctgggattacaggcacttgccagcaagcccggctaatttttgtatttttagtagagacgggggtttcaccatgttggccaggttggtctcgaactcctgaccttgtgatccgcccacattggcctcccaaagtgctaggattacaggcatgagccaccgtgcccggccaagagctgttcttattaccccattttactgatgaagaacttgagggtcagagagtgtcagtcactggtcctaagtgtcacactgtggggcagtcattactggaaccatgtgggtggggctctaaagcccagggttgtaacctctgtcccatgctgaccccaaggctgcaccaggagctggtctctgaaggccattccctctcacaaggtgcctacccatctcctgtgctccagggaaggcccaggagtctgcggatgactaacccttttttctcttctcccagaaaagtcttcctcaatgtcatcactcaatattgcgaagcacatgccccatcgagcctactgggcagagcagcagagcagggttggaggggctggggagactgggcgtttcggtggggtaggggataggcaaattgggggttgataggatatgaaagttgggggtggttggcagggtggaggggcaggcaggctggttgggggtttgggggccacagggaggaggtgggggcatttcagctgtgggcagagatgaagtacctggacgcctaagcctcttgctgcttctccagctgccactgcccctgatggaactcatggagaatgaagctctggaaatcctcaccaaagccctccggagtaagctccccgccaacccccaagaactcccacgacagattctggtggattttgcagggctggggcccaggggggtggggtttcagggtgccttatgtcttgtcagatgcccttggcactcacaagtattccaagggccccataaaagttaaaagctgagggactgggcacaggaagacccagtgggggacatgtggtgatgggcagaggcctgggctccaggctgagtgcagcccctctccagctgagggaggcttttctgtggctgtttctccacctgcacagtgggatgaccgccttggtgtggcctcgactgcctctggttggggagttgtgaggagcctttggacagtggattatgtgggtgaacttttgctgctgtggtaggaaagcccagcggtgataaagggccagctgatggcttagagtgggtggctggtccagaaggtgggcaaactgctcgctaccaccgccctagttcaggcctgcaacctcttccctagccttgacctcatccatcctccaccttaacactcagcacccttagagatgcaaagttccccaggctaacacagacctgagtgccctgcgctactgctacctcgaatcatctgcggttcctcgaatcacacatgcggcgccccctggtggggagacctttcggttgctcactgccctgagccgagctctgccctcctcctaggctaccagttagggatcggcagggaccacttcctgactaaggagctgcagcgatacatcgaagggctcaagaagcgccggagcaagaggctgtacgtgaattaaaaacgccaccttgggctcgagcagcgacccgaaccagccccgtgccagcccggtccccagacccaagcctgaccccatccgagtggaatttgagtcctaaagaaataaaagagtcgatgcatggtccgtgagtcagtgcaggacagcccgcgtgaggcggacgcacgtggccccgcccttccccgtgaccttcattcggtcaccgcagtgaccttcattcggtcaccgcagtgaccttgagctttctccgtccgggccctatcggccctaccttccgggactcgcaatccaggacttattgcatgttttaagtcggcttcacccaccccgagttccgcagctctgtggggctactgggtctacggttcgagtgctcagttggtgtcgctttgggggaagggggtagggggaacggggcagcacctccctcctcgcgacggcgcgctaggctccgcccctcaagcataggtagcaggtccagcctctccgctcgtcccgcccttgcgttttcatctgtaagtggtctcttggctccgcgactgcagcctgcaccgcctcgcccactcctctcgcgcgcagcaagccccgcctcctccgttacgaaagagcgcttctggccccacttgctctcggctctattgtccccgccctccgcgtctccggccccgcccctcccaggggccgcgtacgcatgtgcgccgcagtggctcggcgggctgcggggcgggacctgcacgaaggcccgcccactggcgctgccggctccgccccgactcgtccgggcgcgcaggcgccgcccgccccgctggtctgattagcataggaccccgggccccgccccctgctttgcatgcgcacggccggccccacccccgctgtcagctggaggaagcggagtaggaagcggccgcgatgtccttttgtgtcctacaagcagccggcggcgccgccgagtgaggggacgcggcgcggtggggcggcgcggcccgaggaggcggcggaggaggggccgcccgcggcccccggctcactccggcactccgggccgctcggcccccatgcctgcccgaccgcgctgccggagccccaggtccgggggcggaggggagcgctgccgcgggggtgggcgggcggggcgcgggggccatgtgcgagcgcggcagggaggcgggcggggcgggctgcaggcggggtccgactctggggccagtccgggccacggttgggacccagtcgagggtcggactggtcagggttcaggcgggatccggcgtccgagtcctggtgggccggcctggggcaggatctggctctggctgcgggtcctgactcgggtcagggttgggcctccgatccagcccgctccggggcagggttcaatcccgcatttgccgaagtccctggggctggccggggtggaagacggggagggctctatgtctgggaaggggctctgaagaccacgtgggggcgctcgaaggggcctggggccaccctcctctctgggtcaaaggtcatcgcaccggcaggggagaacttcctcctccttggctctccccacttacttcctgataacctggtagaggtctcccgcgggcggggagggggaggcgtagcaactttaggcaacttcccaaaggtgtgcgcaggttgggggcgggacgcggcgccccgggaggtggcggcctctgcgacagcgggagtataagagtggacctgcaggctggtcgcgaggaggtggagcggcgcccgccgtgtgcctgggaccggcatgctggggcaggagggcagccgcgtgtcaggtgtgaaaagctctggaggtgttttcatgagtccgtgcctgtgcgtgtggatgtggggagacctagtgagagtgtgtgtgatcatgagccttgactgagttcgtggatggggtgtgcgctccaggagaagtgtgtgagcacaagtgtgagcaggagtgagcacgggtttgggaaggccggtgcaagtgtgaaagccctcagcagagagcgagcctgcgtgggcttgtggggctcctgagcaccccggtgagtggagtgtgtgaactcggtgtgagcacgtccactggccttgggtctgctctccaatgcagaatacccagatgagggcagggt

SEQ ID NO: 5568 - DNA, 6000 bp, Homo sapiens
tcatggcggctgaggctggggagtcccacaatctgttgtctgtagctggagacccaggaaagctggaggtgtaagttccagtctgaggttaggagattggtgtcctagctccagcagtcagacagagagagaaaacgctctcttccttcacctttttgtgctattcagtctctgactatgatgctcacctgcactggggagggtcctctgctttcctcaatctatccattcaaatgctaatatcatctgaaaacaccccaaagacacacccaggaataatgtttaatcaattatctgggtaccccataacccagtctatacttaaaattaaccatcaagactatatatgcatttatagaaaaatatatatgaaatgtatctaaaaacattttaaatttaaaagtcagccctccctcagagtggtctcaccccacagacaagggagtttaccctccaactcccatcaggcattggctgagagttgcttcaggaggtgttaactcgtcacacttctggccttccagatgcataggctggacgtactcctgcagccaggggaagccccaaacaaagttgcaggtatatgtgtgagataccttgatcagggatgtgggggatgggggcagagcactatcagacatgttgcgtttttgcaacaatgggcataagaaggatatttgaaaatctttaagcacactattagtggttaagaagacctattgatttttggatgcccatcatgtgctgaataccatgcccgacccccaagtgcatcatctctaggtgttaccatgattgtccctatgataaagcaacccatgtgtctccgtgaattctgcaaactctgctgaaaatggcaaaatggagttggggtcctctgtgctggtgacatttagaatggaaagcaagtgctattttgaagatgactcagtctgaggaggcgctagttttctcaagcaaacacttttgtaacacccttccagccaaaactctgagctaacgtagaagggtgagtcctgtctttctctttgctatccactttgcatgtggcccagcagggatggtgacattgctgagggtggacaatctatacctgtcctcttctctcccaaactccaaaaatgtaagcgccctaagggcaagaggtctttatttattttgagacagggtctgtctgtcactcagggtggagtgcagtggtcggctcactgcagcctggaactcctaggctcaagcgatcctccctcctctgcctcctgagtagctgggaacacaagcgagggccaccgccacgcctggctaattaaaaaaaaaaaattttgtagagacagagtctcgctctgttgccgaggctggtctgtaactcctgggctcaagcgatcctcccacctcagcctcccagtgtttggatcacagccgtgagccactggaccaaaaaaaaaagaaacctaatatacaaaacaatggcagggtgcggtggccctagcactttgggaggctgaggcaggcggattgcaggcaggagtttgaggccagcctgagcaacatctttttcttttctttctttattttattttatttattttttgagatggagtctctgtctgttgcccaggctggagtgcactggcacaatcttggctcactgcaacctctgcctcctgggttcaagcgattctcccgcctcagcctcctgaatagctaggactacaggcagatgccaccacgcccagctaatttttgtatttttagtagagatgtggtttcactatattggccaggctggtctcgaactcctgccttgacctcccaaagtgctgggattacaggagcgagccactgcgcacggcctcttttttttccttctgagacacagtcttgttctgttgcccaggctggagtgcagtggcacgatcttggctgactgagtagctgggattacaggcggatgccaccgtgcccagctaacttttgtatttttagtagagacggtgttttaccatgttggccaggctggtcttgaacgcctgacctcaagttgtccgcctgcctcggtgtcagagttgcatgaaccagagcaactctatcttgaatagaagctgggtaaaatgaggccgagacctactaggctgcattcccagacggttaagacattctaagtcacaagataagataggtcggtacaagatacaggtcataaagaccttgctgataaaacaggttgcagtaagaaagccaactaaaacccaccaaaaccaagacggccaccagagtgacctctggttgtcctcactgctgcactcctaccagtgccatggcaacggcaggaagttaccgaatatggtctaaaaaggggaggcatgaataatccgccccttgcttagcagatcatcaagaaataaccagaaaaatgggcaaccagcattgagttcctttactttcctaacaaacttgctttcactttatggcctcgccctcaattctttttttttttttttgagacggagtcttgttctgttcccaggctggagtgcagtggcctgatcttggctcactgcaacctccgcctcctgggttcaagcaattctccagcctcagcctcccgagtagctgggattacaggcgcgcaccaccacgcctgcctaatttttgtatttttagtagagatggggtttcatcatgttggtcaggctggtctcgaactcctgacctcaggttatccacctgcctggcctcccaaagtgctggactcgccctgaattctttattgcacgagatccaagaaccctctcttggggtctggatggggacccctttcctgtaacactgggattataggcgtaagccaccatgttcagccacctttgaggcaggaaaatagggtctggaggcagggaacatataaggctgattcacacttcagttatgacaggaaatatcctctccttagggagtacaccctaaatgactttgtaactttacttcatcctcttcatttacatatggcatatcccaaataaccaatggaatcctccaaagggtatttaaactccaacaaattctgtaactgggcccttgagcacctatgctcagccggccccaacactggagtgtactttcattttcaataaatcgttcattccttccttgctttgtgcattttgtccaattctttttttttttctttttctttgagacagagtcttgctctgtctggagtgcagtggcgcaatctcggctcactgcaagctctgcctcccgggttcacgccactctcctgcctctgcctcccgagtagctgggactacaggcgcctgccaccacgcccagctaattttttgtatttatttttagtagagacagggtttcaccgtgttggccaggatggtctcaatctcctgacctcgtgatccgcccgcctcggcctcccaaagtgctgggattataggcgtgagccaccgcgcccagccgttttgtcccattattttagatgccaagaacctgtacaccctccaccggtgacaccttcacagttttgaggagtattcatggggtattttgtaaaatgtttctcaattgggatttgtctgatgtttttctcatgattagactggaggcagctgggattacaggtgtgagccaccatgcccagtctccaaaccctgtttacacaaaaattttaaaaaactagccaggcttggtggtgcgcgcctgtagtcccagctactagagagcctgaggtggatcacttgatcccgggagggggaggctgcagtgagcggagattgtgcctcgctggctgcactccagcccgggcgagagagccagaccttgtctcaaaaaaaaaaaaaaaaaaaaaaaaagcctaatatggctgagggcggtggctcacgcctgtaatcccagtactttgtgaggccgaggcgggcggatcacgaggtcaagagctctagaccatcctggccaacatggtgaaaccccgcccgtactaaaaatacaaaaattagttgggtactcgggaggctgaggcaggagaatcgcttgaacccgggaggcgggggttacagggagctgagatcgcgccactgcactccagcctggcgacagagcgagactccgtctcaaaaataaatatatacaaattaaaaaagcctaatatacaaaataaagctaggaatcttccctgagtcctcttgcctacggaatgaagtccacagacttgggggagcgttcgaacccttctaaggccacttcctttctccagcctctcgcgcccagttgactcccggcaacacctcccgccgccacaaggagacgcccgaggacttccctccgacaaagccaaaaacggtattgccacgtgacccgctccgcatacacgtgaccagcttcgcacccggtgggcgtcacgtgacggactcagtagaccgccactggctgtgcacgttatggggtttccacctagggctcggcctgaggcttgtaacactccgttttcccccgagtcacaggggcagtcttgcccctcgcagctgggtcgcggtgtctctcaaaggtccccctctacaggggcttcgtgaggcccgggcccacagggcgctcggtcccggaagtgacgtctcccagaggggccggaagtggcagtggagggagggaagatggcggaggtggtgagtccggtgcccggggcggggcggagggagccaggggaggtgggtagagcccgaggccccccagtagccgaccctggcgtcgcgctgtctccccagggggagataatcgagggctgccgcctacccgtgctgcggcggaaccaggacaacgaagatgagtggcgtgagtgacgttggggggcgggactaaggaacctgagggcgaggggcgggagtcaactgaaatcccgggatggggaggggcgtctggaattatggggcgggcgaggcgcagatactttgatgaaggggcgtggctcttagctgctccgagaggtacagggcggggcctggaaaggggtggcacttgtgactgaaggaggcttaggagagacctaagtgctggagcttagggatccggcctgggggtggagttcaggtcgtggaagggtggagtctcatagcctggcctgtctaaggcccctgtctatgctattctcatagccctggccgagatcctgagcgtgaaggacatcagtggccggaagcttttctacgtccattacattgactgtgagttctgggcctgaggtggggcatcagggtagggttgggggacagtctttggcattctgtcctgagccatccccactgctacagtcaacaaacgtctggatgaatgggtgacgcatgagcggctggacctaaagaagatccagttccccaagaaagaggccaagacccccactaagaacggacttcctgggtcccgtcctggctctccagagagagaggtggtgagtaggtcccccacttcaccttttctctcctgcctcctatttctcttgtctgttggcattaggagctcctggatgggcaggaggcggctccctctcaccctgacttcatcttgcaaaggatgggggccaaattgcacatgtagctcccagagtccagtagctagtcctgtgtccttcagaaggcgagggtggggtttgataattttgaggtgagggacccctcttccccttccccatcccactgccatccccgccccaaaggaagaccctggacctatctctacagccggcctcggcgcaggccagcgggaagaccttgccaatcccggtccagatcacactccgcttcaacctgcccaaggagcgggaggccattcccggtggcgagcctgaccagccgctctcctccagctcctgcctgcagcccaaccaccgctcaacggtaccctcagcaattccagggaccttgctttcttctcaggtcccaccttctctaccttctgacccacctttgttggtttctctctgcagaaacggaaggtggaggt

SEQ ID NO: 5569 - DNA, 6000 bp, Homo sapiens
gctgatcggcaaaggaattatcacatgaacacaaatacttattacattaagtcactgcaggtagacaaaaacaaacaacagtttcaaatatgagcctttatcaaaaggcacaagagtaactgaattttatgtgccaatgtgccatcaggtatttttttcacaccagtgatgtcaagtaactagcaaaagggtaaagtaaaaggagatatttaagcaattagttaaatctcctgaaccaaatgtgggatagccaactagtacagaatagccaccatagaatattttttaaagtatagtacatgaatctatgtatcatgcaaacaaagagaaaactcactattcctgcactttcatctaactacttgctttcatggacctaaagaatagatccagtctcagtagtgtattaattataatttccaacttgtttggcattttatttaatttccagaagatgtcataacataaataaagcatacctttcttcttccttcctccttccgatcaaaagcacattgctgtttgcactgttcacaggtctgaggtggtccatactttttttctgaatttgtgcaacgctgacacttggtaccaataaatgctgcaattatgttacagtactgacaaggcttgggctgaaaaacatacacattttgagacttttaaaaacattaaatatttgcggcatagcatatacccagtgttgtagacatatttctggaattaagaaaactcaggtaaaaaatttgttttctgtcaagtttgttgccctgtcacatgcaataacttttataccatatttctatgcattcaactagtatttatttctagtcatgtaactattactctaagatcgtgagaaatagatttgtgatttgcatagtctgttagataatacaaaaactacacataaaaaaggttttaaagaacgaaaataaaggtacatatgtagagaagtctcatgaatcaagaatttgaggaaacgtccttctactaatatcctagttaccttaatgaccatatcatttatttagaaaatgttaacttttcatcacatataggtacaaatcatataaggaatatatactgtgagttttcaactttgaaaaaatgagaacaagcatattcaacataaactataaaaacataccttgattttctttgatattcaaaagatgattcagggcagtttagagcgttaaagttagcatttttgaccaataataaataatattggtataatatacctataatgattgtagtatacatataagacaatttgtactaggattgggtcatgacttctgtgaataaatatctttaattgcgctgttttataaaaatagttctgaggaggctgttctgaagtgggctaaagtctgatgatgcaaactttatggataagttctccataaccaagaatttgctatatttgaatctctaaagaacagcttcacaaatttcacactggattcaatacatgtaaaacaggtatataatttgactgtttttaaatgttatcacctttccatcaaagtatctatagaaaatgtctttcataaaatatggtatgttgaaatatctaagagcatagcagtagtttttttttttcgagacgcagtctcgctctgtcccccaggctggagtgcagtggcaggatctcagctcactgcaaactccgcctcctgagttcacgccattctcctgcctcagcctctggagtagctgggactacaggcgcccaccaccatacccggctcattttttttttgttgtatttttagtagacatggggtttcaccgtgttagccaggatggtctccatctcctgaccttgtgatccgccctcctcggcctcccaaagtgctgggattacaggcgtgagccactgtgcccagccagcagtacatatttttttaaaaggtccagctttatgaaaaatattaactggtaacaatgacatgaaaacataagacatacttaccgtcccaaattgcttcacattttgagcacacttcttacaaattgtgttagttttgctgaaaaataaattgtatatagatcatgtttatgtagctttctaaagtaattagcacaatgtcaaaataaaatgagtcaaagatttgttgtacttaaaactttaataaggaccacggatttttttcaaatatacaaggatattttcagagttgttttacccaaattaacttatgacaaatgtttttatacatttttattgcatattactttttgtaaacaaaacatcttaatgtttcctatatagctccaaaatcttcacacttgacactattactgcacagcattacaataccagtgcctacctaaccttccacttggctactgtccaacattataatgcccacacctatttatgaagaaattatttgttcttttctgaggctactttctgtatatactctcagagtggaactgttaaaaatgttacgtactactcctcttctatgtaacaaattattagattttcaccttggaaggcagttggtaacactacagacctttcctcagatccattaaggctttaccatttttttttagtttaacataactgtttacatttgcattttcattagcaaggctgtacattttccatgtagtattattccttctctcatataaagtctaactgtaaattaaccaccactggtttttttcgcaacattctctctcccaccatgtataaaaggtttacaacttaaaatttctggggctaaaccattttttaaaaatactttcataaaaacatgggattacaacccccaagtattccataaagacaacacttgtctttaacagtcaaaaactattcagtatacaaacctctcttgttgaaattctgatctgcagtaagtacattttacaataggatgtgcaatccgacattcctgtaataagacaatacattagtcagtatctttctgaaagtcccaaatctcacttttctggtagaaaactgtttacccaacctagtgaaagtctaaaacatttataaaacctggccccaacgtaaagaactggatgctttatcatataagtggccaatcacaatataattccttagggaaggcacaggtgtctttgtctttagtagacgtgggggtatattacagacaaattaagaaagctgtcagggcctatttcaaggattggttaaatgtgaaactacttattattttgcaccgttgctcacagacagcatccaggctttaatgggatgggaggagctccaaatcagagcattctgttcccaaaccagtcgcttcgctttcctggacagggaagaaggatgccatcagctttgcggcttcgggttcctagcaagaaagtgcaaaaaccgtcccctgcctcctggtggaagaagaggacagaccaggcagaaaaccgagatgaaaacatctccacccctgggtctctgcggcatagacaggtggctgcctcactcaaccccactcctgagacccccagacgctgacggggcccggcaccctcctgggccgcctggaaaagggcacgattctgcctccctttcagggtccgttcccagctaatgttcaagcccccagaaaaaggggtccccgagtggggaggcgagggctccagactcccaaacccctgaggcgccggcgaagaggggctgcagtgcagcggctacccggccccctccggctacggccgaggacacccatcccgcccgcctcccggagcccacggaccttgcagagctgctggccctgggagagctcctcgaaaggataacgctgggtacacttggtgcaggcgtacagggccgaggccgccatcctgctcctcagtctcctcctccgccgccgcccgctccgaggcggggccctacggagaacccgagagccgccgccgcccgggccgcgggctcctcctcctccccctccccctgcctcgcgcccaccagggcctcgccgcgagagcccagggccccgcggacgacgccaccgtctccctccgcctccacttccgccccagcccacccagtgacgccgtgccagccgctcccgcttaggccccgatagcggcggagggagacgaagcgggtagggggttgctgtttagctgtgcggccgtggatccgcttccttctcggcctccctttcccatccctgattggctgcgaaggctatcgcgtcattcgatggctcctcccaactcccaacttccgcgacgcaggaagcgcccacaaagggaggatgtcgccggccaatgacatcccggagctctcagcgcgcgaaatccgctttgaacctgccccgcccaaaggtctgcggtcgcggctatttctaacagccagtcccaggtttggctgagagcgccccaatccaattgagcaaatgttcgcgaaaggctcgttctctgccgcaactttttttcccttgctttctattggactaaatcgttaagtccctcctaatcctatttgttattggccaaaaggtaaatacttcacctggagaggcgtccccgaggcaaattcacgctctctccggcgtttaatccgagggaactcgtggagtgctttaacttcgccttcgcttttgttttatctccattactcccttcagttgccactggcgacaccactactcgcccacgcttcttactggaggaggcccgaccctccgtagaatccccgcagagccggcctgtaaccccggcgttgtctgccccagcgggccccgttacgcgctaccttgtgacgtcaccagggaagaggcggattctctcctactacagaaagacgtctgctgttttgattggctaggaaagacgtccgttaggacgtgttgccctttctgtgtaagctgtgagcgtaggcggccctgagggggtgtgttgcaggggtttccaagcccagcaccagcacccttgcccttttccatcaggggttcagcctagggtccccgctggtgggcggctcccgagtcttggagaagagcacgagaacctagaccgcccccgaagtgcggagaccccctgggcaggctgaaagatggcggcggcgtctgtctctgcggcttctggttctcacttgtcggtaagaagcagttggcgcgagtgggccccacgtcggccctaagcgcctctttgagtttcctcacgtttcagggcgctgtcagtccagcttctgacgcaattctggaggtcggcgggaatgcctagattgccccgcgctccccaagcttccattcactgtggctgtgtcgaagctgcaccctctggctcccagtgaaactgggctggccgcccctgttccccagcccttattcaccttttggcgtagcaaccaaccccggttgcctaacattcccaagggccggctgggataactgcccactccctggcctgcaaaaatgtagctcttttggtcacgtgggttcagcggcccctctaggaaactcgccagatcaggtgaggcgcgccagtgtgtttaagagacgttgcagaatagtagtccgccgtctctcgagcgcttactagtcgttgcttatgctgtttcctatccctgcagtgcctcccactcccatccacattaacttcgttgtgtgatgctcgtagccagaacgcgcgcttcctgtcacctagaattactggaacttcaatgtggaaatgcccttttggagaggcgacagggggaattgattttaaatattgttttcgcctcatcaaatgtcaccatccagtttagttactggtattcactggtatttctcaaattggagtgtcgaatgcttaggtttttgaaaaccgcggcattggaaagctttgataggaagtaaatgttggagctcttatttctccagttagcaaatgttcgatgcctggtatactgttagggtccaaatgaacagaatagaaaccctgctttgaaggagaaaaacactgaagagaaactacacgtaattagtgattactgcgcagtatagtttagga

SEQ ID NO: 5570 - DNA, 6000 bp, Homo sapiens; identical to SEQ ID NO: 1689

SEQ ID NO: 5571 - DNA, 6000 bp, Homo sapiens
ataaagcgtatgtatcggtaaaagccttatatccagaatatatgaagaactgtcaacttgataaggaaacaacccaataaaagcatatgaataatgttcaacattagtcattagagaaatgcaaattaaaaccacagtgaaataccactacatatgtattggaatggcagaaattaaagactgatcatgccaagtgtttggcagtgtagaaaaaccaaaccttcatacactgctcttagaatgtaaactggtacagtcactttggaaaacagtttgggatacacctaccacattatccaaccgttccacccctaactagagaaaagaaagcctgtctacatagacttgtacacaaatcttcagaacagcttcacttgtagcagctccaaattggaaacaattcagatgtctatcaacaggcaaatggattaacaatggaatagtattccaggatgaagacagaattattgatacgtacgacacagatgaatctcagaagtccagacctggccggcgtggtggctcatgcctgtaatcccgacactttgggaggccaaggcaggcggatcacgaggtcaggagttcaagaccagtttggccaacatggtgaaaccccatctctactaaaaattcaaaaattagctgggcatcgcagcgcacgcctgtaatcccagctacttgggaggctgaggcagaattgtttgaaccgagacctgggaggcggaggttgcagtgagctgagattgtgtccagcctgggctagagcgagactcctctcaaaaaaacaaaaggccagaccccacctcaatgtccacacacagaaaatcctaaaaaatacaaaccaataaagcaactgaaagatcaccgattgcctggacatgaaaatattttaatgggggcagtgatacttacagggggatgtttggggtctagattgtaatggcttcgctcaaaagtcaccaaatttaagtgtgtatcgtttatgtcagttgtgcctcaaagccattttaaaatgactgtcacatatggggtatgtcgctttaaattagcctagggccttctaaagctccagaattcctgggctttgcttttagacatttctagctcttaatgaggagaggtaagctaacagctaggacatgtttcacaatagcctgaagacttaaaaaaaaaaaaaaaagccttaatttttttttcaggtgccacacctccctggatgatccaagatgaagaatacattgctgggaaccaagaaataggaccatcctatgaagaatttcttaaagaaagtaagtaaactaattcaagagaggatcgtctaaatcttcacactcaaaaatggtttccttgcctgtgtgtggtggctcatggctataatcctagcattttgggaggctgaggtgggagggtcacttgagcccagaagtttgaaaacagcctggacaacatagtgagaccccatctctatattcttcaataaagaaaaataaaagtttccctatcattgtacagaggaaaaacagaagttgaaaaaactccccccagaccgagttggggccaactttgatcacagctccaggaccagtgcaggctggctgccctcttttggccgcgtctggaataatggacgccgctggcagtccaggtatgtgtgttcagtgccgggtctccaacctacccatccaacctcctttttggagatgtcacccttcatcatcgtgttaaccctttatttcctttcagacatcaattcaaaactgaagctgcagcaatgaagaagcagtcacatacagaaaaaagctaatcatgctctctaccaactaccatgaggctaaaagcaaagtcaacaaacccctattataccttccaccaaattctttatcattgtctttcttaggaaacagacatactcattcatttgatttaataaagttttatttttccaaatgtacagctggttggacctgtaaaaaaaaattaaaagaatcagaaccataaagctttgtatctacctcctacaccatgagcccacacattcctactcacctattcatgcatcttcaccagcagctggagcatctccacccttggtatttctggtgtaaattacttgagctctgtgctttgaaaccagtttgataagtcctagggggagagaatagcacgatgagatgcttaacagatgctacaatagaaactagtaaggtttttggctgggcgcggtggctcatgcttataatcccactgctttgggaggtggagacgggcagatagcttgaggtaaggagttgcacaccagcctggccaacaaggtgaaaccccatctctaccaaaaatacaaaaattagctgggcatggtggcacatgcttgtaattccagctacttgggaagctgaggtgaggaccacctgaacccaggaattggtggttgcattgagccaagactgcccctccgcactccaacctgggcaacagaatgagactctagtaaggtttgttttggccgggtgcagaggctcatgcctgtaatcccagcactttggacaggtggatctcttgagcccaggagaccagcctgggcaacatggcaaaaccgcatctctatttaaagaaaaggaaaacaaaaagacagagttctctcagaggtgcccagaatggtcttaaaactccttggctcaaatgatcctcctgctttggcctcccaagtagctagaaatacaagggtaccactgcacctggctccagaattgcttaatctgacgttcggtaaccgagaatcctagtttttaacgatcatctatccttacttttcctttaaattagggctccattatcttccaccccccccccctttctgagacagtcttttgctgtcactaaggctggagtgcagtggtgtcatctcggctcactgccacctccatctcctgggttcaagggatcctcatgcctcagcatcctgagtagctgggattacagacgtgtgcccccacgtccagctaactttcagtagagcaggttttcaccatattggccaggctggtctttaactcctgacctccgttgattcacccgccttggcctcccaaagtgctagaattatagacgttcagtcactatagttagctgagccttattattgtggaattatggtaatcagaccatactactgagtagaccgtactaaatttctggttttaaaatttaatacatcaacaaaatatttaccataaaggttttaaacattttcaaagttgtttcaaaatagtaatctaattatttcaaaaacggttgtccctgtaattctatgcatccatttactcgaaacataaaagatccttgggcttcactaaactgccacagggtccacggcacaaaagtggctaagaaccctgagaattcatctcaggatcaggagtaagacgtcagaattacattactaacagccaatggtcaagccacgctttttttttttaattctgcttttccagcaaaaccactgaagatgcttaacatggtcaagacaatttaacctacaaaaacacacatgtaggatacacccctcacctttactaaggagctcctgaagggctgccctggccagggagcctcgaatcttcagtctctcagagaccacagctggggttataagtttatagttgggaacttccttacagagtttatcataggtagctttgtcaaacaagactaagttattgagcttgtcccgaactttgcctttggaccacttctgctcaccaaaacaaaacagaaacaagttagtatttctggcagaagcaccctttccctctcgagtaatctgcgtcagagaaatctgttccaccgttatcaaggataaattacacattactaaaacaaaaacaaaaaaaaaacaccgacacgtttttggccttcaaacaggggccgagccccactagatcagttaaaaataacacagcaggcacagcggcagacacttcgcacaacagacccattttcatgatcctaatgggaaaaagaacgagtggtgacgggaagataaactctcacattttgactctagaaatctacacctgaaaaaccacttactatacaagttacctattactagaggattacgagagagttacccctagtctctttcagagaggtcttatttctaccttctttttggccttgcccccggatttgttcactgggtctttgtctttcttggccgactttccagcgtccttcttcttcttgtcgtccttaggcggctgtaggagggcagcgggaatgcaaccaggtcctcaaatagcgccaaagtcccctaatactgcgccctcagcccccgcaaactccaccaccagagcacatgggccaagcaataaccgcgcccgccctgcaaccgaggccggcaggccaaggagcgctcccgccgaaggctctccccactgagtcctcaaacccaagaacgccggcgacttcacacccctgaagcttaccattgcgaagctcggagaatagcagcagacaccgcagcctcgtcaagatgtcggacaaaaaggaagcgctgctcagaaacgggcccaaaaaccaccgtccgctgtgagtacttccggggcaaaaggcggagccaggcagaagaagtcccacggcgaagcgctcgccctctagcctgaggcggaagacaggaagtggattctagttcccaagccgcaccgcctaaatactgccggagtctgcgctagttgtgacgcatactatagcgctgttttcctgcactgataaacgaaaagcaatccaccaggtctcggcagctaactttccggcactacttatgcccgagcgtgtcgctcccagtgcgcaagtgcagcaggtggctgcacggggggcgcgggaggaggaggaggaggaggaggaggctggggtggggccggcggcaagtgctgtgatgcggttccggggaggggccgtcgggtagaggctgaataccagtttccgagcggcaaggcagcgatggcgatttttagtgtgtatgtggtgaacaaagctggcggcttgatttaccagttggacagctacgcgccacgggctgaggctgagaaaactttcagttatccgctggatctgctgctcaagctacacgatgagcgtgtgttggttgctttcggccagcgggacggcatccgaggtgggctaggctcgggcccgtggcgggtgcgggggtgggagggccccagtgctgtagaagtgggctggttgtaggtgcggggttgggggaaaaggggttgtgtcgggtcccttgtcccctcggcggaatccccgggctgcaccttcgctgaccgttagcttcacctctgcagtgggtcatgcagtgctggccatcaatggcatggacgtgaatggcaggtacacggccgacgggaaagaggtgctggagtatctgggtaaccctgctaattacccggtgtccattcgatttggccggccccgcctcacttctaatgagaagcttatgctggcctccatgttccactcgtaagtcccccgtctcctgaacggcagcgcttgtaatttgtctaccttttcttaaatcgtcgttctggtgttatgaaaaacgcaaccgatccagatctagattttaggtaataacggcagtggtgtcatctttttttgctgggtggggaggggccgcggagttacccaggctggagcgcagtggcgggatctcggctcactgcagcctctgcctcccaggttcaagcgattctcctgcctcagcctcccgagtagctgggattacaggcgcgtgccaccacgaccagctaatttttgtatttttagtagagaggggttttgccatgttggccaggctggtctcaaactcctgacctcaggtgatccacctgcctcggcttcccaaagtgctgggattacaggagtgagccaccgcgcccggccgaggtgtcatcttacttaaagtcaacttctcttctctgagccttagtttcttca

SEQ ID NO: 5572 - DNA, 6000 bp, Homo sapiens
atttatggattaggtgttttatattttaatcttggattcatttggaatctaccatggtaggaaaaacatgaggtagaagctaacttttttttttttttttgagacagagtctcactctgtcacccaggctggagtgcagtggcgtgatctctgctccctgcaacctccgccttccagattcaagcgattctcccacctcagcctcccgagtatctgggactataggcgcatgccactgtgcccggctactttttgtattttttagtagagatggggtttcaccatattggccaggctggtctcgaaatcctgacctcgtgatccactcgcccctcagcctcccaaagtgctgggattacaagcgtgagccaacgcgcccagccttagccaacactttttaaatagaaatatagtttgggtggcaagaagaccagacaattgctttttgttattttctgttccagaatgaaatattttgggagttaagagctgagagcttatgtgtttcatgtaaggagacaaggaaagagaagaggattcgaagatacttaggagaggattttattagagacggctaagaggattgctggcaatgttgagtattcatttgaggttgatgatcatgagtttatagttttgccagtttgcccagttgtgctgttttctttaccagcactcagctatgtgtgtacaggcatggattagttaggtgtttgctcagccaggatagtgaatttgccagatgactgaaatgcagggaagaaaagaggtgcaagaaagttaaaggtatttgtaaaggagtgattatattaatgatctgtggaattctaagctagatgaagaaagtaaaaatgagaaaggatcaatgtgggtagtggtggagttgaaacattgaagtttctgatgaggtcaaatagtttttaccacagggatatgtgaccaaagcagctgaaaggttaaaaggtaattgtcacagaataaggtgtctgaattttacctttttttgttgttgttcttcaggggtggggctaggatgatgtggtttctgggggcagtaaggttagaatcagggattttgacatcaaggtgttggattggttgtccatgtagatgttgaagctaatgacaagaaagactgagccaatgttcaaatcttctgtgatggagaagtaaccagaggtaaaaaaatgacatcagtaagaagagttgcaaaagaaggaatggtgtcctcagcccaagctccagcagctgcttccagccaatgctgtttagcacttgagcggaaacaggcatccataagttaacacattagggagaattaggccgaagctgatcaataggtgactacttaaggcagtctagtatttggttattaaactttgttgtgtcctacaaagcacagttgttgctttttatagcttaattgttttttggcgtctgaggtcatagttcatggtttatcgtagggtagaacagccatttataagtataggtcatttgtaaattaggggaacctgacatattttttggaaatgccttgttactcaaccaaacagtaaatcagtagaatgaggatttgaaaatgatagggcaatctctgaataatacttagtgtgatatataataagctcttaatattagttgtgtacgttagccccagtacctttcatgtactggtttttaaatctgttttggtgctgccaataatttctctatctttagaaatatctgtttggaaatatttaacagactattttattaaaggctgtccattgaaagtatctcttgtgtaatagccagattagaatgatttggtaaaattgttctttattttgtaataaagtagttttagttataatttctgaattaaaagccattgctgttgggtcatgaataaaatactttaaataaaacagagctctaagactttgttaactcttggcctacagagtgtttaactgttttttgacttgaggcaaatgattattttatttgtaattttaaaaaatggtaaaactgctctttacacaccaatgattgtgaggatcagatcatttcatcttgtgaaaatacaagctatagaccttgctgtataatgtatacttttgcttttatggctcatgctttatgttcttttttagttctaaatgagtaccttgatatttgacatattgtgttgcctgtttttgttttttctgtatgatctctgcttcagttttcatgttccataatgacttaaaaatatgtgacatttcatagcaacttggttctctgttttagtagaaaaccagggggggagtttgaaatgtagatttaattgcagattcatttgtttatttctctggttttttcataacagggctgatggagttatgagaacaatgaacacagaaaaactcctaaaaactgtaccaattattcagaatcagatggatgcacttcttgattttaatgtgagttatgcttttgtaatttaagattttaaaaaattaggtcattataattcatgagaatttttaacctcaagttttcacagactctagtttttcacatcctgatatcctatatggctaaggattttttataaaatagtctcaagtcaaattactttctgatttttatgactgttttggatttatttctttagtgcttctctagctctagaattttaagatatacaagctaaagtggtgaaaggattgatctgaaaatatattttcttttgataatggcttttagatcttgaaaatgtacagggatattttttaaataaatagccaacttaatattttacttttgtctatttaatgggactcaaagcatggcaattattcagaagaagaagtttaaatagcagttataatagcttattatgtagctattgcccaagggcattgtgttcgctggaatttttgttttaatgaccatgacttgaaccaagctgccagctttgtcattcatttataatgtgttagaagttaacgttttcaactctgttctgtttttttgtcatctatcttaacaatgttttgtttattatttatttgtcattttgttttagagattgtgagtgcaagttagtgaatggaactgtgacagtttcatgctgaaatagatttttcctttaaattgtttaattgctagtttttaagcttcttcagggcaggaactaggtcacttttgttctctgttgtacccccattgcctattaatgtggcacatagtaagtgttcagtaaacattcaataaatcttacaggtatttcatagactaaaacagagattatccaactacagcttactgcctgtttttgtatgttttttaagtggttgaaaataattaaatggtattttgtaacaggtggaagttacatgaaattccaacttcagtgtcctcaatagtattattggaacacagccaagctcactgatacatattatctatggctgttttatgttacaacagcagagttcaaaagttatgacagagactgtgtggcccacagtctaaaatatttaccatctgaccctttacaaaaaaaagtttgctgacccctgctctagaaggcatggggtactgatgcagttattcaacattattttggtttgtatagaatctcagggtccaaccatgcatatttttcttaatatattgtatttgtttaaaatttcttattcttttcaatgtctgtattgtactttgttatataataacaatttatctaatcctcctgttgatagatgtttattctgtttttttatcctaaacagtgctacactcaattctctctcctctctctgtctcttgtctgtctctccctctgtgtgtgtgtgtgtttctatttgtaaacctatttcaataggtttaacacccagaaaaagaatgtggtggttcaaataatataaacatttaaatttttaataaatattgcttatattccaaaagggtgagccactaacttctcaacaggtgtctgtttttgctttttcatcttttttttgtttttttgagacagcatttttctctgtcaccctggctggagttctgtggcatgatcatagctcattgcagcctccaactcctgggctcaagcaatcctcccacctcagcctcctgagtagctgggactacaggggtacaccaccatgctcagctgccttttcttggttttagttttttgtagagacaaggtcttgctgtgttgcccaggctggtctcatttgaaactgccaggctcaagcaatcctcctgcctcggcctcacaaagtgctgggaccacaggcatgagctaccgtgttcttttcttttttcattcttatgggcactgagtaatatagtctgatgttcaggaaaggatattttagtaatttgatttgattattgtattttaatttacctgataagtgaagttgtatttcttttcacgttattatccatatgtattttttattttgtaaattgttttcatttactttatttattattaggattctccctatataatggacatcagctctactagatagtctgcaaataacttttttaccagttttttgtttgccattcaattttgtgcttagtttttctatatataacgagttaattttcatgtgctaaaaaagaacttagaattaatttggtttatctttttgatttattccttgagataaaactaaaaatatttccagtattcttttagtcaaataaatacaattatctggttacagcaaatttaataataataaataatgttcatttatatggtagctactgcaccgtgatctttatgtatgtattagagaaaataaatgtatttttcactaacatgcctaatgcatgaatttactgtatcttaatttgaaggaaatctttttgtcaatgtcatttaaaacctaagattagctaattttattttccaatttttccctaggttaatagcaatgaacttacaaatggggtaataaatgctgccttcatgctcctgttcaaagatgccattagactgtttgcagcatacaatgaaggaattattaatttgttgggtaaatactgctgtagcctaataacatttcttatcttgtgtcatatggataaacaatattgactgagttgttacttaaagctggctaaaaatttattatgatatattcattcattgtaacagttaatttggagaaaagagttttatacctaattacttctgcaagtgattacatatttttatacccaggatgttcagcaagatgaactttattttttagatgtatctatgttttttccacccattttattaatttttagaaatataaaagtgcctttaaaatttagctgggttaagatagtaagttttaggctgaggcaggagaattgcttgaacccaggaggcggaggttgcagtgagcctagatcgtgccattgtactccagcctgggcaacaagagcgaaactcagtttcaaaaaaaaaaaaaaaacaaaaaggatagtaagttttatgttacaggtattttaccacaataaaaaaagatgggaaaaaaacaaatattttgtcccagaagaatattgttttctcataatcaactccataatgaacttttaaaaaatttaaatctgttttttatagtctgaagtaacgtggacttactcagggatgctttaatctatagggatagggaaatttggcttattttttcacaagtgaaaaataaaggtttttctataaagctttggaaggcatagtcttcaatactataattagtataaattaaccttttctatgtatacattaaacttaaatgaactttctgagtgacatttgggcatggtaaagttgttatcttagataatatactattagtaagattggaaatagatgttagtgctgttttaaatggggtcaagtgtggtacgtgtttacacacaaatatgtacttaggtaattgtgaggaaaagtactatggcacaaactaggaatatgagtagggtcaagtaatgtttcttttt

SEQ ID NO: 5573 - DNA, 6000 bp, Homo sapiens
cctcctgatccgcccacctcggcctcccaaagtgctgggattacaggcgtgagccaccgcgcccggccggagacagggtttcgctatgttaccctggttggtcttgaactcttgggctcaagcaatctgcccaccttggcctcccaaagtgcctggcctcactcccctttttttaaccacacaatttgttcaagggtatgttcttgtacaagattcaaggggtgcagaagtaaaacatggaaattcgccctccccagagctcacctctgtggccagcggggtgcagacttccagccctctgcgtgctcatggtcgtaacatgtgcacctaaacacacgtgtttgtgaaacattgtcctgccgtggggaacgcaatgggcacttccagggcgctgtgcccctgccaggctggaatcttgggcccctcttgttcacatacagatacacccctgatgcctgatgtccagtgaggaaccaaggctgcggggaagggtggcccccacccttcctcttgttatcaggcctcagacacactaggaggatggaggcgagttctctcagctgcccatcccactgaggggtgcccggccgtcagtgtcttgtctgcacttacgtcccagaacctctagagcttgccccccagggcgggcactgctgggagggtgcgagcaccgctgcggcacagaggcccggttcttggctgatcttctggggcctgggcctgccctgaggtggtggggacagggtgtggcctggccctgctgggggctgctaggccaacgggaccctccccaagcgcgccgcacactgcagggtctccaggcacctgggctcagctagtgactgacccatttgtttgctaaatacgcagttttgtttttaatacatactcgtgaaattttccagaactggccttggaccagagaaaaatactttgggaatttttcaaaaaaatcccttcagttccacttggaattaggaaaacgtggcagatgcacttgaatcattttagaaaccaaattcacccccgcccacacagccgacccagaagacccagagacagatcaaaccatgctgttgcaggggcacctcccccaggaggggctcacgcctgtgttgcccatgctctctggctctcctgagttctgggtggccatggaggctgtttccctggaattccccaggccccggaggaacgtagggcaaggagctgctctggtcccagcagccctccaggcacctgtgggcggtgggctccagggagcgcctcgcaccaccttccctcccctttgctctgttctccaggcaccaggggcaacctgacagaggctgagaggccgctggccgccagcctggccctcacggctggcaccgccctcctctctgcccacttcctgctttggcaggccctagtgttgtgggcggactgggccctcagcgccacgctcctggcccttcacggcctggaggccgtcctgcaggtggttgccatcgcggccttcaccaggtagctacggacacccgggataccccacactggggccctcctcctgggcctgaccagtcccccagctgtcacctccccattcctggacaggaagggcacttttcctagtgactggccatagatggttttggatggttccatctgttctggcaggagtgggagcaggagccagggcagaacaaactgctggaggccctggtgttgggaacagctgcggggagggtagggaccagacagaactgccttcaagatgagtcccaggagcgcacactcagccctgtcagtggggtctggctttagcagccaggcctccacagacccccatgggcccccagggccgagagggaggacagagcccttcagaacagaggcctcatctcactgcatcccccatcaccccctagttccccaatggtcctaatttgtgttctgagatcccagtttactccgtggccaggccccacctgtgtttccaagtcgggctggagacgcaggatggggtaggccttgtgctctgagcaaccccagctctgcctcacaggcaggcaggcccggtgcaagagtggactctgggttcctaaagcaataaatgcaaacaagccaacagctctgctgcctagcaatttccatcttagccacacttctcccttcaggggcttcggaggagaggtcagggctaaggccggggatgagactgcaggagagagagcagcggagggccacattcggagcctccgtccactccagttttatcagcttttgccttttgcacggagtgctaaacaaattctagctctgtgtttttttcccattcccagatttactatcagttctccttaaaaagtatctaagctgttacagtagctttcccttcacttgattctattgtgtgttttctatgtttggaataattacacccaaatatctagatattttctcttcaccgcattttgtaaataaagagatgtgtatgcctccctgaattctcctaattatggccacctcccccaccccatctccagttctcctgccctgcaagagagcacaccccacttgccagctggtcagttcctggctggcctcgccctcgggccctggctgccgggcgccttccgctcggtggactcctgagggcaggaggctgcgggactgtcctgggcctccactggggctccctcggctggggtggctgtggctgtggcacctggacagtctttcctgcctgtcttcgtggaagcggtgggagcacccagttgtcctgggccgacttcctttgacctgtctgtggcccccagtggccacggtgagctgcaggacagccctgaggacccacttcacacaccagcgcctgagcgcctcgggccacctccctcaccagcgcctgcactcgcagaagaccagctgggcacacctgccatctggaggacccagcccacaaaccatgcagaccagggaaggaccccctccctgaagctggagacctgttgccttcatggttaatggatcctgatacctccagtctcagcgagcacacaaaggcagtggtcacctgttccacagggaacgccatggctccaggtgacccggagtggatggggcccgagaggccagcctggactgtctcctgagggcaggctccgcactcaaaatcgtgttgacaggcacccgtttaggagtggagagggaccccaccccccagctgtcctctccagcgcctgtttcccacttggccactcccagctctgcctccaggaagggtgagggcacgggtgcaccgaggggttggcgtgtgtgaccctgagctctgggtcagggcaagctcatgcatggagcaggatcacggcaggttcctggagatcaaacggcaaaggctgtaaaccaggaagccaggtcttgcctgggctcaggggcaggcactgggcccgaaggaggagggccacttcctgccagccctccaccgagctcacctatggcgcctccccaggaagtgctccggccagcccagggtaaacacgctagccctgcccctctgggaccatagcccggggacccagactcttggccacgctcattcccacccctacccaggaccggcagccggagccttgggtccctgcatgggcctggggcgccctgtgccccttcacctcgtcctcgtccagttgactgctgtggcagccggtgctacccgctgtgtccactgcaccctggccctgttctgagcggtcacagcagctggggagaagggccatcctggaagccgggcagatgaggacggaaccagacagtcccactgtggtgggcagaggtggggcctgggcctgaccacggggcagtgcaaggagagaggcatcctgagagggcctgaggtgtccccacctcccctgacaccccatccctcagtgcccaggctgggcagaaaggggggcctggaggagcagctgcactgtgaactcagggctccaggcctggggtgggcatggctgggtcctgcctgacacccacccactcaccgaagcctctgcccctgggcctgcggtgggcccggtaagggaagtgactctgccccatgcctggggcacctgaggggtgcacctggcccggcggaggctctgacctccccagggctggagccctccccagcaatgcgccagcgctgcccccgaagtcccattggcagcgttcccccgtcccccggcctgctggggcgcagctaggccctgcccaaggaagagctcgaggcctcgccctgctcatcccgcggaggcggccctgcgccccgcctgtccccagcgccccagctctaggggctaggcccgcggaggggcacaccaggcgggtgttggggaggacgcagagggctggggctggagcccaggcggggcagggggcggggcggagctgggtccgaggccggcgggggcgcctccatcccacgccctcctcccccgcgcgcccgcccgctctcgggtgactccgcaacctgtcgctcaggttcctcctctcccggccccgccccggcccggccccgccgagcgtcccacccgcccgcgggagacctggcgccccggccgaggcgcgaacagacggacgcaccggcgagcgccgaggggacaggccgagcgcggggcgccggaggcaggtgagcgctgcggacacgggggagcgcgcccgcccgggcctcagtttacccggtggcgatgggacgcggggcttctggttcaggacaccgggacgaacgcggcgtcgcagggcgcggggcacttggagggcggccgggccgagggcgcggggcaaggggctgggggcctggtcgagtccccacctctcctggacgggtcctgctgcagcccggcctgcccccgtcggtcctgggcggcggccggcgagcaaggatatttttaagccagcgatgggtgactcacctgccccgtcctgcccactcccagctctggggcttggtgggggcaatccctgcgtccggagagcgctggtggtagggaggcttctcccggttctgtgagcagcaggaccctcccgagggcctgaccgtggaggtagcactgcacacccactccctgtgggccggagccaggaggcacttcctgggtgtcggagcccagaaggaaaccagtggccgggaagcaccagctgggtcagtctccaggtcagggttgggggtgggagtttcagggaggaggggaggctgggacaggggctgcagaggccctgccaggagaggcaggagggtgggctggcaggagcctgtgggcacgcgaacttcagccatcctagattcctggtccctgcgtccagctgcctggcgttgccccttgctgcggggtgtccctggtggcaggggagggggaggcagggccgggcatgcccggacctctgcccccacccaccccgtgctcagtcctgggtcggctgtgctgggaggcaggcccagctggcggcggcccctcccctcgcggcccctcctcccctcgcggcccctcctgggtcccagcctctcccgggcctgcttagcacccaggccttgttggcatagctctcccaccgggccttctccgcctgcctcggtctcctttcccaccctcagcttccccagcttatcccttcctccctcaagccatagcttccaaacaaggacagggccagggcctgaggggcctccccattccagggccccacccagcgcctatgagggcagcctggagcccctgtgactcagctgacccctccccaaggtcactcagcatgtggagctggaacttgaacttggagcccgtccctctaccctcctgccctgctgggacctcctcccctccacagcccgactgaccgggcaccccgctctgcctcacttcacaccgggaaaatgaccacagtacaaagtgcagcctgggcctccagggcttcgtccccaccaccagtgggccaaagaagcctccccaggggggcggggctcccacagggcaggaggcagcc

SEQ ID NO: 5574 - DNA, 6000 bp, Homo sapiens
aggctaatttttatatttttggtagagatgaggtttcaccatgtgggccaggctggtctcaagctcctgacattaaatgttccacctgccttggcctcccaaagtgttgggattatgggcctgagccaccgtgcccagccaatactttggcttttaaccagaacatttagtctaatgcatttaacgaatttactgctatatatatatatatttttttttttgagacacagtctcattgtgtcgcccaggctggagtgcagtggtgcgatcatgactcactgcagcctctgcctcccaggttcaagtgattctcgtgcctcagccttcctagtagctgggacttcaggcgcgtgccaccacgcctggctaatttttgcatttttagtagaaagaagattttatcatgttggccagactcgactcaaactccagacctcaggcgatccgcctgcctcagcctaccaaagtgctgggattacaggcatgagccaccatgcccagcccatttttcccactatactagtttgaaagttaaattctcttttcctattagtattattttagtgatctccctagaaattaccacatgcattcttaacttaccaaagtgtcatgctcataaatacctttacggaaggatagagtttcctgagatggaggcaggaagagagaacattccaagctagatgaacagggaagcaagcagatgaacaggggaagatttaattgctatctgagtcagagtgaggctagagcaagatgagtgagctgggggtgggtggtttaaagccatccaggaaggatgtcttggtcatgaaaaagatctttgagaagaacaagaataactcctcctcaacccaggaaggacactgattttcctgaggcttcccaggaggcagtggcagagcttggtctaaagctggatgtctttagcagtctatgtccctgcctctatacctaccccagccatgctcactgtgtcccctttctagcaattcctcaatctctgcttacctgtctaaatactgcccattcttcaaaacccagttccattaaatcaacccaacaaatattttctttttatttttgtattttgtatttttatttttaatttgtatttatttatttttttgaggtggagtctcgctctctcacccaggctggagtgcagtggcgcaatgttggctcactgcaacctccgcctcctgggttcaagcaattctcctgctttagcctcccaagtagctgggattacaggcgcccgccaccaggcctggctaatttttgtatttttagtagagatgtggttttgtcacgttggccagactggtctcgaactcgtgacctcaggtgatctgctcacatcagccttccaaagtgctgggattacaggcgtgagccaccgcacccggcccaagaactctttttatttcttttatcttccctcacataaatcaaggtaggcgaggtctttcaaactgatagtgaaataaagagatttcagaaagggtcggtgacagccaaggtcagacaatacaaaaaaagttcaggacgagttcacactgtggctgacatgtctaatcataatgaccatcatgtactgagtacctcccacatggctggcacactgctacattacctctaatacaacaaccctatgatgtggatattcttttttttttttttttttttgagactgggtcttgctctgtcactcaggctgttgtggagtggtatgatctcagttgactgcaacctctgcctccagggttcaagcaatcctcccacctcagcctcctgagtagctgggaatacaagtgtgtgccaccacacccagctagttttctgtattttttggtacagatgctgttgccatgttgcctaggctggtcttgaactcctgggctcaagtgatcctcctgccttggcctcccaaagtgctgggattacaggtgtaagccaccacacccagtgtggatattcctaaatcaattttacaggctgggcacggtggctcatgcctgtaatcccagcactttgggaggccaaggaaggaggatcgcttgagcctaggagttcaagaccagcctgggcaagacagtgagaccttttttttttgagacacggtcttgctctgtcttcaggctggagtgcagtggcgcgatctcggctcactgcaacctctgcctcccaggttcaggtgattctcctgcctcagcctcccaagtagctgggactacaggtgcgcgccatcacgcctagctaatttttgtatttttagtagagacagggtttcaccatgttggctaggattgtctcgatctcttgaccttgtgatccgcccaccttggcctcccaaagtgctgggattacagatgtgagccaccacgcccccgcgagaccttgttttaaataaataaataaaaccattttatagacgaggaaacagaggctcagggctatatggagaattgcccatatttcccaaatcaccagagaattaaagaattaatctaaattagagcacctcaaggtttgggcattgggggtagtctagaggcagggagaggggacccagcctcagggaatggtacttagggccaagagaacagacaaggtgtcaagatagggaacaatagccaggagcagacacccctggttggagctagacaaagaggatgacatgaagccccaaggcagaaaacctgaatctagttgccaaatttggagagaggtagttctttttgtaaagttttgctagtccatttgtcctgggaccttaaagaacaggataggggagaactcaaaatcaagaaaagtagtttttagaacaagacactctgagtgcgcaccttctccagacttcggagcccctcagagtgcgtctgaggtatctctgggtcctccaccattgctccacatgaggcctgtcaaagagagggcctagactgggtgaatgaacaaaagtgaacacatgaaaaagagctctggcaaattaatcaacaaatgctaagtggcattaacagcatatagtggattatgtgaattatctcaggtaccagacttgagtcctggttctggcatgtattagctgtgtaagtaggtaacttggtttccctgttttccattgtaaaatgaggatattaaatagtatctactggcggaggctcatgcctgtaatcccagcactttgggaggccaaggcaggtggatcacctgaggtcaggaattcgagaccagcctgaccaatatggcgaaaccccatctctactaaaagtacaaaaattagccgggcatggtggtgccgcctgtattcccagctacccgggaggctgagataggagaattgcttgaacccgggaggtggaggttgcagtgagccgagatcgtggcactgcactctagcctgggtgacagagtgagactctgtctccaaaaaaaaagagagaaagaaagaaaaaaaaaaggccaggcgcggtggcttacacctgtaatcccagctctttgggaagccaaggcgggggcagatcacgaggtcaggagtttgacaccagcctggccaaaatggcaaaacctcgcctctactaaaaactacaaaaattagctgggcgcagtagcgggcgcctgttaattccagctactcgggaggctgaggcaggagaatcgcttgaaccctggaagcggaggttgcagtgagccgagatcgtatctattttcacaggtttttttttttttttttaatggagtttcgctcttgtcgcccatgcttgagtgcagtggtacgatctcagctcactgcaacctctgcctcccgggttcaagcgattctcctgcctcagcctcccaagtagctgggattacgggcgcccgccaccgtgcccggctaatttttgtatttttagtagagacggggtttcgccatgttggccaggctggtgtcaaactcctgacctcaggtgatccgcccgcctcggcctcctaaagtgctgggattacaggcgtgagctaccgcgcctggccctcacagggtttttatgaggattaaataaatgagataagaagtaagagtgcctgggatatactgggtgttcagaatgtgttattgctgtgaggatttaagtggaaaagtgcgatgttaggtatggctaacttagaggtcctccacccgctgcagatgctctgactacccaccagtgtgcttgcaggaggaattcttggtcccttcaccctccttccctgttgggctgggatggtctttgcaaagggagccaggggtccccctcaagttctttcatgggtcagtcatggtcagggtagggagggaactctggcagctggttttgggggatcaatcctctcattgtggggagacccaaggctggtggctggaaatcctttctgcgctacgtaggacagggcgccctctcctgaacaaaggcgggaacagctctaggccagagtttctgggatgtgcctcaccgggtctcactgcctgcaaaggtgctcttcccattgctgaaatgtccccaaccgccctgacgagcaaagtttgggggaggggcgccagggctgggaggaaactggcttaatgtttcagaagggcgaggctggatagttcggttagaatggaggtgcgaggcaggagagacgggcggatgagaaagaaatccggcccctgttgaattaattttgtgttctttcaacaggtagatggaacgcagctgagaggtaaggcgacaaggtggcttatccaacatgctcaaactcaggtatccagagctcttccggctgccctcacgcagccgaaattagtgggggcagacccgggctgtaaagcatggtttgaggacacgccagattgaggaggagagccaggggtcggggtctccagaagcggggaggagccagcggaggatctgggcgcagtttcctctctaagttccgccccgagagcgccggccccgcccccgccgttcgcgctctgaccagcccgcagagccagcccccgaccccgggccacctgggcccccgggttccgccggcactctcgccaccaccgcgtgggtgagtatgggcatggatgtgctgggctgccgggcagccccactcgggagcttggccgcgcggtctggcctctgcagggccgggccccacgctgtgggagtcctggtacctgccgtcctatcgcacacactctgtttcccaggaactgctgctctctggacttgccgagctggcccccttcttctccctccccagcgtggggccgggtgtgcaggggttgagctctccctttattccgcggggcctcctggtcaggagtcctaggtggggaggatggggccccggggttggaaccccatagagtagttttgaatggcagctgtgccatttattagccttggccttgagtaagtgttttgaacctccctgagcctcagtttcctcatctgtaaaatggaaatatacaggctgtagcacctacctcatagaattatggtgagattaaaagagacaatgtatatcaagtacagagcagggggcctagtattccgtaggcactcagtaaatgtgggttcagactcgaggctgaggagatctctagggactttggagctgaggtagctccaaagaaagcaattttcagctaagtagtacctgtgaggaatgtagaactatctgcaggctgaacaattgcccttcagctccaccctgaggtgtggagtagaatgaccaagttggaaggaccttagaggtaatctaaaccatgtgattcccatgttgcagaactgtggaaacagatctagagtgcttaagtggcttgccaaaggtcacacagctaaatgggaggccaggcatacctccaagaattggaatggattatcccttgaacctcctcatcaactcctgatttgggcagtgcctcttcattccctgaagatctagtcttcaatttgggaatcctagtggttcctcagggatctagagctgcagccttca

SEQ ID NO: 5575 - DNA, 6000 bp, Homo sapiens
atggagtgcagtggtgcgattatagctcactgcagttcaagtgatcctcccgcctcccacttttttttttttttttttttttgagacggagtctcgctgtgtcgcccagactggagtgcaatggcacgatctctgctcgctgcaacctccgcctcccgagtagctgggattacaggcgcgcgccaccacgtgcggctaatttttgtatttttagtagagacggagtttcaccatgttggccaggctggtctcgaactcctgacctcaagtgatccgccggcctcggcctcccaaagtgctggaattacaggcttgagtcactgcgcccggcctttgttttttagagatgacgtcctgctttgtcacccaggctggagtgcagtgttgtgatcatagctcactacagcctcaaactcctaggctcaaggtatcctccaacctcagccacccccaccaccccgagctgggaggacaggccggcaccatcctgctcagctaattttttattttttgtagagaaaatttcgacatgttgccccagctggtctcaaactcctgggctcaagtgatcctcctgcttcggcttcccaaagtattgggattacaagtgtgagccaccatgcccggcgagacctgtgtttttaatggaatcatcccaccagttgcaagagttaactccttgtcttatgatttgcgctggttgaggaggtgtacgtctttccattagtcagttgctggttacaatttctaagcccctactacgtgctgggcactgtctggcaccccctcaaactacttcatcagagagtaagaaccaataacagtataacaatggttacatattgagcacttgctgtgtgccaggcacggggcttcccctggattgtcaccttcaaacttcacaacctccataaagagctatttattttttatttatttatttttattatattttttgagacggggtctcactctgtcgcccaggctggagtgcagtggtgccatctcggctcactgcaagctctgcctcccaggttcacaccattctcctgcctcagcctctggagtggctgggactacaggcgcctgccagcacgcccggctaattttttgtatttttagtagagacagcgtttcaccttgttagccaggatggtctcaatctcctgacctcgtgatccgcccacctcggcctcccaaagtgctgggattacaggcgtgagccaaccgcgctcggctatttatttttgagtcagattctcactctgttgcccatgctggagtgcaatggtgcgatcttggctcactgcaacttccgcctccccggttcaagcaattctcctgcctcagcctcctgagtagctgggattacaggtgcctgccactatgcctggctaatttttgtatttttagtagagacggtgtttcaccatattggccaggctggtcttgaactcctgatcttgtgatctgcccaccttggcctcccgaagtgcctggattacaggcgtgagccaccacttggccaagagccaagagctgttcttttttttttttttttttttagtttttttttgagacagagtctcacttcttcacccaggctggagtgcagatgtacgatctcggctcagtgcaagctccgcctccctggttcaagtgattctcctgcctcagcctcccgagtagctgggattacaggcacttgccagcaagcccggctaatttttgtatttttagtagagacgggggtttcaccatgttggccaggttggtctcgaactcctgaccttgtgatccgcccacattggcctcccaaagtgctaggattacaggcatgagccaccgtgcccggccaagagctgttcttattaccccattttactgatgaagaacttgagggtcagagagtgtcagtcactggtcctaagtgtcacactgtggggcagtcattactggaaccatgtgggtggggctctaaagcccagggttgtaacctctgtcccatgctgaccccaaggctgcaccaggagctggtctctgaaggccattccctctcacaaggtgcctacccatctcctgtgctccagggaaggcccaggagtctgcggatgactaacccttttttctcttctcccagaaaagtcttcctcaatgtcatcactcaatattgcgaagcacatgccccatcgagcctactgggcagagcagcagagcagggttggaggggctggggagactgggcgtttcggtggggtaggggataggcaaattgggggttgataggatatgaaagttgggggtggttggcagggtggaggggcaggcaggctggttgggggtttgggggccacagggaggaggtgggggcatttcagctgtgggcagagatgaagtacctggacgcctaagcctcttgctgcttctccagctgccactgcccctgatggaactcatggagaatgaagctctggaaatcctcaccaaagccctccggagtaagctccccgccaacccccaagaactcccacgacagattctggtggattttgcagggctggggcccaggggggtggggtttcagggtgccttatgtcttgtcagatgcccttggcactcacaagtattccaagggccccataaaagttaaaagctgagggactgggcacaggaagacccagtgggggacatgtggtgatgggcagaggcctgggctccaggctgagtgcagcccctctccagctgagggaggcttttctgtggctgtttctccacctgcacagtgggatgaccgccttggtgtggcctcgactgcctctggttggggagttgtgaggagcctttggacagtggattatgtgggtgaacttttgctgctgtggtaggaaagcccagcggtgataaagggccagctgatggcttagagtgggtggctggtccagaaggtgggcaaactgctcgctaccaccgccctagttcaggcctgcaacctcttccctagccttgacctcatccatcctccaccttaacactcagcacccttagagatgcaaagttccccaggctaacacagacctgagtgccctgcgctactgctacctcgaatcatctgcggttcctcgaatcacacatgcggcgccccctggtggggagacctttcggttgctcactgccctgagccgagctctgccctcctcctaggctaccagttagggatcggcagggaccacttcctgactaaggagctgcagcgatacatcgaagggctcaagaagcgccggagcaagaggctgtacgtgaattaaaaacgccaccttgggctcgagcagcgacccgaaccagccccgtgccagcccggtccccagacccaagcctgaccccatccgagtggaatttgagtcctaaagaaataaaagagtcgatgcatggtccgtgagtcagtgcaggacagcccgcgtgaggcggacgcacgtggccccgcccttccccgtgaccttcattcggtcaccgcagtgaccttcattcggtcaccgcagtgaccttgagctttctccgtccgggccctatcggccctaccttccgggactcgcaatccaggacttattgcatgttttaagtcggcttcacccaccccgagttccgcagctctgtggggctactgggtctacggttcgagtgctcagttggtgtcgctttgggggaagggggtagggggaacggggcagcacctccctcctcgcgacggcgcgctaggctccgcccctcaagcataggtagcaggtccagcctctccgctcgtcccgcccttgcgttttcatctgtaagtggtctcttggctccgcgactgcagcctgcaccgcctcgcccactcctctcgcgcgcagcaagccccgcctcctccgttacgaaagagcgcttctggccccacttgctctcggctctattgtccccgccctccgcgtctccggccccgcccctcccaggggccgcgtacgcatgtgcgccgcagtggctcggcgggctgcggggcgggacctgcacgaaggcccgcccactggcgctgccggctccgccccgactcgtccgggcgcgcaggcgccgcccgccccgctggtctgattagcataggaccccgggccccgccccctgctttgcatgcgcacggccggccccacccccgctgtcagctggaggaagcggagtaggaagcggccgcgatgtccttttgtgtcctacaagcagccggcggcgccgccgagtgaggggacgcggcgcggtggggcggcgcggcccgaggaggcggcggaggaggggccgcccgcggcccccggctcactccggcactccgggccgctcggcccccatgcctgcccgaccgcgctgccggagccccaggtccgggggcggaggggagcgctgccgcgggggtgggcgggcggggcgcgggggccatgtgcgagcgcggcagggaggcgggcggggcgggctgcaggcggggtccgactctggggccagtccgggccacggttgggacccagtcgagggtcggactggtcagggttcaggcgggatccggcgtccgagtcctggtgggccggcctggggcaggatctggctctggctgcgggtcctgactcgggtcagggttgggcctccgatccagcccgctccggggcagggttcaatcccgcatttgccgaagtccctggggctggccggggtggaagacggggagggctctatgtctgggaaggggctctgaagaccacgtgggggcgctcgaaggggcctggggccaccctcctctctgggtcaaaggtcatcgcaccggcaggggagaacttcctcctccttggctctccccacttacttcctgataacctggtagaggtctcccgcgggcggggagggggaggcgtagcaactttaggcaacttcccaaaggtgtgcgcaggttgggggcgggacgcggcgccccgggaggtggcggcctctgcgacagcgggagtataagagtggacctgcaggctggtcgcgaggaggtggagcggcgcccgccgtgtgcctgggaccggcatgctggggcaggagggcagccgcgtgtcaggtgtgaaaagctctggaggtgttttcatgagtccgtgcctgtgcgtgtggatgtggggagacctagtgagagtgtgtgtgatcatgagccttgactgagttcgtggatggggtgtgcgctccaggagaagtgtgtgagcacaagtgtgagcaggagtgagcacgggtttgggaaggccggtgcaagtgtgaaagccctcagcagagagcgagcctgcgtgggcttgtggggctcctgagcaccccggtgagtggagtgtgtgaactcggtgtgagcacgtccactggccttgggtctgctctccaatgcagaatacccagatgagggcagggtctcagaggtccccccaacatctggagaaaactgggaagtatcctgctcctggctagggattccaggtggggttgaaggttgcctgggggctacggttaccctgctccctggcctgggtgggagtaggggctttctaagcctcccccaggttcccaagggggagacctgctgtcagttactggccctgaagactctgtttccatggcaacagctaggagggggcagtgttcctgggcagtccttccttggactctgccccccttcttccccacttgctgggcttggaagcctggccctaggcccgaggttgggcaacccgtgtggcagggtgtctcccatcccccataccagtgctttcctgcgaacctatgggtctctccgtgcaggtgaccagcgccatgtccagccaggtggtgggcattgagcctctctacatcaaggcagagccggccagccctgacagtccaaagggttcctcggagacagagaccgagcctcctgtggccctggcccctggtccagctcccactcgctgcctcccaggccacaaggaagaggag

SEQ ID NO: 5576 - DNA, 6000 bp, Homo sapiens
tcattggagatgactcacattctttaccctgccccttctgccttgtatccaataaataacagcgcagccagacattcggggccactgccggtctccgcgcattggtggtagtggtcccccgggcccagctgccttttcgtttatctctttgtcttgcatctttatttctacactctctcgatgccgcacatggggagagacccactgaccctgtggggctggtccctacagcttgagtctaggagttcaagacaagcctggccaatatggcgaaaccccatctccacagaaaatacaaaaatgagccaggcatggtggtgcatgactggagtagtcccagctactccagaggctgaggtgagaggatcacttgagcctgggaggtggaggcttcagtgagccaagatggcaccactgcaccccagcctgagcaacagaatgagaccccgtctcaaaaacaaacatgtattatgaccatatattcatcagagttcagagaaacagaagcaatgggagattttatatagatatatatggagagagagagagagacatatatgaaactggtccatgcaatcatggcggctgaggctggggagtcccacaatctgttgtctgtagctggagacccaggaaagctggaggtgtaagttccagtctgaggttaggagattggtgtcctagctccagcagtcagacagagagagaaaacgctctcttccttcacctttttgtgctattcagtctctgactatgatgctcacctgcactggggagggtcctctgctttcctcaatctatccattcaaatgctaatatcatctgaaaacaccccaaagacacacccaggaataatgtttaatcaattatctgggtaccccataacccagtctatacttaaaattaaccatcaagactatatatgcatttatagaaaaatatatatgaaatgtatctaaaaacattttaaatttaaaagtcagccctccctcagagtggtctcaccccacagacaagggagtttaccctccaactcccatcaggcattggctgagagttgcttcaggaggtgttaactcgtcacacttctggccttccagatgcataggctggacgtactcctgcagccaggggaagccccaaacaaagttgcaggtatatgtgtgagataccttgatcagggatgtgggggatgggggcagagcactatcagacatgttgcgtttttgcaacaatgggcataagaaggatatttgaaaatctttaagcacactattagtggttaagaagacctattgatttttggatgcccatcatgtgctgaataccatgcccgacccccaagtgcatcatctctaggtgttaccatgattgtccctatgataaagcaacccatgtgtctccgtgaattctgcaaactctgctgaaaatggcaaaatggagttggggtcctctgtgctggtgacatttagaatggaaagcaagtgctattttgaagatgactcagtctgaggaggcgctagttttctcaagcaaacacttttgtaacacccttccagccaaaactctgagctaacgtagaagggtgagtcctgtctttctctttgctatccactttgcatgtggcccagcagggatggtgacattgctgagggtggacaatctatacctgtcctcttctctcccaaactccaaaaatgtaagcgccctaagggcaagaggtctttatttattttgagacagggtctgtctgtcactcagggtggagtgcagtggtcggctcactgcagcctggaactcctaggctcaagcgatcctccctcctctgcctcctgagtagctgggaacacaagcgagggccaccgccacgcctggctaattaaaaaaaaaaaattttgtagagacagagtctcgctctgttgccgaggctggtctgtaactcctgggctcaagcgatcctcccacctcagcctcccagtgtttggatcacagccgtgagccactggaccaaaaaaaaaagaaacctaatatacaaaacaatggcagggtgcggtggccctagcactttgggaggctgaggcaggcggattgcaggcaggagtttgaggccagcctgagcaacatctttttcttttctttctttattttattttatttattttttgagatggagtctctgtctgttgcccaggctggagtgcactggcacaatcttggctcactgcaacctctgcctcctgggttcaagcgattctcccgcctcagcctcctgaatagctaggactacaggcagatgccaccacgcccagctaatttttgtatttttagtagagatgtggtttcactatattggccaggctggtctcgaactcctgccttgacctcccaaagtgctgggattacaggagcgagccactgcgcacggcctcttttttttccttctgagacacagtcttgttctgttgcccaggctggagtgcagtggcacgatcttggctgactgagtagctgggattacaggcggatgccaccgtgcccagctaacttttgtatttttagtagagacggtgttttaccatgttggccaggctggtcttgaacgcctgacctcaagttgtccgcctgcctcggtgtcagagttgcatgaaccagagcaactctatcttgaatagaagctgggtaaaatgaggccgagacctactaggctgcattcccagacggttaagacattctaagtcacaagataagataggtcggtacaagatacaggtcataaagaccttgctgataaaacaggttgcagtaagaaagccaactaaaacccaccaaaaccaagacggccaccagagtgacctctggttgtcctcactgctgcactcctaccagtgccatggcaacggcaggaagttaccgaatatggtctaaaaaggggaggcatgaataatccgccccttgcttagcagatcatcaagaaataaccagaaaaatgggcaaccagcattgagttcctttactttcctaacaaacttgctttcactttatggcctcgccctcaattctttttttttttttttgagacggagtcttgttctgttcccaggctggagtgcagtggcctgatcttggctcactgcaacctccgcctcctgggttcaagcaattctccagcctcagcctcccgagtagctgggattacaggcgcgcaccaccacgcctgcctaatttttgtatttttagtagagatggggtttcatcatgttggtcaggctggtctcgaactcctgacctcaggttatccacctgcctggcctcccaaagtgctggactcgccctgaattctttattgcacgagatccaagaaccctctcttggggtctggatggggacccctttcctgtaacactgggattataggcgtaagccaccatgttcagccacctttgaggcaggaaaatagggtctggaggcagggaacatataaggctgattcacacttcagttatgacaggaaatatcctctccttagggagtacaccctaaatgactttgtaactttacttcatcctcttcatttacatatggcatatcccaaataaccaatggaatcctccaaagggtatttaaactccaacaaattctgtaactgggcccttgagcacctatgctcagccggccccaacactggagtgtactttcattttcaataaatcgttcattccttccttgctttgtgcattttgtccaattctttttttttttctttttctttgagacagagtcttgctctgtctggagtgcagtggcgcaatctcggctcactgcaagctctgcctcccgggttcacgccactctcctgcctctgcctcccgagtagctgggactacaggcgcctgccaccacgcccagctaattttttgtatttatttttagtagagacagggtttcaccgtgttggccaggatggtctcaatctcctgacctcgtgatccgcccgcctcggcctcccaaagtgctgggattataggcgtgagccaccgcgcccagccgttttgtcccattattttagatgccaagaacctgtacaccctccaccggtgacaccttcacagttttgaggagtattcatggggtattttgtaaaatgtttctcaattgggatttgtctgatgtttttctcatgattagactggaggcagctgggattacaggtgtgagccaccatgcccagtctccaaaccctgtttacacaaaaattttaaaaaactagccaggcttggtggtgcgcgcctgtagtcccagctactagagagcctgaggtggatcacttgatcccgggagggggaggctgcagtgagcggagattgtgcctcgctggctgcactccagcccgggcgagagagccagaccttgtctcaaaaaaaaaaaaaaaaaaaaaaaaagcctaatatggctgagggcggtggctcacgcctgtaatcccagtactttgtgaggccgaggcgggcggatcacgaggtcaagagctctagaccatcctggccaacatggtgaaaccccgcccgtactaaaaatacaaaaattagttgggtactcgggaggctgaggcaggagaatcgcttgaacccgggaggcgggggttacagggagctgagatcgcgccactgcactccagcctggcgacagagcgagactccgtctcaaaaataaatatatacaaattaaaaaagcctaatatacaaaataaagctaggaatcttccctgagtcctcttgcctacggaatgaagtccacagacttgggggagcgttcgaacccttctaaggccacttcctttctccagcctctcgcgcccagttgactcccggcaacacctcccgccgccacaaggagacgcccgaggacttccctccgacaaagccaaaaacggtattgccacgtgacccgctccgcatacacgtgaccagcttcgcacccggtgggcgtcacgtgacggactcagtagaccgccactggctgtgcacgttatggggtttccacctagggctcggcctgaggcttgtaacactccgttttcccccgagtcacaggggcagtcttgcccctcgcagctgggtcgcggtgtctctcaaaggtccccctctacaggggcttcgtgaggcccgggcccacagggcgctcggtcccggaagtgacgtctcccagaggggccggaagtggcagtggagggagggaagatggcggaggtggtgagtccggtgcccggggcggggcggagggagccaggggaggtgggtagagcccgaggccccccagtagccgaccctggcgtcgcgctgtctccccagggggagataatcgagggctgccgcctacccgtgctgcggcggaaccaggacaacgaagatgagtggcgtgagtgacgttggggggcgggactaaggaacctgagggcgaggggcgggagtcaactgaaatcccgggatggggaggggcgtctggaattatggggcgggcgaggcgcagatactttgatgaaggggcgtggctcttagctgctccgagaggtacagggcggggcctggaaaggggtggcacttgtgactgaaggaggcttaggagagacctaagtgctggagcttagggatccggcctgggggtggagttcaggtcgtggaagggtggagtctcatagcctggcctgtctaaggcccctgtctatgctattctcatagccctggccgagatcctgagcgtgaaggacatcagtggccggaagcttttctacgtccattacattgactgtgagttctgggcctgaggtggggcatcagggtagggttgggggacagtctttggcattctgtcctgagccatccccactgctacagtcaacaaacgtctggatgaatgggtgacgcatgagcggctggacctaaagaagatccagttccccaagaaagaggccaagacccccactaagaacggacttcctgggtcccg

SEQ ID NO: 5577 - DNA, 6000 bp, Homo sapiens
aagtaagtcagggacgggcacagtggctcacgcctgtaatcccaacattttgggaggctgaggtgggcggatcacttgaggtcaggagtttgagaccagccaggccaacatggggaaaccccatctctactaaaaacacaaaaagtagccgggcgtggtggtgggcgcctgtagtcccagctactcgggagactgaggtgggaggattgcttgaacccgggaggtggaggttccagtgagccaagattgcgccactgaactccatcctgggtgacagagcaagaccctgtctcaaaaaaaaaaaaaaggaaaaggcaagctgaggtggctgctgctgctgtgccaggttacttatgttccgtccgcgcctctgctcttcaggtcaggtgttcagctatcctcaccgctacctggtcctcgatcttgctctgctgtttctgatggggattctagaagcagttcggttatacctgggtgagtggactgttaacaccgtgaagaacctgtcctaagagttgctatctgtttccacagcctttcaagagtaattattttatagtgtggttctcagagacattttttatccaaactgcttacccagttgctttgcaggctcaccttacagtgtcattaagtattaatcaagaagttttgtcccagagacaaataacactgggggcatcgttgggagagactctgtgtttggaagcatgtcttgtagaagccactgggtaatggcactgagatcagaaaagcccagcccaccaccacatctggagctccggaatattcaccagcacccctttccttccccttgcccttagctgtctgaggagagagccctggagagttctgccaggtcccaaaaggcagcagagtctggaggggtgggagcccccagcctccccactccagctctagggatccccaagtctgcaaccccttccagtgacctactttttttgagacgaggtctcactctgttgcccaggctggagtgcagtggtgcagtcacagctcactgcagccttgacctcctgggcttgagcgatcctcctgcctcagccctcccctcctcccaagtagctgggattacaggcacctgccaccacgcccagctaattttgttttgttttgttttgtttttttttggtagagacgagacaaggtttcttttttttttttttttttttttgagacagagtctcgctctgtcgcccaggctggagtgcagtggcgtgaacttggctcactgcaagctccgcctcccgggttcacgccagtctcctgtctcagcctcccgagtaactgggactacaggtgcccgccaccacgcccggctcatttttgtatttttagtagagatggggtttcaccatgttagccaggatggtttccatctcctgacctcctgatccgcccacctcggcctcccaaagtgctgggattacaggcgtgagccaccgcgcccggccggagacagggtttcgctatgttaccctggttggtcttgaactcttgggctcaagcaatctgcccaccttggcctcccaaagtgcctggcctcactcccctttttttaaccacacaatttgttcaagggtatgttcttgtacaagattcaaggggtgcagaagtaaaacatggaaattcgccctccccagagctcacctctgtggccagcggggtgcagacttccagccctctgcgtgctcatggtcgtaacatgtgcacctaaacacacgtgtttgtgaaacattgtcctgccgtggggaacgcaatgggcacttccagggcgctgtgcccctgccaggctggaatcttgggcccctcttgttcacatacagatacacccctgatgcctgatgtccagtgaggaaccaaggctgcggggaagggtggcccccacccttcctcttgttatcaggcctcagacacactaggaggatggaggcgagttctctcagctgcccatcccactgaggggtgcccggccgtcagtgtcttgtctgcacttacgtcccagaacctctagagcttgccccccagggcgggcactgctgggagggtgcgagcaccgctgcggcacagaggcccggttcttggctgatcttctggggcctgggcctgccctgaggtggtggggacagggtgtggcctggccctgctgggggctgctaggccaacgggaccctccccaagcgcgccgcacactgcagggtctccaggcacctgggctcagctagtgactgacccatttgtttgctaaatacgcagttttgtttttaatacatactcgtgaaattttccagaactggccttggaccagagaaaaatactttgggaatttttcaaaaaaatcccttcagttccacttggaattaggaaaacgtggcagatgcacttgaatcattttagaaaccaaattcacccccgcccacacagccgacccagaagacccagagacagatcaaaccatgctgttgcaggggcacctcccccaggaggggctcacgcctgtgttgcccatgctctctggctctcctgagttctgggtggccatggaggctgtttccctggaattccccaggccccggaggaacgtagggcaaggagctgctctggtcccagcagccctccaggcacctgtgggcggtgggctccagggagcgcctcgcaccaccttccctcccctttgctctgttctccaggcaccaggggcaacctgacagaggctgagaggccgctggccgccagcctggccctcacggctggcaccgccctcctctctgcccacttcctgctttggcaggccctagtgttgtgggcggactgggccctcagcgccacgctcctggcccttcacggcctggaggccgtcctgcaggtggttgccatcgcggccttcaccaggtagctacggacacccgggataccccacactggggccctcctcctgggcctgaccagtcccccagctgtcacctccccattcctggacaggaagggcacttttcctagtgactggccatagatggttttggatggttccatctgttctggcaggagtgggagcaggagccagggcagaacaaactgctggaggccctggtgttgggaacagctgcggggagggtagggaccagacagaactgccttcaagatgagtcccaggagcgcacactcagccctgtcagtggggtctggctttagcagccaggcctccacagacccccatgggcccccagggccgagagggaggacagagcccttcagaacagaggcctcatctcactgcatcccccatcaccccctagttccccaatggtcctaatttgtgttctgagatcccagtttactccgtggccaggccccacctgtgtttccaagtcgggctggagacgcaggatggggtaggccttgtgctctgagcaaccccagctctgcctcacaggcaggcaggcccggtgcaagagtggactctgggttcctaaagcaataaatgcaaacaagccaacagctctgctgcctagcaatttccatcttagccacacttctcccttcaggggcttcggaggagaggtcagggctaaggccggggatgagactgcaggagagagagcagcggagggccacattcggagcctccgtccactccagttttatcagcttttgccttttgcacggagtgctaaacaaattctagctctgtgtttttttcccattcccagatttactatcagttctccttaaaaagtatctaagctgttacagtagctttcccttcacttgattctattgtgtgttttctatgtttggaataattacacccaaatatctagatattttctcttcaccgcattttgtaaataaagagatgtgtatgcctccctgaattctcctaattatggccacctcccccaccccatctccagttctcctgccctgcaagagagcacaccccacttgccagctggtcagttcctggctggcctcgccctcgggccctggctgccgggcgccttccgctcggtggactcctgagggcaggaggctgcgggactgtcctgggcctccactggggctccctcggctggggtggctgtggctgtggcacctggacagtctttcctgcctgtcttcgtggaagcggtgggagcacccagttgtcctgggccgacttcctttgacctgtctgtggcccccagtggccacggtgagctgcaggacagccctgaggacccacttcacacaccagcgcctgagcgcctcgggccacctccctcaccagcgcctgcactcgcagaagaccagctgggcacacctgccatctggaggacccagcccacaaaccatgcagaccagggaaggaccccctccctgaagctggagacctgttgccttcatggttaatggatcctgatacctccagtctcagcgagcacacaaaggcagtggtcacctgttccacagggaacgccatggctccaggtgacccggagtggatggggcccgagaggccagcctggactgtctcctgagggcaggctccgcactcaaaatcgtgttgacaggcacccgtttaggagtggagagggaccccaccccccagctgtcctctccagcgcctgtttcccacttggccactcccagctctgcctccaggaagggtgagggcacgggtgcaccgaggggttggcgtgtgtgaccctgagctctgggtcagggcaagctcatgcatggagcaggatcacggcaggttcctggagatcaaacggcaaaggctgtaaaccaggaagccaggtcttgcctgggctcaggggcaggcactgggcccgaaggaggagggccacttcctgccagccctccaccgagctcacctatggcgcctccccaggaagtgctccggccagcccagggtaaacacgctagccctgcccctctgggaccatagcccggggacccagactcttggccacgctcattcccacccctacccaggaccggcagccggagccttgggtccctgcatgggcctggggcgccctgtgccccttcacctcgtcctcgtccagttgactgctgtggcagccggtgctacccgctgtgtccactgcaccctggccctgttctgagcggtcacagcagctggggagaagggccatcctggaagccgggcagatgaggacggaaccagacagtcccactgtggtgggcagaggtggggcctgggcctgaccacggggcagtgcaaggagagaggcatcctgagagggcctgaggtgtccccacctcccctgacaccccatccctcagtgcccaggctgggcagaaaggggggcctggaggagcagctgcactgtgaactcagggctccaggcctggggtgggcatggctgggtcctgcctgacacccacccactcaccgaagcctctgcccctgggcctgcggtgggcccggtaagggaagtgactctgccccatgcctggggcacctgaggggtgcacctggcccggcggaggctctgacctccccagggctggagccctccccagcaatgcgccagcgctgcccccgaagtcccattggcagcgttcccccgtcccccggcctgctggggcgcagctaggccctgcccaaggaagagctcgaggcctcgccctgctcatcccgcggaggcggccctgcgccccgcctgtccccagcgccccagctctaggggctaggcccgcggaggggcacaccaggcgggtgttggggaggacgcagagggctggggctggagcccaggcggggcagggggcggggcggagctgggtccgaggccggcgggggcgcctccatcccacgccctcctcccccgcgcgcccgcccgctctcgggtgactccgcaacctgtcgctcaggttcctcctctcccggccccgccccggcccggccccgccgagcgtcccacccgcccgcgggagacctggcgccccggccgaggcgcgaacaga

SEQ ID NO: 5578 - DNA, 6000 bp, Homo sapiens
ttttgtgtatttagtagagacagggtttcaccatgttagccaggctgatcttgaactcctgacctcagatgatccgcccacctcggcctcccaaagtgctgggattacaggcgtgagccaccacacccggccctgtttttttttttttagtagagacggggtttcaccatgttagccaggatggtctcgatctcctgacctcatgatccacctgcctcggcctcccaaagtgctgggatcacaggcgtgagccaccgcacccggccatttttgttttgtttttttgagatggagtctcactctgtcacccaggctggagtgcagcggtgcagtctcggctcactgcaacctccgcctcctgggttcaagcaattctcgttcctcagcctcccaagtagctgggattacaggcttccaccaccacaccaggctaatttttatatttttggtagagatgaggtttcaccatgtgggccaggctggtctcaagctcctgacattaaatgttccacctgccttggcctcccaaagtgttgggattatgggcctgagccaccgtgcccagccaatactttggcttttaaccagaacatttagtctaatgcatttaacgaatttactgctatatatatatatatttttttttttgagacacagtctcattgtgtcgcccaggctggagtgcagtggtgcgatcatgactcactgcagcctctgcctcccaggttcaagtgattctcgtgcctcagccttcctagtagctgggacttcaggcgcgtgccaccacgcctggctaatttttgcatttttagtagaaagaagattttatcatgttggccagactcgactcaaactccagacctcaggcgatccgcctgcctcagcctaccaaagtgctgggattacaggcatgagccaccatgcccagcccatttttcccactatactagtttgaaagttaaattctcttttcctattagtattattttagtgatctccctagaaattaccacatgcattcttaacttaccaaagtgtcatgctcataaatacctttacggaaggatagagtttcctgagatggaggcaggaagagagaacattccaagctagatgaacagggaagcaagcagatgaacaggggaagatttaattgctatctgagtcagagtgaggctagagcaagatgagtgagctgggggtgggtggtttaaagccatccaggaaggatgtcttggtcatgaaaaagatctttgagaagaacaagaataactcctcctcaacccaggaaggacactgattttcctgaggcttcccaggaggcagtggcagagcttggtctaaagctggatgtctttagcagtctatgtccctgcctctatacctaccccagccatgctcactgtgtcccctttctagcaattcctcaatctctgcttacctgtctaaatactgcccattcttcaaaacccagttccattaaatcaacccaacaaatattttctttttatttttgtattttgtatttttatttttaatttgtatttatttatttttttgaggtggagtctcgctctctcacccaggctggagtgcagtggcgcaatgttggctcactgcaacctccgcctcctgggttcaagcaattctcctgctttagcctcccaagtagctgggattacaggcgcccgccaccaggcctggctaatttttgtatttttagtagagatgtggttttgtcacgttggccagactggtctcgaactcgtgacctcaggtgatctgctcacatcagccttccaaagtgctgggattacaggcgtgagccaccgcacccggcccaagaactctttttatttcttttatcttccctcacataaatcaaggtaggcgaggtctttcaaactgatagtgaaataaagagatttcagaaagggtcggtgacagccaaggtcagacaatacaaaaaaagttcaggacgagttcacactgtggctgacatgtctaatcataatgaccatcatgtactgagtacctcccacatggctggcacactgctacattacctctaatacaacaaccctatgatgtggatattcttttttttttttttttttttgagactgggtcttgctctgtcactcaggctgttgtggagtggtatgatctcagttgactgcaacctctgcctccagggttcaagcaatcctcccacctcagcctcctgagtagctgggaatacaagtgtgtgccaccacacccagctagttttctgtattttttggtacagatgctgttgccatgttgcctaggctggtcttgaactcctgggctcaagtgatcctcctgccttggcctcccaaagtgctgggattacaggtgtaagccaccacacccagtgtggatattcctaaatcaattttacaggctgggcacggtggctcatgcctgtaatcccagcactttgggaggccaaggaaggaggatcgcttgagcctaggagttcaagaccagcctgggcaagacagtgagaccttttttttttgagacacggtcttgctctgtcttcaggctggagtgcagtggcgcgatctcggctcactgcaacctctgcctcccaggttcaggtgattctcctgcctcagcctcccaagtagctgggactacaggtgcgcgccatcacgcctagctaatttttgtatttttagtagagacagggtttcaccatgttggctaggattgtctcgatctcttgaccttgtgatccgcccaccttggcctcccaaagtgctgggattacagatgtgagccaccacgcccccgcgagaccttgttttaaataaataaataaaaccattttatagacgaggaaacagaggctcagggctatatggagaattgcccatatttcccaaatcaccagagaattaaagaattaatctaaattagagcacctcaaggtttgggcattgggggtagtctagaggcagggagaggggacccagcctcagggaatggtacttagggccaagagaacagacaaggtgtcaagatagggaacaatagccaggagcagacacccctggttggagctagacaaagaggatgacatgaagccccaaggcagaaaacctgaatctagttgccaaatttggagagaggtagttctttttgtaaagttttgctagtccatttgtcctgggaccttaaagaacaggataggggagaactcaaaatcaagaaaagtagtttttagaacaagacactctgagtgcgcaccttctccagacttcggagcccctcagagtgcgtctgaggtatctctgggtcctccaccattgctccacatgaggcctgtcaaagagagggcctagactgggtgaatgaacaaaagtgaacacatgaaaaagagctctggcaaattaatcaacaaatgctaagtggcattaacagcatatagtggattatgtgaattatctcaggtaccagacttgagtcctggttctggcatgtattagctgtgtaagtaggtaacttggtttccctgttttccattgtaaaatgaggatattaaatagtatctactggcggaggctcatgcctgtaatcccagcactttgggaggccaaggcaggtggatcacctgaggtcaggaattcgagaccagcctgaccaatatggcgaaaccccatctctactaaaagtacaaaaattagccgggcatggtggtgccgcctgtattcccagctacccgggaggctgagataggagaattgcttgaacccgggaggtggaggttgcagtgagccgagatcgtggcactgcactctagcctgggtgacagagtgagactctgtctccaaaaaaaaagagagaaagaaagaaaaaaaaaaggccaggcgcggtggcttacacctgtaatcccagctctttgggaagccaaggcgggggcagatcacgaggtcaggagtttgacaccagcctggccaaaatggcaaaacctcgcctctactaaaaactacaaaaattagctgggcgcagtagcgggcgcctgttaattccagctactcgggaggctgaggcaggagaatcgcttgaaccctggaagcggaggttgcagtgagccgagatcgtatctattttcacaggtttttttttttttttttaatggagtttcgctcttgtcgcccatgcttgagtgcagtggtacgatctcagctcactgcaacctctgcctcccgggttcaagcgattctcctgcctcagcctcccaagtagctgggattacgggcgcccgccaccgtgcccggctaatttttgtatttttagtagagacggggtttcgccatgttggccaggctggtgtcaaactcctgacctcaggtgatccgcccgcctcggcctcctaaagtgctgggattacaggcgtgagctaccgcgcctggccctcacagggtttttatgaggattaaataaatgagataagaagtaagagtgcctgggatatactgggtgttcagaatgtgttattgctgtgaggatttaagtggaaaagtgcgatgttaggtatggctaacttagaggtcctccacccgctgcagatgctctgactacccaccagtgtgcttgcaggaggaattcttggtcccttcaccctccttccctgttgggctgggatggtctttgcaaagggagccaggggtccccctcaagttctttcatgggtcagtcatggtcagggtagggagggaactctggcagctggttttgggggatcaatcctctcattgtggggagacccaaggctggtggctggaaatcctttctgcgctacgtaggacagggcgccctctcctgaacaaaggcgggaacagctctaggccagagtttctgggatgtgcctcaccgggtctcactgcctgcaaaggtgctcttcccattgctgaaatgtccccaaccgccctgacgagcaaagtttgggggaggggcgccagggctgggaggaaactggcttaatgtttcagaagggcgaggctggatagttcggttagaatggaggtgcgaggcaggagagacgggcggatgagaaagaaatccggcccctgttgaattaattttgtgttctttcaacaggtagatggaacgcagctgagaggtaaggcgacaaggtggcttatccaacatgctcaaactcaggtatccagagctcttccggctgccctcacgcagccgaaattagtgggggcagacccgggctgtaaagcatggtttgaggacacgccagattgaggaggagagccaggggtcggggtctccagaagcggggaggagccagcggaggatctgggcgcagtttcctctctaagttccgccccgagagcgccggccccgcccccgccgttcgcgctctgaccagcccgcagagccagcccccgaccccgggccacctgggcccccgggttccgccggcactctcgccaccaccgcgtgggtgagtatgggcatggatgtgctgggctgccgggcagccccactcgggagcttggccgcgcggtctggcctctgcagggccgggccccacgctgtgggagtcctggtacctgccgtcctatcgcacacactctgtttcccaggaactgctgctctctggacttgccgagctggcccccttcttctccctccccagcgtggggccgggtgtgcaggggttgagctctccctttattccgcggggcctcctggtcaggagtcctaggtggggaggatggggccccggggttggaaccccatagagtagttttgaatggcagctgtgccatttattagccttggccttgagtaagtgttttgaacctccctgagcctcagtttcctcatctgtaaaatggaaatatacaggctgtagcacctacctcatagaattatggtgagattaaaagagacaatgtatatcaagtacagagcagggggcctagtattccgtaggcactcagtaaatgt

SEQ ID NO: 5579 - DNA, 6000 bp, Homo sapiens
cctgtctgtggcccccagtggccacggtgagctgcaggacagccctgaggacccacttcacacaccagcgcctgagcgcctcgggccacctccctcaccagcgcctgcactcgcagaagaccagctgggcacacctgccatctggaggacccagcccacaaaccatgcagaccagggaaggaccccctccctgaagctggagacctgttgccttcatggttaatggatcctgatacctccagtctcagcgagcacacaaaggcagtggtcacctgttccacagggaacgccatggctccaggtgacccggagtggatggggcccgagaggccagcctggactgtctcctgagggcaggctccgcactcaaaatcgtgttgacaggcacccgtttaggagtggagagggaccccaccccccagctgtcctctccagcgcctgtttcccacttggccactcccagctctgcctccaggaagggtgagggcacgggtgcaccgaggggttggcgtgtgtgaccctgagctctgggtcagggcaagctcatgcatggagcaggatcacggcaggttcctggagatcaaacggcaaaggctgtaaaccaggaagccaggtcttgcctgggctcaggggcaggcactgggcccgaaggaggagggccacttcctgccagccctccaccgagctcacctatggcgcctccccaggaagtgctccggccagcccagggtaaacacgctagccctgcccctctgggaccatagcccggggacccagactcttggccacgctcattcccacccctacccaggaccggcagccggagccttgggtccctgcatgggcctggggcgccctgtgccccttcacctcgtcctcgtccagttgactgctgtggcagccggtgctacccgctgtgtccactgcaccctggccctgttctgagcggtcacagcagctggggagaagggccatcctggaagccgggcagatgaggacggaaccagacagtcccactgtggtgggcagaggtggggcctgggcctgaccacggggcagtgcaaggagagaggcatcctgagagggcctgaggtgtccccacctcccctgacaccccatccctcagtgcccaggctgggcagaaaggggggcctggaggagcagctgcactgtgaactcagggctccaggcctggggtgggcatggctgggtcctgcctgacacccacccactcaccgaagcctctgcccctgggcctgcggtgggcccggtaagggaagtgactctgccccatgcctggggcacctgaggggtgcacctggcccggcggaggctctgacctccccagggctggagccctccccagcaatgcgccagcgctgcccccgaagtcccattggcagcgttcccccgtcccccggcctgctggggcgcagctaggccctgcccaaggaagagctcgaggcctcgccctgctcatcccgcggaggcggccctgcgccccgcctgtccccagcgccccagctctaggggctaggcccgcggaggggcacaccaggcgggtgttggggaggacgcagagggctggggctggagcccaggcggggcagggggcggggcggagctgggtccgaggccggcgggggcgcctccatcccacgccctcctcccccgcgcgcccgcccgctctcgggtgactccgcaacctgtcgctcaggttcctcctctcccggccccgccccggcccggccccgccgagcgtcccacccgcccgcgggagacctggcgccccggccgaggcgcgaacagacggacgcaccggcgagcgccgaggggacaggccgagcgcggggcgccggaggcaggtgagcgctgcggacacgggggagcgcgcccgcccgggcctcagtttacccggtggcgatgggacgcggggcttctggttcaggacaccgggacgaacgcggcgtcgcagggcgcggggcacttggagggcggccgggccgagggcgcggggcaaggggctgggggcctggtcgagtccccacctctcctggacgggtcctgctgcagcccggcctgcccccgtcggtcctgggcggcggccggcgagcaaggatatttttaagccagcgatgggtgactcacctgccccgtcctgcccactcccagctctggggcttggtgggggcaatccctgcgtccggagagcgctggtggtagggaggcttctcccggttctgtgagcagcaggaccctcccgagggcctgaccgtggaggtagcactgcacacccactccctgtgggccggagccaggaggcacttcctgggtgtcggagcccagaaggaaaccagtggccgggaagcaccagctgggtcagtctccaggtcagggttgggggtgggagtttcagggaggaggggaggctgggacaggggctgcagaggccctgccaggagaggcaggagggtgggctggcaggagcctgtgggcacgcgaacttcagccatcctagattcctggtccctgcgtccagctgcctggcgttgccccttgctgcggggtgtccctggtggcaggggagggggaggcagggccgggcatgcccggacctctgcccccacccaccccgtgctcagtcctgggtcggctgtgctgggaggcaggcccagctggcggcggcccctcccctcgcggcccctcctcccctcgcggcccctcctgggtcccagcctctcccgggcctgcttagcacccaggccttgttggcatagctctcccaccgggccttctccgcctgcctcggtctcctttcccaccctcagcttccccagcttatcccttcctccctcaagccatagcttccaaacaaggacagggccagggcctgaggggcctccccattccagggccccacccagcgcctatgagggcagcctggagcccctgtgactcagctgacccctccccaaggtcactcagcatgtggagctggaacttgaacttggagcccgtccctctaccctcctgccctgctgggacctcctcccctccacagcccgactgaccgggcaccccgctctgcctcacttcacaccgggaaaatgaccacagtacaaagtgcagcctgggcctccagggcttcgtccccaccaccagtgggccaaagaagcctccccaggggggcggggctcccacagggcaggaggcagccccatacccatgtgcttcagacccagacaccacacctggacccaccccactgctgcccggccctgcctgggcctgaggtccccgatgccctgcaggcaaccgaaggccaggaacctggccttccccaggggggtcgcgtgtcacagccctccatgtttgcgtgcccccaggcctgagtctgcaagggtgcgttggtgtctcgcccaggtgtgtgcctggacacacgtgcctggcgcccttggtggagcccgccaggaatcccattaagcaaacactcaggctcgccactgagcccgtgaacattccagacattctccacggatagatggatggaggaagtggccataccccctggtgcacccagcccctcatgtcagcggcagtgcccccgggcctcccagaccctcccactaggccagacctggtcaaaccagaaagtcccgggtgctccgagccactcccttgaccctccataccaacagcagtggctggtgacccccaccgtggcagacccaaactctgaagccacaggggacagccctgcagccctggcaggaggcagatggtgtggacctgtggggagctgatcacagagccacagaacagccaggtccccacagggcatagtccccttgggacaagtcagcctggttcagggccatcaggctctgtccatccccccgggaagcccctagggtccagcccaaatcagacccacctgtctgccctggcggctgggccttagtttccccaaaatgctcggggaagaggtcagcactaggagcccagagacaggctctgaggattctgcccctgggggaggccagaggcacctgccccatagccaccctacctcgttggaggggcagtgatactgtgtgttggggccactggactggctcccagtctcagcccccaccacacctgccctccagtccctcccctaggcttggctgctgccaggggttctgcgctggccacctggccgcatccctgccctcgaggtgaggaaacactgcaccccggggaccccagggtttcctgcccgcacagcctcttccctgccaggtctcccaggcccaggaaagagccaagggccagcctctttgctggggcctggacagaggtggcatgtgtgggtggcaagtccacatgtgggtgcaggagccccttggggtgcaggcctggggtggggcaggagtggcggctagagccgggctccctctggacttcaggacctaccccaactccagcctcacctctcctgccatcctgcagctcccacccgccctcccccaacccccaccgcacccccctccccccacactcccacctcatccccctccccttacccatcccacccccctccccacagcaccagggccttaaactccatgctgcccagcttggaaggcgccttctgcccccagggcccttgtcagagcctcccagtcagcctctggggggtccctgtggagcacctagggtctgaggcatgacgaggctgatcgactgtcaactgggacgtggggccaactgggacgtggggccaactgggatgtcgggcaggggctctgccccccaagggacccccacccaggccaggccagtcagggatctggcccagggaaggaggggaggaaccagccaggccggaggaagtgtcagcgcagcccttctgtccacccaggtgtgggacaggcactggcctcagaccggggccacactgaggtctgcccttctcccgctggccgccacccaagacaccatgagccagtccggggccgtgagctgctgcccgggtgccaccaagtgagccctcccacccatcccgaataccccaccctcaccctctgaacagtccccagggaggggtgcagtttggccctgccctgacagcccctcccctgcagtggcagcctgggccggtccgacggtgtggccaagatgagccccaaggacctgtttggtgagtgaggtttgagaacgggctggacgtcacaggggagaaatgggcactgcatccaggtgggggacagctgctcctgccccacagctgtgcctggtctggcccaggggatctccgggtgcccagggaggcctctggaccctaatcaaccttccgaaagctcctggccactggatcccctcccccacacccgtaaggggagaggcctttactaataattcagggagcatcaatattgattccgctgcactcattgctgtaacctgatcacagcgaggttcaggcaggataagccgccaggtgtctgctccaggaggggggcctggccagcccccacctccccccactctgcccttccccagagacgaccctgccctctcgctagctagatgcacccttcacttatgtctttggacaaggtgcctagtctggaaagcgagaagacctgggagggcagggagagtgaagctggcagctctcagagtgggaagaagccgggctgggacccccttcctgtcccctcaccctccgggacagaaaccccccgggcacaggctgctggtccccactccactcagagcaagcccatcgccttctccgagctgcgtccttctccaagggggcttccctggagggagggagggggcttcctgcaggtcctgatttcacacccacatccttcctggtggccaagaggtccacggagcagcctccctccgcttgactccaccttcccttgtgggtccagtcccaactggacgggaggctgtgggtcctgcccgtcgggggagtgactggtgtctcccggttcagag

SEQ ID NO: 5580 - DNA, 6000 bp, Homo sapiens
gctttagaacttctggaattagaggacaatattaataataccatcgcacagtgtttctttgttgttaatgctacaacatacaaagaggaagcatgcagtaaacaaccgaacagttatttcctttctgatcataggagtaatatttttttccttgagcaccatttttgccataggtaaaattagaaggatttttagaactttctcagttgtatacatttttaaaaatctgtattatatgcatgttgattaattttaaacttacttgaatacctaaacagaatctgttgtttccttgtgtttgaaagtgctttcacagtaactctgtctgtactgccagaatatactgacaatgtgttatagttaactgttttgatcacaacattttgaattgactggcagcagaagctcttttatatccatgtgttttccttaagtcattatacatagtaggcactgagaactctttatatctgaataagatatttaggaaccactggtttacatatcagaagcagagctactcagggcattttggggaagatcactttcacattcctgagcatagggaagttctcataagagtaagatattaaaaggagatacttgtgtggtattcgaaagacagtaagagagattgtagaccttatgatcttgatagggaaaacaaactacattcctttctccaaaagtcaaaaaaaaagagcaaatatagcttactataccttctattcctacaccattagaagtagtcagtgagtctaggcaagatgttggccctaaaaatccaaataccagagaattcatgagaacatcacctggatgggacatgtgccgagcacacacaattactatatgctaggcattgctatcttcatattgaagatgaggaggtcaagagatgaaaaaagacttggcaccttgttgttatattaaaattatttgttagagtagagcttttgtaagagtctaggagtgtgggagctaaatgatgatacacatggacacaaaaaatagatcaacagacacccaggcctacttgagggttgagggtgggaagagggagacgatgaaaaagaacctattgggtattaagttcatcactgagtgatgaaataatctgtacatcaagacccagtgatatgcaatttacctatataacttgtacatgtacccccaaatttaaaatgaaagttaaaacaaagtataggaatggaattaattcctcaagatttggctttaattttatttgataatttatcaaatggttgtttttcttttctcactatggcgttgctttataaactatgttcagtatgtctgaatgaaagggtgtgtgtgtgtgtgaaagagagggagagaggaagggaagagaggacgtaataatgtgaatttgagttcatgaaaatttttcaataaaataatttaatgtcaggagaattaagcctaatagtctcctaaatcatccatctcttgagcttcagagcagtcctctgaattaatgcctacatgtttgtaaagggtgttcagactgaagccaagattctacctctaaagagatgcaatctcaaatttatctgaagactgtacctctgctctccataaattgacaccatggcccacttaatgaggttaaaaaaaagctaattctgaatgaaaatctgagcccagtggaggaaatattaatgaacaaggtgcagactgaaatataaatttttctgtaataattatgcatatactttagcaaagttctgtctatgttgactttattgctttttggtaagaaatacaactttttaaagtgaactaaactatcctatttccaaactattttgtgtgtgtgcggtttgtttctatgggttctggttttcttggagcatttttatttcattttaattaattaattctgagagctgctgagttgtgtttactgagagattgtgtatctgcgagagaagtctgtagcaagtagctagactgtgcttgacctaggaacatatacagtagattgctaaaatgtctcacttggggaattttagactaaacagtagagcatgtataaaaatactctagtcaagtgctgcttttgaaacaaatgataaaaccacactcccatagatgagtgtcatgattttcatggaggaagttaatattcatcctctaagtatacccagactagggccattctgatataaaacattaggacttaagaaagattaatagactggagtaaaggaaatggacctctgtctctctcgctgtctcttttttgaggacttgtgtgtgtgtgtgtgtgtgtgtgtgtgtgtgtgttgtggtcagtggggctggaataaaagtagaatagacctgcacctgctgtggcatccattcacagagtagaagcaagctcacaatagtgaagatgtcagtaagcttgaatagtttttcaggaactttgaatgctgatttagatttgaaactgaggctctgaccataaccaaatttgcactatttattgcttcttgaaacttatttgcctggtatgcctgggcttttgatggtcttagtatagcttgcagccttgtccctgcagggtattatgggtaatagaaagaaaagtctgcgttacactctagtcacactaagtaactaccattggaaaagcaacccctgccttgaagccaggatgatggtatctgcagcagttgccaacacaagagaaggatccatagttcatcatttaaaaaagaaaacaaaatagaaaaaggaaaactatttctgagcataagaagttgtagggtaagtctttaagaaggtgacaatttctgccaatcaggatttcaaagctcttgctttgacaattttggtctttcagaatactataaatataacctatattataatttcataaagtctgtgcattttctttgacccaggatatttgcaaaagacatattcaaacttccgcagaacactttatttcacatatacatgcctcttatatcagggatgtgaaacagggtcttgaaaactgtctaaatctaaaacaatgctaatgcaggtttaaatttaataaaataaaatccaaaatctaacagccaagtcaaatctgcatgttttaacatttaaaatattttaaagacgtcttttcccaggattcaacatgtgaaatcttttctcagggatacacgtgtgcctagatcctcattgctttagttttttacagaggaatgaatataaaaagaaaatacttaaattttatccctcttacctctataatcatacataggcataattttttaacctaggctccagatagccatagaagaaccaaacactttctgcgtgtgtgagaataatcagagtgagattttttcacaagtacctgatgagggttgagacaggtagaaaaagtgagagatctctatttatttagcaataatagagaaagcatttaagagaataaagcaatggaaataagaaatttgtaaatttccttctgataactagaaatagaggatccagtttcttttggttaacctaaattttatttcattttattgttttattttattttattttattttattttgtgtaatcgtagtttcagagtgttagagctgaaaggaagaagtaggagaaacatgcaaagtaaaagtataacactttccttactaaaccgacatgggtttccaggtaggggcaggattcaggatgactgacagggcccttagggaacactgagaccctacgctgacctcataaatgcttgctacctttgctgttttaattacatcttttaatagcaggaagcagaactctgcacttcaaaagtttttcctcacctgaggagttaatttagtacaaggggaaaaagtacagggggatgggagaaaggcgatcacgttgggaagctatagagaaagaagagtaaattttagtaaaggaggtttaaacaaacaaaatataaagagaaataggaacttgaatcaaggaaatgattttaaaacgcagtattcttagtggactagaggaaaaaaataatctgagccaagtagaagaccttttcccctcctacccctactttctaagtcacagaggctttttgttcccccagacactcttgcagattagtccaggcagaaacagttagatgtccccagttaacctcctatttgacaccactgattaccccattgatagtcacactttgggttgtaagtgactttttatttatttgtatttttgactgcattaagaggtctctagttttttatctcttgtttcccaaaacctaataagtaactaatgcacagagcacattgatttgtatttattctatttttagacataatttattagcatgcatgagcaaattaagaaaaacaacaacaaatgaatgcatatatatgtatatgtatgtgtgtatatatacacacatatatatatatattttttcttttcttaccagaaggttttaatccaaataaggagaagatatgcttagaaccgaggtagagttttcatccattctgtcctgtaagtattttgcatattctggagacgcaggaagagatccatctacatatcccaaagctgaattatggtagacaaaactcttccacttttagtgcatcaacttcttatttgtgtaataagaaaattgggaaaacgatcttcaatatgcttaccaagctgtgattccaaatattacgtaaatacacttgcaaaggaggatgtttttagtagcaatttgtactgatggtatggggccaagagatatatcttagagggagggctgagggtttgaagtccaactcctaagccagtgccagaagagccaaggacaggtacggctgtcatcacttagacctcaccctgtggagccacaccctagggttggccaatctactcccaggagcagggagggcaggagccagggctgggcataaaagtcagggcagagccatctattgcttacatttgcttctgacacaactgtgttcactagcaacctcaaacagacaccatggtgcatctgactcctgaggagaagtctgccgttactgccctgtggggcaaggtgaacgtggatgaagttggtggtgaggccctgggcaggttggtatcaaggttacaagacaggtttaaggagaccaatagaaactgggcatgtggagacagagaagactcttgggtttctgataggcactgactctctctgcctattggtctattttcccacccttaggctgctggtggtctacccttggacccagaggttctttgagtcctttggggatctgtccactcctgatgctgttatgggcaaccctaaggtgaaggctcatggcaagaaagtgctcggtgcctttagtgatggcctggctcacctggacaacctcaagggcacctttgccacactgagtgagctgcactgtgacaagctgcacgtggatcctgagaacttcagggtgagtctatgggacgcttgatgttttctttccccttcttttctatggttaagttcatgtcataggaaggggataagtaacagggtacagtttagaatgggaaacagacgaatgattgcatcagtgtggaagtctcaggatcgttttagtttcttttatttgctgttcataacaattgttttcttttgtttaattcttgctttctttttttttcttctccgcaatttttactattatacttaatgccttaacattgtgtataacaaaaggaaatatctctgagatacattaagtaacttaaaaaaaaactttacacagtctgcctagtacattactatttggaatatatgtgtgcttatttgcatattcataatctccctactttattttcttttatttttaattgatacataatcattatacatatttatgggttaaagtgtaatgttttaatatgtgtacacatattgaccaaatcagggtaattttgcatttgtaattttaaaaaatgctttcttcttttaatatacttttttgtttatcttat

SEQ ID NO: 5581 - DNA, 6000 bp, Homo sapiens
aaattttaacctcttttatggtagagacattgtcttgtaaactcttatttccctagtatttggagatgaaaaaaaagattaaattatccaaaattagatctctcttttctacattatgagtattacactatccatagagaagtttgtttgagacctaaactgaggaacctttggttctaaaatgactatgtgatatcttagtatttataggtcatgaggttccttcctctgcctctgctatagtttgattagtcaacaagcatgtgtcatgcatttattcacatcagaatttcatacactaataagacatagtatcagaagtcagtttattagttatatcagttagggtccatcaaggaaaggacaaaccattatcagttactcaacctagaattaaatacagctcttaatagttaattatccttgtattggaagagctaaaatatcaaataaaggacagtgcagaaatctagatgttagtaacatcagaaaacctcttccgccattaggcctagaagggcagaaggagaaaatgtttataccaccagagtccagaaccagagcccataaccagaggtccactggattcagtgagctagtgggtgctccttggagagagccagaactgtctaatgggggcatcaaagtatcagccataaaaaaccataaaaaagactgtctgctgtaggagatccgttcagagagagagagagaccagaaataatcttgcttatgctttccctcagccagtgtttaccattgcagaatgtacatgcgactgaaagggtgaggaaacctgggaaatgtcagttcctcaaatacagagaacactgagggaaggatgagaaataaatgtgaaagcagacatgaatggtaattgacagaaggaaactaggatgtgtccagtaaatgaataattacagtgtgcagtgattattgcaatgattaatgtattgataagataatatgaaaacacagaattcaaacagcagtgaactgagattagaattgtggagagcactggcatttaagaatgtcacacttagaatgtgtctctaggcattgttctgtgcatatatcatctcaatattcattatctgaaaattatgaattaggtacaaagctcaaataatttattttttcaggttagcaagaactttttttttttttttctgagatagagcattgctatggttgcccaggctggagtgcaatggcatgatccaggctcactgcaacatctgcctcccaggttcaagcgattctcctgcctcagcctcccaagtagctggcactacaggcatgtgccaccaccatgcctggctaattttctatttttagtagatagggggtttcaccatgttggtcaggctgatctcgaactcctaacatcaggtgatccaccctcctcggcctctgaaagtgctgggatcacaggcgtgagccaccacacccagccaagaatgtgaattttgtagaaggatataacccatatttctctgaccctagagtccttagtatacctcccataccatgtggctcatcctccttacatacatttcccatctttcaccctaccttttcctttttgtttcagcttttcactgtgtcaaaatctagaaccttatctcctacctgctctgaaaccaacagcaagttgacttccattctaacccacattggcattacactaattaaaatcgatactgagttctaaaatcatcggggattttggggactatgtcttacttcatacttccttgagatttcacattaaatgttggtgttcattaaaggtccttcatttaactttgtattcatcacactcttggattcacagttatatctaaactcttaaatacagcctgtataatcccaattcccaactctgatttctaacctctgacctccaacctcagtgccaaacccatatatcaaacaatgtactgggcttatttatatagatgtcctataggcacctcagactcagcatgggtatttcacttgttatactaaaactgtttctcttccagtgttttccattttagtcattagatagctacttgcccattcaccaaggtcacagattaaaatcatttccctacctctaatcaacagttcgattctgcttcaatttgtccctatctattaatcaccactcttactgcccagtcaggtcctcattgtttcctgaacaagagtagatgctattctttccacttttagaccttatcctggctggatgcggtggctcaggcttgtaaacccagcactttgggaggccaaggcaggcagatcacttgaggtcaggagttcaagaccagcctgaccaacatggtgaaaccccatctctactaaaaatacaaaatcagccgggcgtgtggtgcatgcctgcagtcccagctattcaggtggctgaggcaggagaattgcttgaacccaggaggcagaggttgcggtgagcctagattgcaccattgcactctagcttgggcaatagggatgaaactccatctcagaagagaaaagaaaaaaagaccttattctgttatacaaatcctctcaatgcaatccatatagaataaacatgtaaccagatctcccaatgtgtaaaatcatttcaggtagaacagaattaaagtgaaaagccaagtctttggaattaacagacaaagatcaaataacagtcctcatggccttaagaatttacctaacattttttttagaatcaattttcttatatatgaattggaaacataattcctccctcacaaacacattctaagattttaaggagatattgatgaagtacatcatctgtcatttttaacaggtagtggtagtgattcacacagcacattatgatctgttcttgtatgttctgttccattctgtattcttgacctggttgtattctttctgagctccagatccacatatctaagtacatctttttgcattttacaagagtgcatacaatacaatgtatccaagactgtatttctgattttatcgtaccactaaactcacaaatgtggccctattcttgtgttcacgactgacatcaccgtcatggtccaagtctgataatagaaatggcattgtcactttcttccctactgcaacagaagcccagctatttgtctcccattttctctacttctaaaatacatttcttcactaagtgagaataatcttttaaagacacaaatcaaaccatgccaccacctttcttgaattattcaatatctttcgttggcttccaggttacagaaaaataacttgtaacaaagtttaaaggtcattcatggctcctctctaccctattttataacatttccccttgtgatcagaatctcaggcacatcatccatctttctatatacaaataaagtcatatagtttgaactcacctctggttacttttaatcaaccaaatgctgtaaaatgcatttgtatcgctacgtgttaagcagtagttgattcttttcatttctgtgtaatattctattctttgactataccgtaatttatcaattctactgttggtaagcatttaagtggctaccggtttgaggtttttatgattattgctgtcataagcatttctatacatgtctttggatacacacatgcatgtgtttctgaatatctaaaaatgtaattgctaggtaatagacttatcaagcatccagcatttgtggatactattaaaggttttccaaaggggttatactattgtacagtgtcaccaacagagtttgagtttctattgatccatatcaccaccaaaatttgaactgtcagtcttatctcttctcttgtctcttttttcctcttttttttccttcccttcccctctcttcgtttcttttctctcctcttctcttctttcctctcttcccttccctttctctttctcttccctatcccttctcctctcctctcccctccttttttctcctctcctctccattatttatttttccttcttctcctccatcccttccatcctctctcttcccctcttccttccttcctttctccatttcttcctcctctttccttcaatccttccttttggatatgctcatgggtgtgtatttgtctgccattgtggcattatttgaattcagaaaagagtgaaaaactactgggatcttcattcctgggtctaattccacatttttttttaagaacacatctgtaaaaatgttctgtactagcatattcccaggaacttcgttaaatttaatctggctgaatatggtaaatctacttttcactttgcattctttctttagtcataccataattttaaacattcaaaatatttgtatataatatttgattttatctgtcattaaaatgttaaccttaaaattcatgtttccagaacctatttcaataactggtaaataaacactattcattttttaaatattcttttaatggatatttatttcaatataataaaaaattagagttttattataggaagaatttaccaaaagaaggaggaagcaagcaagtttaaactgcagcaatagatttgtccattccaacctctcaaaattcccttggagacaaaaatctctagaggcaaagaagaactttatattgagtcaacttgttaaaacatctgcttttagataagttttcttagtataaagtgacagaaacaaataagttaaactctaagatacattccactatattagcctaaaacacttctgcaaaaatgaaactaggaggatatttttagaaacaactgctgaaagagatgcggtggggagatatgtagaggagaacagggtttctgagtcaagacacacatgacagaacagccaatctcagggcaagttaagggaatagtggaatgaaggttcatttttcattctcacaaactaatgaaaccctgcttatcttaaaccaacctgctcactggagcagggaggacaggaccagcataaaaggcagggcagagtcgactgttgcttacactttcttctgacataacagtgttcactagcaacctcaaacagacaccatggtgcatctgactcctgaggagaagactgctgtcaatgccctgtggggcaaagtgaacgtggatgcagttggtggtgaggccctgggcaggttggtatcaaggttataagagaggctcaaggaggcaaatggaaactgggcatgtgtagacagagaagactcttgggtttctgataggcactgactctctgtcccttgggctgttttcctaccctcagattactggtggtctacccttggacccagaggttctttgagtcctttggggatctgtcctctcctgatgctgttatgggcaaccctaaggtgaaggctcatggcaagaaggtgctaggtgcctttagtgatggcctggctcacctggacaacctcaagggcactttttctcagctgagtgagctgcactgtgacaagctgcacgtggatcctgagaacttcagggtgagtccaggagatgcttcacttttctctttttactttctaatcttacattttggttcttttacctacctgctcttctcccacatttttgtcattttactatattttatcatttaatgcttctaaaattttgttaattttttatttaaatattctgcattttttccttcctcacaatcttgctattttaaattatttaatatcctgtctttctctcccaaccccctcccttcatttttccttctctaacaacaactcaaattatgcataccagctctcacctgctaattctgcacttagaataatccttttgtctctccacatgggtatgggagaggctccaactcaaagatgagaggcatagaatactgttttagaggctataaatcattttacaataaggaataattggaattttataaattctgtagtaaatggaatggaaaggaaagtgaatatttgattatgaaagactaggcagttacactggaggtggggcagaagtcg

SEQ ID NO: 5582 - DNA, 6000 bp, Homo sapiens
tttctagagcattttgcatttctataagtgcatccattcatccattgtttcctgaagttttgaatgttttttatttatgctatctctttaactgaagatttctcccctcatttcttgtatcatatttttggtttttttaaaattggacttcaccttcctcggatgcctccttgattagcttaataactgaccttctgaattatttttcaggtaaatcagggatttcttcttggtttggatgcattgctggtgagctagtatgattttttggggggtgttaaagaaccttgtttttcatattaccagagttagttttctggttccttctcacttgggtaggctctgtcagagggaaagtctaggcctcaaggctgagacttttgtcccatgaggtgttcccttgatgtagcacagtcccccttttcctaggcgtggggcttcctgagagccgaactgtagtgattgttatctctcttctggatctagccacccatcaggtctaccagactccaggctggtactggggtttgtctgcacagagtcttgtgacgtgaaccatctgtgggtctctcagccatagatacaaccacctgctccaatggaggtggcagaggatgaaatggactctgtgagggtccttacttttggttgttcaatgcactatttttgtgctggttggcctcctgccaggaggtggcactttctagaaagcatcagcagaggcagtcaggtggtggtggctgggggggctggggcaccctagaactcccaagaatatatgccctttgtcttcagctaccagggtgagtaaggaaggaccatcaggtgggggcaggactagtcgtgtctgagctcagagtctccttgggcaggtctttctgtggctactgtgggaggatgggggtgtagtttccaggtcaatggatttatgttcctaggacaattatggctgcctctgctgtgtcatgcaggtcatcaggaaagtgggggaaagcaagcagtcacgtgacttgcccagctcccatgcaactcaaaaggttggtctcacttccagcgtgcaccctcccccgcaacagcaccgaatctgtttccatgcagtcagtgagcaaggctgagaacttgccccaggctaccagctgcgaaaccaagtagggctgtcctacttccctgccagtggagtctgcacaccaaattcatgtccccccaccaacccccccactgcccagcccctagatctggccaggtggagattttctttttcctgtcatcttttcccagttcctctggcagccctcccaaatgacccctgtgaggcaaggcagaaatggcttcctaggggacccagagagcccacagggcttttcccgctgcttcctctacccctgtattttgcttggccctctaaattgactcagctccaggtaaggtcagaatcttctcctgtggtctagatcttcaggttccccagtgaggatgtgtgtttgggggtagacggtcccccttttccacttccacagtttgggcactcacaatatttggggtgtttcccgggtcctgcaggagcaatctgcttctttcagagggtgtgtgcgttctctcagctttcttgatttatttctgcaggtggttctgcaaaaaaaattcctgatgggagacttcacatgctgctctgtgcatccgagtgggagctgcaatgtacttctgctgcctcccatctgccatcaccctctaatttgtcggtaatatgcatttttaatcaatctttttttctctctctctctttttcttctcccccaaaactatactgccctttgatatcaaggaatcaaggacgtgatgttgaggggtgggcagtggatacactctttaccccttagggagctatatctagatttagatattgccaattcaagataacttaattgaaagcaaattcataatgaatacacacacacacacacacatctgcatgacaagatttttaatagttgaaagaataactaataattgtccacaggcaataagggctttttaagcaaaacagttgtgataaacaggtcattcttagaatagtaatccagccaatagtacaggttgcttagagattatgtcattaccagagttaaaattctataatggcttctcactccctaccactgaggacaagtttatgtccttaggtttatgcttccctgaaacaataccacctgctattctccactttacatatcaacggcactggttctttatctaactctctggcacagcaggagtttgttttcttctgcttcagagctttgaatttactatttcagcttctaaactttatttggcaatgccttcccatggcagattccttctgtcattttgcctctgttcgaatactttctccttaatttcattcttagttaataatatctgaaattattttgttgtttaacttaattattaattttatgtatgttctacctagattataatcttcagaggaaagttttattctctgacttatttaacttaaatgcccactactttaaaaattatgacatttatttaacagatatttgctgaacaaatgtttgaaaatacatgggaaagaatgcttgaaaacacttgaaattgcttgtgtaaagaaacagttttatcagttaggatttaatcaatgtcagaagcaatgatataggaaaaatcgaggaataagacagttatggataaggagaaatcaacaaactcttaaaagatattgcctcaaaagcataagaggaaataagggtttatacatgacttttagaacactgccttggtttttggataaatggggaagttgtttgaaaacaggagggatcctagatattccttagtctgaggaggagcaattaagattcacttgtttagaggctgggagtggtggctcacgcctgtaatcccagaattttgggaggccaaggcaggcagatcacctgaggtcaagagttcaagaccaacctggccaacatggtgaaatcccatctctacaaaaatacaaaaattagacaggcatgatggcaagtgcctgtaatcccagctacttgggaggctgaggaaggagaattgcttgaacctggaaggcaggagttgcagtgagccgagatcataccactgcactccagcctgggtgacagaacaagactctgtctcaaaaaaaaaaaagagagattcaaaagattcacttgtttaggccttagcgggcttagacaccagtctctgacacattcttaaaggtcaggctctacaaatggaacccaaccagactctcagatatggccaaagatctatacacacccatctcacagatcccctatcttaaagagaccctaatttgggttcacctcagtctctataatctgtaccagcataccaataaaaatctttctcacccatccttagattgagagaagtcacttattattatgtgagtaactggaagatactgataagttgacaaatctttttctttcctttcttattcaacttttattttaacttccaaagaacaagtgcaatatgtgcagctttgttgcgcaggtcaacatgtatctttctggtcttttagccgcctaacactttgagcagatataagccttacacaggattatgaagtctgaaaggattccaccaatattattataattcctatcaacctgataggttaggggaaggtagagctctcctccaataagccagatttccagagtttctgacgtcataatctaccaaggtcatggatcgagttcagagaaaaaacaaaagcaaaaccaaacctaccaaaaaataaaaatcccaaagaaaaaataaagaaaaaaacagcatgaatacttcctgccatgttaagtggccaatatgtcagaaacagcactgagttacagataaagatgtctaaactacagtgacatcccagctgtcacagtgtgtggactattagtcaataaaacagtccctgcctcttaagagttgttttccatgcaaatacatgtcttatgtcttagaataagattccctaagaagtgaacctagcatttatacaagataattaattctaatccatagtatctggtaaagagcattctaccatcatctttaccgagcatagaagagctacaccaaaaccctgggtcatcagccagcacatacacttatccagtgataaatacacatcatcgggtgcctacatacatacctgaatataaaaaaaatacttttgctgagatgaaacaggcgtgatttatttcaaataggtacggataagtagatattgaagtaaggattcagtcttatattatattacataacattaatctattcctgcactgaaactgttgctttataggatttttcactacactaatgagaacttaagagataatggcctaaaaccacagagagtatattcaaagataagtatagcacttcttatttggaaaccaatgcttactaaatgagactaagacgtgtcccatcaaaaatcctggacctatgcctaaaacacatttcacaatccctgaacttttcaaaaattggtacatgctttaactttaaactacaggcctcactggagctacagacaagaaggtgaaaaacggctgacaaaagaagtcctggtatcttctatggtgggagaagaaaactagctaaagggaagaataaattagagaaaaattggaatgactgaatcggaacaaggcaaaggctataaaaaaaattaagcagcagtatcctcttgggggccccttccccacactatctcaatgcaaatatctgtctgaaacggtccctggctaaactccacccatgggttggccagccttgccttgaccaatagccttgacaaggcaaacttgaccaatagtcttagagtatccagtgaggccaggggccggcggctggctagggatgaagaataaaaggaagcacccttcagcagttccacacactcgcttctggaacgtctgaggttatcaataagctcctagtccagacgccatgggtcatttcacagaggaggacaaggctactatcacaagcctgtggggcaaggtgaatgtggaagatgctggaggagaaaccctgggaaggtaggctctggtgaccaggacaagggagggaaggaaggaccctgtgcctggcaaaagtccaggtcgcttctcaggatttgtggcaccttctgactgtcaaactgttcttgtcaatctcacaggctcctggttgtctacccatggacccagaggttctttgacagctttggcaacctgtcctctgcctctgccatcatgggcaaccccaaagtcaaggcacatggcaagaaggtgctgacttccttgggagatgccataaagcacctggatgatctcaagggcacctttgcccagctgagtgaactgcactgtgacaagctgcatgtggatcctgagaacttcaaggtgagtccaggagatgtttcagcactgttgcctttagtctcgaggcaacttagacaactgagtattgatctgagcacagcagggtgtgagctgtttgaagatactggggttgggagtgaagaaactgcagaggactaactgggctgagacccagtggcaatgttttagggcctaaggagtgcctctgaaaatctagatggacaactttgactttgagaaaagagaggtggaaatgaggaaaatgacttttctttattagatttcggtagaaagaactttcacctttcccctatttttgttattcgttttaaaacatctatctggaggcaggacaagtatggtcattaaaaagatgcaggcagaaggcatatattggctcagtcaaagtggggaactttggtggccaaacatacattgctaaggctattcctatatcagctggacacatataaaatgctgctaatgcttcattacaaacttatatcctttaattccagatgggggcaaagtatgtccaggggtgaggaacaattgaaacatttgg

SEQ ID NO: 5583 - DNA, 6000 bp, Homo sapiens
atcggagagtaaaatagacaaagtcctttaggggcttacattccagtagagggatgctaacatttaaaatatatagtatattagtaaaggatacatttcttggagaaaatttacagctgtgaagggagattttgagtgttagggtttgcaatttaaatagggtggtcaaggaaggtgacatttgagcagacttgaaaaggtaatttaattacttacgttgatttaattatcttgctattaatctgatatattctcatttttacaaatgcggccactaagaatcagagaaattaagtgatatgtccaaaatcacaagataccttagtaagagactgtaaaaagagacttggtcttttgttggggctaaagaatgttttccacttaacacaaatagccttggagggcaaacatttttctaataagggtatttgaatgaaagtggagtggcaaatcctcaactcaaattcttcaaccttccagcattctcagattacctttccctttgagagatagagagggagaagaaggaaggaaggaaggaaggaaggaaggaaggaaggaaggaaggaaggaaggaaggaaggaaggaagaaggaaggaaggagagaaaagaggaagagaaaaaagaaaaataaagaaaagaaagctcaaccttctgactttggtagaatcgaataccaagtggtcttttcctcttcaacctcaagactgtaaagatcccaggagatctttctccaatttctgtttctgctgtattctctacgtcctttgtgagttttacctcctctaacagttatccatctctaccaccattttgagcctaaagtggaacacaaacttctttccctttaatttaatgataaaatacaatacaatgtcaatgatgtagcaagttttccctaaacactgggagtaaagaaggaatttatcccccagcacagcacaacaaaaaatatttaatatgagttattcccattattaaaatctcatcagctcttccttacaatgggatattttttgagaaacgtccgtgccaccagccagatttttgtgccacttctttgtcttcactcctatgacaagtctccaatatcattcccatggactaaaaagaaaaaaaaaattaaaggtctgtttattcgcaagcagagttcttttatcttccccacctgctcatcagatcaactctttctatattcataaagatatcagccaatcaagaagccgctgttgtaggccatatcttttatagcttacaggaagaggagaacttctggatttgcagtcttttgtcttttatgataaaattattggacatggttttttccctatcaatctctgtaagcagaagtaagcattatattgaattatcctcttcaggataggaattactcaattcctcctggaaggaggcaatggccacagttgctttgcagtttgtttttttaacccataatttctgttaaagtatagtttggcatcaccaatttgcctcccaggaatttgtttgataggcatgctcattgagagaaagctctatggggaggactactttcactatctcaattaagcagcttattcacattgtgaggaattctttgagccatccttaatattcattggactgaaatatgtaaaaattattataataatttttctgaaacatagttttaatcttgccacttcctagtttaaaataaaaacagggccgggtgcggtggctcacgcctgtaatcccagcactttgggaggccaaggcgggcggatcacgaggtcaggagatcgagaccatcctggctaacatggtgaaaccccgtctatactaaaaatacaaaaaattagctgggtgtggtggcaggcgcctgtagtcccagctgctcgggaggctgaggtcggagaatgctgtgaacccgggggcggagctggcagtgagctgagatcgagccactgcacgctagcctggccgacagagtgagactctgtctcaaaaaaataaaaaaaaatgaaataaaaaataaaaatagagcaaaataatagccattttattcttgtacaccactcctactcccattggctttgagaacagatgaaggaagacaccaatttagtgaaagtctagtctcaaatgaccaaggcttgttcatgtgcattttcttctctttgatcccaggccaaaataaccatggtgtgcagagttcactcttagcaacattgcaacaatggtgttttttgttttgttttgttttgttttgttttgttttgttttgtttttaatgccccatttcttccagttctttacctttttctcttttggtagcatttgatatcatcaaactctttctttcccattacaacttgttgcatgcaaattgctgaactattttaccttgcggagactactaatgttagcaattacaaatttaacttgttaagcatgtgagtaattgagtagcaggaccttgttaaggccatgtatgagtaacaggtgatggtgtttatattctgacagggtctcaagccttacactaaatgagtcaaatacaaatggcagtattctgtgcacatgagagagggtagaggcgctacagggatttcttcaggtcgaagaagcatattttccctccttctcgctatattaacatttctgatatagaaatgtgccttctaattaatgaggtcattgaatgtactggggttttttttttttcacctgaaaagttatgaattgctgctgtgctttacaatctgcatgaactttgcatggagtgagtctttatggaattaagaagagcgtttgaggacaacgaatgctaccaaagggagaaaagggtaaatatgtagaaaataactgaaaattaaattactgaattgatgctgtgccttataatcaacaaaatgttgaaagcaaggaatactttcctaagaggcataaaggtttcttcatatcccaggtattaaccaatctgctccctaccacttcaaaattcaagactaattggagtcatgcagataatactgttactacacaaagtttaattaaaaccatcagtactcattaactcttttgttataggtttctagtatgtacctttagaaagttattgatgataatgttttgaaccattcttaacctgacttatacaaggggattacatgttttatagattgaatattaaccattaggtagtgtaaatattaaactataaaggagtcaagtttctgaaagctaaaaaagttctgattttctgctgagatcacaacaaaaacctcatatataattggaatacttcatgatacaaataattaaaagcccaggttaaggtaaatatattaaagaccaagatttgcagtaacatttatcatatcaaatctccaaatctagtggaggaatttaaacagaggacacagacagctcttgggagagtcttcatatttttattggtaactaaaagcatactttagctatctaattaaacctttctttggtctaattcaaattcatgaagcaaagatttattcagttatccagatgtgaaaagcaaaattagagcgttttttgttttattgtttggctggaaatgtttctgtctttgggcattatggataattttagttttctcctttctaaaaattattttttttattttctacaatggctataatgtattgggtatatggactagagctttgcttctgtcttcaaggaaatgtcatttgaacagctgacagactcctgtagccggttacatagagattccctaaaataggcaagatgatggctgagtacaaaatgagtactagggaggctacgttctacaggagttgacgtggagaggcagaaaagcttcacagagtagagaaaactcatactagatcttgtagaatacacaagctttgtagaggtggggatggagaaggccactgaagaaggaggagaagcatgaacaaaattagaaattgcactagaggtactttggaacaattgacagagtctaaagagagcagaaacaggaatttataactggattgttaccttccttctctaatttgtcctggtcctaattctaacttagcctgtgggtacagtgatagtaacctggtgaaaataagagaaagacaagataaagttgaaggctataaataatttattaattaatggcaaattgatttttctaggtcctagaataaagaaagaaaagctatgatgttccagagtgctctgctgtaagcacagataatagccaatggggtacatattattacctttcattttacagatcaagacaaagagagtcaggaagtttaagacttaagtctttaaagaccttgtaaggtcttattatccctgtgttccaggtgaagttcagaaatgttaaatgatttatgaaatgtttcatggctttctcgtggttgagccaggactcgagcaaaggtctctgaattcctagtcctttgcttctttctctccacatccactgcctcagacaattgcaggcacacagccttcactctcccttcttcaagaggaagacactgctgaggattgtgtttgcattttacagattccatctcacgaattaaaaatgctgaggtggtaaattgttatcaattctatgtttcccagaaatgtttaaccttaagttaaaaaaaatctaagagataaaacagcatgttatctggccagtccattccacccccagtggttattaatttcagaacacatctgaattccttctctgtggcatatgctttaggagaggagcagacagctcttagctagggtcagatttcaaattctcatctcttggtgccaataccaccaccagattcttctttgaagtcaacttttgagatcttcactaagtacacgttggtgtctgaagattcacacgagtgcctctggtaatcattttcttcagggaatcacagtctctcctctcagcaaagcatccactgtactgaactttgcttttggaaacatcttcttcctgagacctcgttgaaagaaactctctggtgtcatactttccaatatggaggtgaagaactttgcagtttgggattatgttgtatttgcagccctctttttcatttcctctggaattggggtgttctttgccattaaggagagaaaaaaggcaacttcccgagagttcctggttgggggaaggcaaatgagctttggccctgtcggcttgtctctgacagccagcttcatgtcagctgtcacggtcctggggaccccttctgaagtctaccgctttggggcatccttcctagtcttcttcattgcttacctatttgtcatcctcttaacatcagagctctttctccctgtgttctacagatctggtatcaccagcacttatgaggtaagatgatttctccattcttctctaatttttttttctcatcctcttgatgatagcacctggtagttgaagaacactcactgattttcaggataattacacattatgagaaagacattaaaatgtttttgtaaaaagcctaagctttggagacagacatatctattttcccatctgtagaaggaaaataatgatgacaatcccacagggctattttaatgatcaaatgagaacctctatgtgagcacttaatgtatggcctcatttgtaggaggtttgcaataaagagggctgatgttattttttattattgtgaacgtcatcattctgaaaagcaaacagaacatttctcatgagtacggcaattttccagctaagaaaactgagatacagataaatgacttagttaagatttttgaatagtaaagtgacctgagaacctaattttttctgtatctctacttagtggcctttccgtcagagagtagagggcattttaatacaaattataataagactaatttttaatgaggaaatggaaacatttttgaaaagtacaaaacattttaacgaaaggaattgctaaataatacaaatatgggaattatttaatgtgagggaaatgagg

SEQ ID NO: 5584 - DNA, 6000 bp, Homo sapiens
attctccaatcaaaagacagagtggttgcatgaataaaagacaagattcttggccaggcgtggtgcctcatgcttgtaatccctacactttgggaggccgaggttacaagagacaaataaattgttacaagagacaaagaaaatcattatataatgataaaggagccaattcatcaaaaagatataaaaattataaatatttatgtacccaacattgggtgcttaaagcaaatattaacagaactaatgtgaaaaataaacagcaaaacagtaacagaggtgactttaataccccacactcaacaatggatagataatccagacagaaaatcaataaggaactaccatatttgaacaatacttagaccaaatggacctaacagacatatacagaacattccatccaacagcaggggagtacacattcttctcaagcacatataaaacattctccaggatagatcacattaagtcacaaaataagtgttaacaaatttaagaatattgaaattatatcaagtatcttttctgaccccaatggtatgaaactggaaatcaataatgtgagaaaaattggaacatttacaaatacatggaaattagataattcactcctgaacaatcaaggagccaaagaggaaattaatgaggaagtaaaaagtatcttgagacaaatgaaaaggtaaactcaatatctgaaaacatataggatacagcaaaagcagtactgagaggaaaattcatagttataaatgtctagattaaggaaaaataaagatttcaaatgaacaaactaagtttaaacattaaggaactagaaaaagaataatctaaacccaaagttatcagaaagaaggaaacaacaaagatcaaagcagaaacaaataaaatagagaatagaaaaacaatggaaaagatcaacaaaactaaaagttggttttcggaaaagataaaaaaaaatcgacaaacctttagctagactaaccaagaaaaaagagagaaaactcaaataagtaaaattataaatgaaagaagtgaagacattacaactgctatcacagaaatacaaagaatcataagagactactatgaacaattatatgccagcaaatgggataacctagaagaaatgcataaattcctagaaacacacaatgtgccaacaatgaatcatgaagacatagaaaatctgaacagaccaaaaatataaataaggggactgaatcagcaatcaaaaacctccctacaaagaaaagcctaggaccagatgtttcactggtgaattcaaccaaatacctaaagaagaattaatggcaattcctcacaaactgtcccaaaatattgtagaaagaatatttccaaactcattttacaagatgagtattaccctaataccaaagccagataaggacactaccaaaaaaaaaaaaaaaatcacaggccaatacccataataaacatagatgcaaaaatcctcaacaaaatactagcaaaccaaattcaacagcacattaaaaaaaaagcaaaaaaaaaaaaatcaatcaaaaaaatttagcatcctttcatgataaaaaaaaactctcaacaaattgggtatagaagaattctactactgagccattaaaaggaatgaaataatgttaataataagtgagaaaatattttttttggttttctactcctgtgttgcttagaataattgcctccagctccatccaagttgctgtggaatatttgagaaaatatttgcgaacctatatctgaaaatagattaatatccaaaatatgtaagaaccatgcaattcaatagcaaaatgaaaacaaaaacaaaacaaataacctgattttaaaatgggctaaggacctcaacattttccaaagaagacataaaaatggcaaacaggcatgagaaaacatgcacaatatcactaatcatcagagaaattcaaatcagaataatcacatcaccttatacctgttagggtgactattatcaaaaagacaaaagataacaaagtatggatgaggatgtagagaaaagagaatcctttgtgtttgcagaatgtaaatttgcacaaccattatggaagacagtgtggtggttcttcaaaaaattataaatggaactgcaatatgatccaacaatcttaattctgggtacatatccaaaggaagcaaaagcagtgtttcaaagaaatatatgtactcccgaatgggcacggtggctcacgcctgtaatcgcagcactttgggaggctgaggtgggtggatcacctgaggtcaggagtttaagaccagcctgatcaacatgttgaaaccctgtctctactaaaaaaaaatagaaaagttagccggtgtggtggcagatacctgtaatcccagctactctggaggctgaggcaggaaaatcacttggacccgggaggtggagtttccagtgagctgagattgcaccattgcactccagcttgggcgacaagagagaaactctgtctcaaaaacaaacaaacaaacaaacaaacaaacaaaaatatatattatataaaatatgtactcccatgttcattgcagcattattcacaatatcaaagacatagaaacaacctacatatctgttgatggatgaagggataaaaattgtgatttatatacacacacacatatatgtgtgtgtgtgtatatatatatttatatttatataatagaatagtattcagccataaaaaagaaggaaatagtgccctttgagacagcatggatgaacctgaagaatatcatgctaaatgaaataagtcacagacaaatactatgatctcatttatatgtagattctaaaaattatcaaatacatggaaacagagagtagaatggtggtttccacataagttttatataaatatgtgagagagagaaagagatttattccaaggagttgattcatgcccttatggaggctaagaagtcccacagtctactgtctgcatgcagtaaaagtcagtggagtgattcaggccaaactgaaagcccaagaaccaggggagccgatggtgtaaatctcagtttgagggctggagaagataagatgtcctagctcaaacaggctggcaggaagcaaaaaaagggtgaattcccccttccttcaccattttattctattcagggtctcaatagattgattgatgcacacctacattggagacggcattctactttccagagtccaccaattaaaatgctaatcctatctggaaacaccctcacagatacatcgagaaatagtgtttaatctgggcactcaggtgccagtcaagttgacacagaaaattaaccatcacagaggtacaatgcaaatagtggctcattaagtcatgacatccttagctaggctgacagtattctctaatagttctcagaagaactgtgataggcaacacttctcacatgtagcaactgccctggcagggcagaaattcacatttgatgtatagctctctggttttcctccttggttaggaaactctcatggaatctatcttaggagaaaaatcatagtttggaaaccactatgccaaagatcccctcatgtgctgggttctccaatactgcctgcttcaatttcagacttacaacttttacttccgtttttaaatttttttatttcaatttttgtaggtacatagtaggtgtatatatttatggggctcatgaaatgttttgatacaggcatgcaatgcgtaataatcacatcatagagaagggggtattcatcctgtcaagcatttatcctttacgttacaaacaatccagttatactattagttatttaaaatgtacaattaaattattattgactatagtcaccctgttatgctaccaatagtaggtcttattcattctttccaatattttgtacccattaaccctccgcatctccttcccaccactagccttcccagcccccagtaaccatcttttcattctctatctctatgaattcaattgttttgatttttagatcccacaaataagtgagaacatgcaatgtatgtctttctgtgcctggcttatttcacttaacataattatctccagttccatccattttgtcacaactgacaggatttcattcttttatatggctgaatagtactccattgtgtatatgtacatttgctgtgttcatttatctgttgatagacacttagcttgcttccaaatcttggttattgtaaacagtgctgcaacaaacatgggagtgcagatatctcttcaatatactggtcttctttcttttgggtatatagccagcagtgggattgctggatcatatggtagctctatgtttagttttttgaggaagctccaaactgttctccatagtgattgtactaatttacattcccaccaacagtgtacaaggcttcccttttctctacatccgtgccagcatttgttattgcctgtgttttgaataaagccatttttagctgagatgagaggatatctcattgtagctttgatttccatttatctgatgatcaatgatgttaagcaccttttcaagcactttttcatatgcctgcttcccatttggatgtcttcttttacttccatttttatatgttgtatgtgtttgcatgatcaaatctactttatcaggaaacataaaacataaagtgaaacggaaaaaaaaggaaagattataggaaacagtcatttgcctaatatatcttcactgcacggaaggcaaataatagatatgaaacccgaaggtttaggacaggagacaaaggaaagttattgccttattctccctaaccacatccttcaagtcttcttccttatttattacatcacatggacaaatacacttgaccacacctcctgacattgctcaatatttgcttgagtgaaaagaggctgaggcaacctgaaggaggagctctcattaccttctgcccatcacttaataaatagccagccaattcatcaacattctggtacactgttggagagatgagacagtcacaccagctgcccctagtggggctcttactgttttcttttattccaagccaactatgcgagatttgtggtgagtaaactttgagctaaaattactctagagtgatagtctactgaaaactgttgacaagagactctatgtagagttacctgagaaaagatcccattccagtttcgtatgtggttggactccatgaatgatgaaaagggtggcaggagatggtgaggaaagtctcacaatgcatgttgttgtaagaggaattatagattgtgtattcacttgcctaactgctctttctatgctcagatcctctctagcacagcatccctaccaagtaactccctattcatgtgacttttcaatgacagaaaatttatgctcccagaaacttttctagatcatggaaagttatcttttggtcttgatatgcaatcttttttccctgaaattcaatgcatgatttttgggttaaccccttgtaactacatagaaaaaaataataatctctttcaaatagtgatgactgctgtcttgtcatgagtgagtttagatgttccaagttgcatgtccaccttccttcaactctttcccaggacacatgggataaagttccatcatctcttgcatgggtgttgaccccagagattgtgtggttctgtaaaagaactttaaagtaagagaagggaaaactaaattcaggtttagtttgatcccttagttattgaatgacccaacatttctgaatttctttagcttcattcataaataaaggataatgaggggagactattgaagcaaattatctcatgaagtctggtgcagttctcaagtgcatgaattctcttttgtgagactttactctgaaattgagcttcaaaccagtccaaagattactaggtggtactatctgtgctctctaaccagtaagaagagaacaccacagaagacaggcttgtatacatacaggctaaagc

SEQ ID NO: 5585 - DNA, 6000 bp, Homo sapiens
aggctatagtgcagtagcgcaataatggctcactgcagcctcaaactcctgggcacaagtgatccccccacctcagcctccccagtagctgggataacaggtacatgccaccatgtccagctaatttttaaatttttttgtagagacagagtctcctatattccccaggctgttcttgaactcctgaactcaagcaatccagccaccttggcttcccaaagtgctgggattacaggcgttggccagatctggccaccaattgttaacattttgtcactttttttctttttctttcttttttttttttttttttgagatggagtcttgctctgtcacccaggttggagtgcagtggtgcgagatctcagctcactgcaatctccgcctcccgggttcaagtggttctcctgcctcagcctcctgagtagctggggttacaggtgcacgtcaccacatccagctaatttttgtatttttagtagagacaggttttcactatgttggtcaggcgggtctcaaacccctgaacttgtgatccgcccacctcagcctcccagagtgctgggattatcggcgtgagccaccacattcagcctttcccctctttcttttgccgaattatttgaaagtaggtgcaaatttcatgctgttttattcctagatactacagcatgctaataataaggcattctcctgaacagccataatgtcttttttttttttttttttttttttttttttttgagacagagtcttgctctgtttcccaggctggagtgcaatggtgcgatctccactcactgcaagctctgcctcccaggttcacaccattctcctgcctcagcctcctgagtagctgggactacaggcgcccgccaccacgcctggctaattttttgtatttttagtagagacggggtttcaccgtgttagccaggatggtctccatctcctgacctcgtgatgcacccacctcggcctcccaaagtgctgggattacaggtgtgagccaccacgccctgcccataatgtcattttcaaactaagaaaattaacagttctccaacatgatccagtaatcagcccatgttcaagtttccccatctgatttttttttttttttttttttgagacggagtctcgctctgtcacccaggctggagtgcagtggcacgatctcggctcactgcaagctccacctcctgggttcaagccattctcctgcctcagcctcccgaatagccgggactacaggtgcccgccaccatgcccggctaattttttgtatttttagtagagacagtgtttcaccatgttagcctgaatggtctcaatctcctgacttcgtgatcggcctgcctcggcctcccaaagtgctgggattacaggtgtgagccaccatgtccggcccccatttgatatttaaaacaaaagtttttatcttttttctttcaatttaagacccaggaagattcacattttgtatttgatgtgtgtcttcagtgggccttttgttttatttttcatgacatcaacttgttttgttcaatgttaaattaaatctaacactgattaaattagtgctgcgatgattacattagtaggcacttgatgaggttatcccttttattgctgatgtcaatttaatcacttgttcaaggtgctaactatcagattaagcacactcatcccttggtattgtggggcattggctccaagagccccagaggaaaccaaaatccatgcatccgcaagtcccataaaatcttgtcatatttgcatgtaatctactcacatcctccaatatacttatttattattatttttttagtagagacaagtgtcttaccatgttgttcaagctggtctccaactcctaggctcaagtgatcctcctgcctgggcctaccaaagtgctgggattacagcctggccaaaactagggtccatatacctttttttttggtgtttttttttttttttccccctgaggcagtcttgctatgtcacccatgctggagtgcagtggcacaatctcactgcagcatcaagctcctcaacctcctgggttcaagctatcctcccacctcagcctcccgagtagctgggactgtagggtcacaccagcacacccagctaatttttgtattttttgcagagatggggttttgccatgttgcctaggctggtctcaaactcgtgagctcaagccatctgcccacctcagcctcccaaagtgctgggattactggcctgagccaccatggttggccatagagctttttttatcccctgatttcctgtccgtgtcattatgttttcctttttcactcagaaccatgatttcctgactgcaatggtctgtgaacatttttccccttacaataaatataatacatactcaccagataaaaatgtaaatactgatgaggaaaaattgtaactaacattttcggggctcttgtgggttagggactttatactaactcattgaagacagacagtagcctgagagaaggtagggtttgggttatcctcattttgccggtgaggaaaatgaagcttgaagttagactaacttagagtcttaagctaataaatggcagagttggttttcaaaccagaaataacttgtttatagtacccttccaaagccttttctatacacaaatatatataagaatgggatcatattgtgaccatctttccatgtcaataaatggacttcaacagcattctttttaatccagtgtccttttgtttcctcttctcccggccttgtccccaggatcgacgagaacgtgctaggagcccagctggacgttgaggccgcccattcagagatcctcaagtacttccagtctgtcacctccaaccggtggctcatggtcaaaatcttcctcatcctcattgtcttcttcatcatctttgtggtcttccttgcttgaaccctctctactctgaggcactctgttggggtttgggaccctcctgggaaggcaagtggccagtgctgccactgagcctgtgcagggtacttgggagaaaggccctgtttccctggaactgctaagaatgaccactgcccctgatcccccaccccttgcctctggccaccctgtcctccccccaccaccctcaggcctatgaaacacacagggttctagatttgaactctgctgtgaagtgactggaagggagcagaggccagctgggggccagtgggggaggttgtttccactaggagatttttataaaccctctccagcctctcccaaaggaagcgttggcagcaaagggagatgatgcccttacccaccttcctgtgagtgaagagaggaagcagccccagggaccaattttcccaattgacctctttcttcctctttcaccatgtgaggcagggagccctgagcccttcagctgcctgcacaacccctgacattggctgctggtgactcaatctgccaaatgtgctgcagctcgttttctcccaattacagcaagactgtcagcctcactagccatgtcatcatttctgggtgggagcgtcgaagggcctaggcagcgagtggagagagcccactgcccagtaccagaactgaaagggttgggctaatggctctgccaggtatcactgctgacacaggctattttgggctctgacacacagctgcctctaggcaggggagaaccaagtgttgcaacacttcattagcgtggaaacttcctttcacacaggggagcaggatcccagagggggtccctgattgggggcaacttccaggactatctcaagcagtgtttggacctgtttcatctgtatcctccaactatttggccgtaattcttccttgagctaagcgaggcagaagctctgcctgcttccaggagtggaaggtgaagaatttgttcccaactccagttgaggcttttgattccctccaagcacttcaccaaatcaaagccagtcacagagaatggagacacctgcccagaatacccaccgtccagggagattagtgtgctttgttcttcctgaccgagactcacaaccacattctgaggtcactcgagtgcccctgtctcatacattccaaaggaagttgaagctatagagacaacagtcaggggctggtggtggtgcttttgggggtctaggagagcccaaggccctgatattttaaaatgtcctcctcggcatctccagcaagttgccactgctggtgagcttcactgtctgccccgttgacacgatgggtttctagtaggggacgccattgatggaaggtctgtgaagacaatgctcgccaaacccctgacagatgtcgtatcatttgactcagcaactcagggcggggcggggtgggggaaattcataacacaaattcatttatttcacaaatatatgttgagtttttaccatgtgccaggcatagtacctgccgagtcaagccctcgaggaaaaaaagcccttaattagtcaacgttcgagctcacattctaattctcaacttcgtgatttgttaatccatcttataggcgaagaaagcgaggtatagacaaggagccgagctgaaacactggctagattccggtaggggtctgagccatcactcccacctggaggcgcggtctccattcctctgaagccctttgtgcggcccccttcctcactgagttctgggctgcggcggcagcactgtgctctagcactaactctgaagctgccagggcagcgtcagcggacagatgaaaaggtgcggggacatgctggctgccagccggggttccgcaagttcaggtcttgggcggggcgtggagggccaggccccgcccctcgaacgacggccttaagtgtgcgcacgcgcagggggccgcgctttctccgggcggcggcaccgcccacagcctgggacgtcagcggcgcgcgacgtgctttgctgtataaatgcggtggcgcccggcgtagggacacttcggtcctgagcgcttgggagttaggttgtttgccggcgtagcggccagcgcctgagcccgcccttgatcttcgctgtggcatggcggacgaggggaagtcgtacagcggtaagtgctggtcttcgggtcgggaactggctatctggggcgcgggtgggcggcgccggcctaggcctcagcccccggggcgtgaggccgctaggggcccggcgtccgcggggagcggcgcgcggggggccgggcactcgaggtggacacccgagttgttgactcctggattcctgctggcatcctggtgttgggggacctgcggctcggagcggatggctcgggggtagggtgacgggattcctttgaactttgtgggtggttgatgcctgtcagttaggtttggcggcctgactcttcctttaatgtgagtgagtgccctgctcgtgggctgccctgatgccctattttttactgcgtccagtcggtcttgaactctcgggcctgggctttggcttaatattcgagacttacacatcaactggatattctagtctgaacactacactgggtgttagttctttgtagtaagttaggagtgcgtggtggaggttgaaaccgtgaatttaaaactctcgttttccacccccttaatgtggaataacaacagcatttcttaagagtgtgtgtggggaggggaaatgagatcattcctatcaagtgcctgaagcatagtggccggcactggagaaagttctcagtgaatgttagctgcgccttctatgttcttttttcctagggtcatttgttgagattcattgtttacagagtgctgggtattaggcagacctcttttgggagttagggaccttttttaagacgccagtcctacacagcatgaatcagaaggtcatcttcctggagagcattccagggtccctggttaagcaccctagcctggcactgccactagagcctgagtctagaatttgtctcctgagttaaaggacatttctggccatggaaacgaag

SEQ ID NO: 5586 - DNA, 6000 bp, Homo sapiens
cagccttgaccttcctgcctcaagcaatcctgccacctcagtctcccaattagctgggaccacaggtacatgccaccacacctggctaatttttacttttatttatttatttattattttgagatggagtctcgctctgtggcccaggctggagtgcagtggcgcgatcttggctcactgcaacctccgcctcccgggttcattcgattctcctgcctcagcctcaggagtatctgggattaaaggcacatgccaccacgcccagctaattttggtatttttagtagagactgggtttcatcatgttggccaggctggtctcgaactcctgacctcaggtgatctgcctgcctcagccttccaaagtgctggcattacaggcatgagccactgcacccgaccctggctaattttttatatttttgtagagatggcggggggttctccctatgttgcccaggctggtcttgaactcctggactcaatcaaccctctcacctcagccttccaaagtggttgaattacagcataagccactgcacctgtgcaggatgtcccttttatcatagttaaaatcatacatgagataaaaaatttttttgaaacaaggtctttcttgtagcctaggctggagtgcagtgctacaatcatagctcactgaggccttgaactcctaggctcaaggtctcttcccgtctaagcccctgagtagataggactagaggcacatgccaccacacctggctaatttctaaattttttgtagcaatggggtctcactacgttgcccaggctggtctcaaactcctgacctcaagccatccttccaaagtgttgggattgtaagcatgagccactgggcccaacctcggatgatatttaaaataatgttgtccattcatttctatggcttctgaaaaaaaaataaaaactttgtccagtttccaacaaattctgttgggatatagattgggatggttttaaaatgccaaatgaattttgaatggattgacatttggacagtatcaaagtcatagcttgtttttcaggcatgtagtatgatttacgtttgttcaaattaccttttattatcccttagtaaagtctttgtactgtattgggatgtcatcttctcatttctttttcttttctttctttctttctttttttttttttttgagacggagtctcactctgtcacctaggctggagtgcaatggcgccatctcagctcactgcaacttctgcctcccaggttcaagtgattctcctgcctcagcctcctgattagctgggattacaggtgtacaccaccacacccggctaatttttgtatttttagtagagacagggtttcaccatgttggtcaggctggtctcgaactcctgacctcatgatccgcgcgcctcagcctcgcaaagtgctgggattacgggagtaagccaccatgcccggcctatcttctcatttcttaacattctttggaaatacagtgagcaaactagcatttgagtccctactatcctgatcataaagtgctttaaaatgtttttccatttaattcccactgactgggtgcgatggatcatgcttgtaatcgccgcactttgggagcctgaggcaggtggataacctaaactcaggagtttgagactagcctggccaacatggcgaaaccccctctgtacgccgggtgcggtggctcacgcttgtaatctagcactttgggaggccgaggcgggtggatcacgaggtcaggatcgagaccatcctggctaacacagtgaaaccccgtctctactaaaaatacaaaaaattagctgaccgtggtggcgggtgtctgtagtcccagctactcgggaggctgaggcaggagaatggcatgaacctgggaggcggagcttgcagtgagcccagatggtgccactgcactccagcctgggcgagagagcgagactctgtctcaaaaaaaaaaaaaaaaaaaagaaagaaaaagaaaaaaagaaagaaagaaaccctgtctgtactaaaaatacaaaaattagccaggcgtgtttgcgggcacctataataccaactactcaggaagctgaggcagaagaatcgcttgaacccaggtggcctggtcctgtagtcttagctacttgggaggatcgctcaatgctcaggaatttgaggttagagtgagctaagataccattgcactccagcctgggcaacagagcaagcctgtctcaaaaacaaacaaacaaacaaacaaacaaacaaaaaaaacagaccgggcgcagtggctcacgcctgtaatcctagcactttgggagaccgaggtgggcggattacctgaggtcaggagttcgagaccagcctggccaatagggtgaaaccctgtctctactaaaaatacaaaaattagctgggcgtggtggcacatgcttgtaatcccagctactcaggaggctcaggcaggagaatggcttgagcccaggaggcagaggttgcagtgagccgagatcctgccactgcacttcagcctggccgacagagcaagactctgtctcaaaaacaaacaaacaaacaaataaacaccatcgaccaggcacagtggctcatgcctgtaattccaggatattggaagaccaaggcaggtggatcccttgagctcaggatttcgaggccagcctggccaatatggtgaaactcttgtctctacaaaaaatagaaaaattaaccgggttggctgggtgcagttgttcatgcctgtaatcccagcactttgggaggccaaggggggcagatcacctgaagtcaggagtttgagaccagcctgaccaacatggagaaaccctacccctactaaaattacaaaattagctgggcatggtggggcatgcctgtaatcccagctactcgggaggctgaggcaggagaatcgcttgaaccccagagaaggaggttgcagtgagctgagatcactccacttccaaaacaaaacgatagggctgttaatttaggtggtggttacacgggtattaacatgtgtaaaaaatcactgagttgtacatgtaagattcctgcactttttgtattttattatgtgtatgttaaatcttaaaaataaaagcggagaaaaacctgatggcttcctactcctctattaggtaaagtaagaatctgctctggtttggtttcggaggaactgtttcctggtccttggatctacctggctgaaagcacagtgcctggtacaaactaggctcctccccgattttgaattaacgaagttcagtgacatcgtcatcctatttttttttttttttttttgagacaggctctcgctctgtcacccaggctggagtgcagtggcacgatctcggctcactgcaacctctgcttcccaggtccaagaaattctcctgcctcagcctccccagtaactgggattacaggcgtgtgccaccaagcctggctaattttggtatttttagtagagacagggtttcaccatgttggccaggctggtctcgaactcctgacttcaagtgatctgcccgccttggcctcccaatgtgctgggattacaagcatgagccatcgcgtccggcctgtcatcctattttatctcatctcctcctcctcccttccctgaccatcttctctggagtaaaagatctttgctctcaattttggaacacttacaattccttcagccactcttgttaggaagatataagggaagagagcgagagacaggaggcaactcaacggccaaacaggtttattcacaggaataagcctgcaaggagttccagtcaggagtctggctgagaccctgatcgcttacaagctgaggcttttataatatcgtttctattggggagaggtcgggaagtgctggctgattgggactgttggggactttgttaggctatgttaccttctgttgaagctatgggcagggttaacatttgctctgtttctgagaacacagtcatcattgttgtaaaatagcatcactactgttactcctcacaactcttaactgggatcagtgaaaaccattgttgttgagaactcttatagaatttctgagctcttatctaaatcatctgttgagtcttcacaatgatctaccaggctggtaggaaacgggagctcatagagattaaccaaggtcatacagttagaatgctgtgggtctaggactagaatttgatatttactccaggccccgtctctgtccccaacaatctaaccacaagttaaaattccaaattgtgggctgggcgcggtggctcacgcctgtaatcccagcactttgggaggccgaggtgagcggatcacgaggtcaggagatcgagaccatcctggcaaacacggtgaaaccccgtctctactaaaaatacaaaaaattacccgggcgtggtggtgggcgcccgtagtcccagctactcgggaggctgaggcaggagaatggtgtgaacccgggaggaggagcttgcagtgagccgaaatcgcgccactgcactccagcctgggcgactgagcgagactgtttcaaaaaaaaaaaaaaagaaaaaaagaaaatactgtgtgttcctacaacacctttcccagactgtgagcaacttgggaacaatgattatcaccttagtgttcggtgtgttttgtagaggagggcactcactaaaaactggtttgttgaatgcaaccacttaagaattggacatgccgtgcccagcccctaaggggcgctatgctcgttcgtccaaggagcagcgtgaccagcgggagggagtaagtcgacgtccccggcatgtggggcggggaactccactggccggcaagcgaagcagcaggcgaagaccacgcccccgccggccgcgcttgcgcagccttcgctagccccgccccgtcctattcgggctcccgcctctgttcaggtaggaggcggtatgcgggggaggggagtcacctgagggcggggatctcaggtcttggggagccattgttggcgaaccccaacttccgatacgacccggagctgttcctgcagttccagagacaattcatgggtcttggggccaccgaggcgctgtccctgaccaccagcacgagacccctttctatcgcgccagtcctgtggtctccgcacctctccagctcctgcacccccggcccccgtggttcccagccgcacagtagcgtgtcctgggtagcgtgaggacccacggggctgggcaggtgccacgagcccgccgcctcttcgccgcccgccgcctctcctcctctcccgcccgccgcctggccctcccctaccaggctgagcctctgggtgccagaagcgcggggcctccgggagaatacgtgcggtcgcccgctccgcgtgcgcctacgccttctgctccagttgctttcccaattgagcggaaaagccggggcatgttgccggggccctgggcgggacggttgtgccctgcagcccgaagcccgccggggcaccttcccgcccacgagctgcccagtccctctgcttgcggcccctgccaacgtcccacaggttggaaaccagaccctgcagcccccagctagcccgaaggaagcccagactgacgtcgcagggtaatggggacccagaggtagctctgtggggccccatcaggacctcagcccttagcggggctttctgtgtgacaccgtgggacctgaactggggaggtcccccttgcacagaattacaaggggcaactgtaggaaacaattaaatctattatgtgctaagtattgagagttccacggattgaggccctctctagaaggcttagaagtggggtagccggggtatgtgtctgactttgtgttttggtgcggtggtggtgagtgggtgtagaaactaatagtgccaagtgcagtgcctgtcaactagtaagttaataaaccttccgtgaatgaatgagaaggttctgtgactgagggagcagggctagagagggcatctctgc

SEQ ID NO: 5587 - DNA, 6000 bp, Homo sapiens
actctctacatataatataaaaagctataaaactgtattgagtccatttatttactatatcccagaaaagggcctagccaacagtagataaaaatacctattgagtgaatattttttgaaataataaactgaagatgttgcattcaaaatagcctcagaaacagtcaccttaaggttcgtttttctctttttgaggtggggtctgggtatatttcccagatgcacttcaaacttctgggttccagcaatcctcccacttctgccttcctagtaactgggactacagatgcacaccaccaccttgaggtatgtacttgaggtatttcttaaaaatcagtttgccttaaaaataccacagaaatagtttttgaatgatcttaaatagaatgcctttaaaacatgtttgtatttttggtaatagggagcaaaacatcaaatttatgttactatttcaaaatatttataaaattatcacaatttattctattgtatatcatttttacctatgtgattaccacaccattactaaatcttaatacagtgaagtttcctttagtactagttttttggttaactgggggattctcaatcaacttatttctaaatacatttagtactaagacaactgcaaatgtgttgcccacaaaaaagactttatagtttcagatgtagatttaatttaacaaatatccaaaagaagaaagaagaaagaaagagagaaagaaagaaagaaagaaagaaagaaagaaagaaagaaagagaaagaaagaagaaagagagagaaaacagtaggtgtaattgcataattaaggaccacaattgtctctaaaatattaacatatccttccaccagagggcaacatttgcaagacatttaaatgattactcaaaagtatttcctcccacagggatataaacaaatagaaacctattacattgctgttggctaataccttatgtacatcttgaaaaatagtatggatacaattatttaaacaattgcttataaaactcagtgtatacatatagtgaaacaacaaataaggtaactcttctttaaatatgtaaaaagaactttcagaaagcacatttctacatattagtattttttcagtttattattaatcatttaactcaaatataataaaaaaaacttaggatgggagaaacaaaagaaaataagttttacatctttttacatctaaagacttttcatctaaagtcatgaaaaggcataaaattttacaagcagaaaggataatagaaaccacacgatacaagccttcatttgtgccagtaagcaaactggcttattagtgttcgatgattgatacaaaattgcagagatgataatcagtggaaccaggacccaaactcaggtaaactgatttcacatttcatactccgagatgttgatgttcaaaatgtgatccttaggcaagcagttgtagaaacgtgttacagtggttgaatcttgggcaccactctagacctattgaatcagaatctgtattttaacaagaccttaaactgtgagaaactcctctaacctgagctgttttctcatcaccagttacatgacttcaggtaattactaaatctcactttcctcctcaataacatgggaatacaactattttagtttaaggaataattataaggaataaatacgtttatcatgtaaataaaagctactcataaattgtaatattgcacacatattatattagttatattcagtgaaaacttctccttttattgttaacagttcttgacaagagggacaattcttcccctagaagaaaagtggtctaataatgcaattcaggacttgttataattggatgtaagttattggggataaaggagggtgtcaagagaaaggaagccttttctgatatgcttaaattaatatcttacatataactactagtgtttctttgcataaagataaatctgatgaatttagggctgcaaaagtacacgttcagcgtttgcaatttgtgtccactcatgaagaaaatctgttgggttagcaaatggtgtctgaatatatgtttcttacactgggagcagctatgggtttaaagccagcctaaatgacattcttcagtcgcaggtggtctagtaacgtttcttgtaattttccacacataacatttttcattgtttatgaaaataccattaaatacaccccttctggctagggtgctatccaaataccaccactccaccctgccaaactccactgggctgccatcatctttatagaactacatttcttttaactattaagacagacaagaaaacattgtctcttgaaatatattctggacattttcactcccgggctgggttatttaacttgtgtaatttcacccataattgtttgaaattgtatttttgtgtctatctcccaagtagcttgtgagatatttcagggagaattcccagatctagtattattcttgacactcaatgaatatttttagaatgagtaaatcaatattaccagttattctgattcagttgctcaccctattatcaagagagtggaagagagaggaggatgacattcatttcaataaaggtgaatataactgtttaaaaacaatgcttttgtgttggatttatattgcttagtgtcccctcatatttgtgtattggagacttagctatcatgtttactgatggtttagatagatctctagtcatttgtggtgcaacttaagctggagtgcttaggaaaatcatttacatatcatcaccccagcttcacaaatatttgttgtaaattctatttttttgtataacttcccagaattccaaaatcattaatatctctaaataaatataatttaatgaacttagttattaaagatttgaaaaatacagatattttgaaaacacctagataagtcaagtcctgaatagcttgaatcttttaatctttttcttttctttttttttttgcaaggaaatagtttaatgagggttttttttttgtctccttatacttgatcttgagaaatagatagtattctgaggcatcccatggttttagagaaaaattaaattcactgttttattgaagatacatattttaacacaaatttatcaaaaaagataaaaatgtcttcattatccttttctttattatatttcacaatggaaataatttgacaactatcaaacttaataatggcagatggttttagctactttgacatttttttccagctatccattcagtgaatacatagccattatatcatttgaactattcaggtaatattcttatttgattctcaatttagatccatatttttgagattttgtctcaggatcctaagtaaaattgactccctctgttggcttatgtgacatccaaggttttgaccttgaaaatgtggttcaaggccagtctgttctgtaagcattggcctgaattgtacttaagaagtttgtgattcatgtgaaagagattaataatttacattaatctagcagttttcttgcttgcttaatgagataaattcattgatgctgtacctgtatatataaagccaaaactcttacatgaatgtctttcaaaatttatgctttaggagaaggacatacaaagaaaaataaaataagatttgaatggaatatatgtaaattaaaataaatctttttaaaaataaatctttaaattatcaattacaatttgttggcaagcacaaggtatagccacatatttcatcagtatattggtatttcagtagtgtattgtaaattagttaaataaagatgcttaaaattccaaggaatttatattaaattaactgtattttatttaatcaacttcactgagtttatagctattcttttttcttctctccatacctcccacctctttttctttatctctcctttcctctattcttcattctctccctttctttctttcatctttttcctgtcaggagttaaaacaaacacatgaacaatgtaattatgtattttgtgtgcacatattttatattcaagggagcctaggtgtcttggaacaccacaagcataagttaaatatgttgaaatctttcttccctgcaatactggcatcagcgtgctggacaaaacgtagcaaactagaagtaacttgtgaatttttaataaagttgtcttccctagcagagctaaatgcaccattctccctgcaaactctggagatgatgacatcttcccaatggtttccatagcatccgttcctgaagagcccccgtatggtccttggtcagggcgatccgcccagctcccctagaaagttggcaacctagctagccaaaagaagagtcccctattcctgaaacttactctgtccgtggtgctgaaacattgtaccgagacccgcccagacgggcgctgtcagccgctgaaaaaaaaaatcttccccgaggctgcccaaatcagaactgtgtatcttttatttactcacgtcctcaaagagcagcaagccttctccatcttaatttgactctaccgcagagcagacttacgctggcgtgatgggaggagatcatgggcagagaggaaaaactaatagcagcattgctcacctgagacctgagatgctcccatgagttttgaatatgctctgctccttacagcaaagacaccatttttaaaagtaccattcttttgactttgctgttcccaaggcttctgtgatattccggcccctccgtttaaaagccatcagatttgagagcaataagtcttcaaaaccgggaatttacattgtttttcagctgaccgacttccaggaaaaggactcaaccgcatctacccaaataccgtggcactgcttgcgctctttgccaccggatcctccccttccaatgagactttctgattgtgtctaccaactctcctattaggaaacccgtgggttgcatgcagctattctgttgtattctcattctcactctccctcccttctctcactctcactcttgctggaggcgagccactaccattctgctgagaaggaaaagcccgcaactactttaagagattaagacaatatgcgcaatcctcgcctttcctagcaatcactatttaaatctggcaagaactgacaacagtctttgcaagaatggaatccgtaaaacaaaggattttggccccaggaaaagaggggctaaagaattttgctggaaaatcactcggccagatctacaggtaagacaaagcgaacacttgcttacctggggctcagcatgaaaaaatctgcagggccgtttccgtaaaccctggtggctcagaaagattgtaatatgatcggaaagtctttttgttgcccattgcttggagcgggggtgctctggaaacctgcttattaatgcaggaatgttgcactaaatgaacctgtctggtgtgtgtgtgtgtgtgtgtgtgtgtgtgtgtgtgtgtgtttgatttttgctttggtgcctgcagagtttttgtcctttactacacaggatttatcttctttacagttaagaaatggccagcccctgctcaaacagcgtttcttttggtgcttatagataccccgaattaaattcctttgatgcagacaaatgaatataaaacacaaccatctaaaaaaataaccaagaaattccaaagagtaatggtttatatatatatatatgttatatatatatgttatatatatatgttatatatatatgttatatatatatgttatatatatatgttatatatagttatatatatatgttatatatatatgttttatatatatatatatatatatatgttagagagagagagaaagagagaggtctcagcttcaaaagcatagtagagaatcccctagtgaaatatgtcttctgtattgaatgaagaagaatcaaaatatatcaataattgatagttgaagcaattcctttctctgagcctgaaacaatgtatatgcatttttaattattttcatctcctagagtc

SEQ ID NO: 5588 - DNA, 6000 bp, Homo sapiens
ctgtgcctctttttagctgtgaccctgcgtaatgtgattaccatcctgagccccatatgcctttcaataagagactgctatcttcctgctgacccccacgggaggaagccctgtgacaaggataaggccagatatctcactagagaccacactctggaagtatccatccccagcccaagtctctagccctcgattgccagagtggagggaaggatgtcaaagcattggccattgccaggccagccagtcttgcaggggccagagacaggaacaaggggttaaagtcagattctgggcattgcagtgaagtcagagaaatagatctgtggctccctgatcccagacacctctcagccacttagagccacgcagtacccaggcccatccagctctgctgaagtttgtccagtgcttcaacccaggaaaaccctatggcctccaaaccaactgataaatatgtcagaaaacactcatttgtggctgggtgcagtggctcacgcctgtaatcccaacactttgggaggccgaggagggcagatcacctgaggtcaagagttcaaaaccagcctggccaacatgttgaaaccccgtctctaccaaaaatacaaaaattagccgggcatggtggtgggtgcctgtagtcggggggctgaggcataagaatcacgtgaacctgggaggcggaggttacagtgagctgagatcacaccattgcactccagcctaggtgacagagcaagactccaactcaaaaacaaaaaaacaggccgggcctggtggcttacgtctgtagtcccagcactttgggaggctgaggcgggcggatcacaaggtcaggagttcaagaccagcctggccaacatagtgaaaccccgtctctactaaaaataaaaaaattagccgggagtggtggcgggagcttgtaatcccagctactcaggaggctgaggcaggagaatggcttgaacccgggaggtggaggctgcagtgagacaagatcgtgccactgcactccagactggtgacagagcaagactccgtctcaaacaacaacaacaaaacaaaaaacaaaaaacaaaacaggccgggagcggtggctcacacttgtaatcccagcactttgggaggcggaggcgggcagatcaccaggtcaggagttcgagaccaacatggtgaaaccctgtcactactaaaaatataaaaaattagctgggcgtggtggtgagtgcctatagtcccagctactcagaaggcttaagcagaagaattgcttgaacctgggaggcagaggttgcagtgagccgaaatcgcgccactgaactccagcctgggtgacgaagcaagactccatctcaaaaaacaaaacaaaacaaaacaaaaaaacactttcttatgcttagcaaggagagagggtgtccccactctgtatctttaatgtagctattctttatgttgctttaatatttttatacccatatatccatacatataaacagcattaatttctagctctatataaaacttcccatatgtcaggcatagttctaagtgctttgtctgtatttatccatttaatcttcacaacaacatctaagtctaatttcgagatgaggaaactgaggcataaggagttaagtaatttgtcccaggaagtctggcatcagaatcttactgtcttgaatgggcacagtggcacacgcctataatcccagtgctttgggaggccgaggcgagaggattgcttgagcccaggagatcgaagctgcagtgagctgtgatcacaccactgcactccagcctgggtgacagagttaaaaaaaaatttgttatattcaccttttgaattttctcttctgttcccttttatcttctttctaaacaaaacaaaacaaagaatcgtattgtcttaaccaccaagacaccaagaggtaagccagagagagagagagagagagaaagacagaggctaggtgcagtggctcacgcctataatcccagcactttgggaggctgaggcgggtggatcatttgaggtaaggagttcaagaccagcctggccaacatggtgaaaccctgtctctactacaaaaattggccgggaagtagtggcccatgcctataattccagctacttgggaggctgaggctggagaattacttgagcctgggaggcggaggttgcagtgaaccgagatcatgccactatactccagtctgggtgacagagtgagaccctgtctcaaaaaaaaaaaaaaaaaaaagagaaagagaaagagattttatatagtgagattttcatatatctgagatgagatttgatatatgtatacaattttacacattgcatacatgtgatcatatacaccttttatttatttattttgagatggagtttcgctcttgttgcccaggctggagtgcaatggcgcgatctcggctcactgcaacctctacctcccaggttcaagcgattctcctgcctcagcctcccgagtagctgggattacaggcatgcgccaccacacctggctgatcttgtatttttagtagagggggtttctccatgttggtcaggctggtcttgaactcccgaccgcaggtgatctgcccaccttggcctcccaaagtgctgggattacaggcataagccaccatgcccagccatatatggccatacacatcttttaatgtgttgttttcctttaacattttttccttccctattcacattagttcctcccaccatagaatccataatatcactttaatgtgttatctatgttttttatgtattcattatacatagacttatatatactgatacctttaatcacatacacatatacaaggtttctttttgtcattattttaaaatagtctcttaaaaaataaaaatagtggatcatattaaataaatatttctgcatctcacttttctcacacacctggaaacccctgcaattttattaatttgtaattttttttatttttttatttttgagacagggtctcgctctgttacccagactggagtgcagtggcacgatcagggctcactgcagccttgacctcccgggttcaagcaatccttccacctcagcctcctgagtagctggggctacaggtgcgcaccattacacctgactaattttaaatttttttgtagagaccagttctcagtttgttacccaggctggtctggaactcctgggctcaaaagatcttccttcctaggcctcccaaagtgctgggattacagatgtgagccaccgggccttaggtatccgatgggaattccaggccaggtgggaggaaagggtagtgcattggcaccaagtaacgtttctggctgggtcttgcccatccccttgttgggtggccaggagcgctcagcctccagaggcaggaatgctgactgtgttattgtgaaatcatttgcatattgtgaagtgctttgcataagatggagcgcttttgcatacagggaggggggcattttagaagtcctagggcaggatccctgagtagcttttctttgccaagaaactaacccagggattccattttggaactcagggagggaacagaacgtcctggcagttgtatgggcccggtggggtgagatggacagaaagcttcagaagacaagctgggccaccagggagaagttggcggtctaaggaaggccaacagtgcaacatgaagtgggacaggcaccagaggcagccctgagagctgagtgtgctctcaagagccccagcagaggggaaagtgacagagtaaatggttggagctgccatgggaggctgatgagggtcagagacttaagagacctgtactcagtcgctatctctgcccaagtgagtacccacatgccccttcctgaatcttctcctgtactggctgatttccagagaagaatacaaactcgaaacgccaagccagactcccactgctgttcaggacctagacgtgagaagtggtatcacatactctggcttcaggacacccaggtttgaatcctggctctgccatctgtgccactgtgtgaccctgggctaacagtacccaccacaatgggataatatgaggattcagtgagatagtgcgagtaaagtgaatagcacatagtaggtggtcagtaaattgcggttataagaactgctatccagtgtttgctgccttagtctaaccaaagaggtcaggtctagcttcctccaggtgagggaagcacagagccctcgcctcccaggtttggagttcccatcagcagggtccagccaccatgcattggaccccaaagggttacaagccctggagacagtggcctgaggttcccagtgaaaaaccaaagcataaaaataattcgatgagtaagaataaaattccctcttctgaggttcccggggccaggcccctccctgcggcaggcacttcccctttcccttgctcatggaggagccaggccgggctgactcagagcaggagcgcacagtagtcctcccagcccgacctgggcggcgtggtctggcggccgggcgcgcccccgtgcggccacgggcagactgcggccctggacgggaagcggcggccagatccgcaagccccgcagcctggtcgatcgcggtccccgcagagccgccgcttccgtccctgcccagcctggctgagcgcggtgcgtgtggctctctcacttccgaccgaccctcccctccggcccgcagccctgcccaaacggaagtgcgccctctacccgggtcccccaccgccgcgaggcggaagcgccctcccgccgccactccccccgaccccgcggcacgcggcgcctcgggttccggacaggccccttgtgacgtggccgcgcgccgggggcggccccgggccgggggccgggcggccgggcggccgggcggggcagagcctgggcggggcgcggcaccgcagctggatggctggggccgcccggatcgccgccgccgccgccgcacggtgagtgccagcaggaccctcggggcccgcgccccgggcgtgatggacccggccgatccctcgccccgtccgactggtcctcatcagacctgggccggctcccaggacccgggagtcaggctcgcccgcttcggcctcctctcccccatcgctccgcgccccacgccccatccctccctcgctgtcctctccgcgtcccacccgcctctctctagctctctcactctctactttcctctccccttggactctccgtgtattccctcccgctagcctgtggtcccctcacctctgcgtgaccgcctcgtcctggcccagtcttgcctgtggtccccagtggagccccgctggcttcatcagtgcccctgattagttaaggcctggaggtcctagacatgggcatctctgccaccacccagaggcagctgctttcttcccctcccatctccatcagaaggtgaggaaactgaggcagggacatcaccagctcaaggtcacagccagcctgaggcagagcagaccacatttaaacctcatgcccgagtttccagatggaacttctcgcttggttgactcacgtccacatcctgtgatcggccggctgggcacattcctgctgcagggagccccaggccttccctggcacaggcagggcctctgcgcctcctcatgccgggtacatccacctgcactttcaggcttatctcgtcctcacagctgaggcaggtgatattgatccctgtcctgcagatgagggcactgaggctcagagggggggcttcagagatttgcccagagttagacagctcaaagtgcagcatagaattcaccgtgggggctctaaagcctgcgctatacaagagagaggcatcccctggctaaaggctccttcctcatcagccccatctcctgttgccctcagtgccctggggacattggtctcatgtcctaggaagaagcgtggatggtcttgccctggctcatctgctcagtttccccacgtatgtctct

SEQ ID NO: 5589 - DNA, 6000 bp, Homo sapiens
ctttatcattctttattgtgtctatttgattcttctcttttttcttctttattagtcttgctagtggtctatcaattttgttgatcttttcaaaaaaccagctcctggattcattgatttttttgaagggttttttgtgtctctatctccttcagttctgctctgatcttagttatttcttgccttctgctagcttttgaatgtgtttgctcttgcttttctagttcttttaattgtgaagttagggtataaattttagatctttcctgctttctcttgtgggcatttagtgctataaatttccctctacacactgctttcaatgtgtcccacagattctggtatgttgtgtctttgttcttgttggtttcaaagaccatctttatttctgccttcattttgttatgtacccagtagttattcaggagcaggttgttccgtttccatgtagttgagtggttttgagtgagtttcttaatcctgagttctagtttgattgaactgtggcctgagagacagtttgttataatttctgttcttttacatttgctgaggagtgctttacttccaactatgtggtcaattttggaataagtgcggtgtgctgctgagaagaatgtatattctgttgatttggggtggagagttctgtagatgtctattaggtccacttggtgcagagctgagttcaattcctggatatccttgttaactttctgtctcattgatgtgtctagtgttgacagtggggtgttaaagtctcccattattattgtgtgggagtctaagtctctttctaggtctgtaaggacttgctttatgaatctgggtcctcctgtattgggtgcatatatatttaggatagttagctcttcttgttgaattgatccctttaccattatgtaatggccttctttgtctcttttgatctttgttggtttaaagtctgttttatcagagactaggattgcaacccctgcctttttttgttttccatttgcttggtagatcttcctccatccctttattttgagcctatgtgtgtctctgcatgtgagatgggtttcctgaatacagcacgctgatgggtcttgactctcttgcaaaaatcctcaataaaatactggcaaaccgaatccagcagcacatcaaaaagcttgtccaccatgatcaagtgggcttcatccctgggatgcaaggctggttcaacatacgcaaatcaataaacataatccagcatataaacagaaccaaagacaaaaaccacatgattatctcaatagatgcagaaaaggcatttgacaaaattcaacagccctacatgctaaaaactctcaataaattacgtgttgatgggacatgtctcaaaataataagagctatctgtgacagacccacagccaatatcatactgaatgggcaaaaactggaagcattctctttgaaaactgacacacgacagggatgccctctctcaccactcctattcaacatagtgttggaagttctggccagggcaatcaggcaggagaaggaaataaagggtattcaattaggaaaagaggaagtcaaattgccctgtttgcagatgacatgattttatatctagaaaaccccatcacctcagcccaaaatcttctgaagctgataagcaacttcagcaaagtctcaggatacaaaatcaatgtgcaaaaatcacaaggattcttatacaccaataacagacaaacagagagccaaatcatgagtgaacccccattcacaattgcttcaaagagaataaaatactaggaatccaacttacaagggatgtggaggacctcttcaaggagaactacaaaccactgctcaatgaaatcaaagaggatacaaagaaatggaagaacattccatgctcatgggtaggaaaaatcaacatcgtgaaaatggccatactgcccaaggtaatttacagattccatgccatccccatcaggctaccaatgcctttcttcacacaattggaaaaaactactttaaagttcatatggaaccaaaaaggagcccgcattgccaagtcaatcctaagccaaaagaacaaagctggaggcaacacgttacctgacttcaaactatactacaaggctacagtaaccaaaacagcatggtactggtaccaaaacagagatatagaccaatggaacagaacagagccctcagaaataatgccacatatctacaactatccgatctttgacaaacctgacaaaaacaagaaatggggaaaggattccctatttaataaacggtgctaggaaaactggctagccatatgtagaaagctgaaactggatcccttccttacaccttatacaaaaatcaattcaagatggattaaagacttacatgtcagacctaaaaccttaaaaaccctagaagaaaacctaggcaataccattcaggacatacgcatgggcaaggacttcatgtctaaaacaccaaaagcaatggcaacaaaagccaaaattgacaaatgggatctaattaaactaaagagcttctgcacagcaaaagaaattaccatcagagtgaacaggcaacctacagaatgggagaaaattttcacaacctactcatctgacaaagggttaatatccagaatctacaatgaactcaaacaaatttacaagaaaaaaacaaataaccccatcaacaagtgggtgaaggatatgaacagacacttctcaaaagaagacatttatgcagccaaaagacacatgaaaaaaatgctcatcatcactggccgtcagagaaatgcaaatcaaaaccacagtgagataccatctcacaccagttagaatggccatcattaagaagtcaggaaacaataggtgctggagaggatgtggagaaataggaacacttttacactgttggtgggactgtaaactagttcaaccactgtggaagtcagtgtggtgattcctcagggatctagaactagaaataccatttgtcccagccatcccattactgaatatatacccaaaggattataaatcatgttgctataaaaacacatgcacatgtatgcttattgcagcactatttacaatagcaaagacttggaaccaacccaaatgtccaacaatgatagactggattaagaaaatgtggcacatatacaccatggaatactatgcagccataaaaaaggatgagttcgtgtcatttgtagggacatggatgaagctggaaaccattattctcagcaaactattgcaaggacaaaaaaccaaacaccgcatgttctcactcataggttggaattgaacaatgagaacacatggacacaggaaggggaacatcacacaccggggccagttgtggggtggggagacaggggagggatagcattaggagatatacctaatgttaaatgacgaattaatgggtgcagcacaccaacatggcacatgtatacatatgtaactaatctgcacgttgtgcacatgtaccctaaaacttaaagtataattttaaaaaaaagaaaatgtggcacatatataccatggaatactatgcagccataaaaaatgatgagttcacatcctttgtagggacatggatgaagctggaaaccatcattctcagcaacctatcgcaaggacaaaaaaccaaacaccacatgttctcactcataggtgggaattgaacaatgagaacacatggacacaggaaggggaacatcacacaccagggactgttgttaggtgggggtaggggggagggatagcattaggagatatacctaatgctaaatgatgagttaatgggtgcagcacaccaatatggcacatgtatacatatgtaacaaacctgcacgttgtgtacatgtaccctaaaacttgaagtataatttaaaaaaaagaaaaagaaacattatgttaaatgaattaagccagatatacaaagtcaagtattttatgattcaatgtataaatcaaatgtccacaataggcaaatccttagaatcagaaagtaaattagcggttgctaagtgggatgtgtgaataaaaatggagagttactgctaatgggtatggtttcctatgtggtgattaaaatgctctgtaacgatatagtagtgatgattgcacaactctttgaatgatcaaaacacattcaattgtatactttaaaagggtaaattgtatggtaaatgaattatacttcaaggaggtttaaattttaatagaaattttagtcctaatcaaggtgacattttctcccatattttgcctccaattcttccacagcacatagtgcatctcacataatatttataatgttggagtgcaattgtttatgtactctctcttacttactcaactataagatccttgaacttgtcacacacgttactttaggaactagcatggaaaaggtcttcacaaatactatctgaaaaatcaataagccagtaaaagtaaacctccatatgagcttactcctctgcttttcatcaccatctattctgtccacatttcaagcaatgtatttccagcatgaatttgtggtgtgatttgacatgaaggagaacatcagtcaccaaaatgaaaggattgtaccacagtacccttattttagtttaacttcgacttttttagattaactcttaatcaaaaattggtacttaacaaggaaaaacttgccttctgttgttttcagagaagtaaaaaaagcacctcacctttgagtcgccaaaattatgcttcctggaatgaccgcataccatgtagcaggtttattttagtttgtttacagaaaagtgtagaccaaagtccagtgctgactttgggagctactaaagacatgaaaaagtagaattttaaacacatttcattgtaaacgactgggagtatctgagcaaattatttcttacgtgactttagagaaaacggctacctatctgaccccaaaacgacttgaggaaactgtttccacggtcctgctgcagaggggaagcacagtcgtcaagaagagagtggggtcaggatcaaaacacatttagtgtgacttagggaaagaaaacattttccctctttgaacctctctggatacagtcattttgcctctacttgaggatcaactgttcaacctcaatggcctttcaggacctcctgggtcacgctggtgacctgtggagattccagatccttcagactgtttttctctcaatctttgctgttgctacataccttcattttatgctggagaacttcactgcattcatacctggccatcgctgctgggtccacatcctggacaatgacactgtctctgacaatgacactggggccctcagccaagatgcactcttgagaatctccatcccactggactcaaacatgaggccagagaagtgtcgtcgctttgttcatcctcagtggcagctccttcacctgaatgggaccttccccaacacaagtgacgcagacatggagccctgtgtggatggctgggtgtatgacagaatctccttctcatccaccatcgtgactgaggtaagaggctctgttctcgtctcatgagtatgtgacctgggtgtttagaataacacaagtaataatcatgcttccagccttcagtcacatgtaggtccttagtcttcattctttcagcaaatactaattgcttctttattaaatgtctgacacctacacattttgagtaatgaattccaaagtagaaggcatcctgctattataatgctttaagtcacagggagaccaaagtttaaacaagcatttatatataatatgttaaaatgttctgctaggtcagtgatgctcagcctgtcattgcaaattagaaatatctgggaaattgagaaaagcctccatgcccagagtataccctaaaacaatcatatgagaaggtctaagagggaaatttaggtttctaaaagtttttaaaggtcttcaagtgattgcaccatgtggtcatgtttgagaacca

SEQ ID NO: 5590 - DNA, 6000 bp, Homo sapiens
gtattacaggcgtgagccactgcccccggccatatgtagcacatttgctttatccaatctaccacagatgggcatttaggttgatttcatgtctttgttattgtgactagtgctgcaatgaatacacatgtgtatgtgtctctatggtagaatgatttatattcttctaggtacatgccaagtaacggaattgctgggttgaatagtagttctgttggtagctctttgaggaatcaccacactactttgcacaatgggttgaactaatttacactcccactagcggtttataagcattctcttttcttcacaaccttgccagtgcctgttgttttttgatgttttaatcaatagccattctgactggtatgagatggtatctcattgtggttttgatttgcatttctctagtgatcagtgatatagagcttttttcatagttttaaaaatattttttgaaatatcaaaattttagggccaggcaaggtggctcacacccgtaatcccagcactttgggaggccgaggcaggtggattacctgaggtctggagttcgagaccagcctggccaacatgatgaaaccccatctctacaaaaaatacaaaaattagctgggcgtgctggcaggcgcctgtaatccccacactttgggaggctaaggcagaagaatcacttgaacctggaggttgcagtgagccgagatcatgccactgcactccagccaggggcacaaagtgagattctgtctcaaaaaaacaaacaaacaaaaaaatcaaaatgttagacacagtccaagtggccacgaacgggagggcggttaaatgcgtgatggtaaatccatgcagtgggttaccaggctaccgtgaaatgggaacgagtagagccgtccgaggtacactgttgtgggaagtcagcgcaaaggggaagagtacctttgtgtaaaaggagtaaaatcagaatgtgcgtctcccctcgcttatattttcagaaagaaaatctggaaggatgcgcaagaaactaaaaatggttccccgagggtgggtggaggtgggatgggagagagcctcttcattctacacatgttcgtaagttttctatttttgaatgatgtgaatttactacctattgaacaattttaaaactttatgcatgtgtttgaaggtacattatgatttttctggaagaatataccttgttggtggcagttgccccgggcagttgggagtgagaggagaaaaggacttttacttgccatttcacacactttgagatcatttgcattgtaaccatgtacattaggacttctcaagtacaaatgactaattataatgacttatgtttataatgacttatgttgacatatttctaaatatgtaagaaacacgtaggtatgtatttcctacgtattatctgggttcctttgagcagtgggattgttggagtcagggttgaagaagggggctttcctttcattccttacatgattctgtgatttttgcaacatgcacactgtaagaaaagacaagaaaactgagttaaggaggttcctatcatcctccctccctgcaaaaatgcacgtgggtgaatttaggaagatttgcaaaaatgagttcttgcaaggcataagatctaggagctctaagctgctgctgggcagtgaattgaagaggaattcaaaagggaagaaaagtgatttaagtttgtggtgttattggtggggggcgggtagtccccaaatttatgtccctcaaagaggaattaaagaactgaagaggtgagatctgcttttggccttatgtggctcatcaatacctcctgctcaatgaggtgaggcctgttctctggagcaggaggataatttgatattttatggttaatgtttctttgactttctgatggatcactgggcatcttcacaagggtacagtggaaaaagcaatcaaactggagttgggatctgagaccctggagagccctgtccctacagcagtatgaaactgagaaagagcatcaccttctgctgactccagattcttccagggtttcagggaggggccaaacaagaaacccctgtgattccagctggatctgaaatactgtggcttcaactggaaaagaagaaaaggaagaatgatgggtctagtgtgatggtagtggtgatggtgtgatggtggtgatggtgatgatggtgatggtggtgatgatggtggtgatagtgatggtggtgatggtgatgatggtggtgatggtagtgattgtggtgatggtgatggtggtggctagtatttattgtcaggcccgttcattatctcgtttaatcttactaccttaagtggaaggccctatcttagagatggagatactgaagttcacagcagggaaggcaaccgcctaaggccatttggcggccatgctggcctttcgtttaattgatgggaacccttggctaggaaggtcaactccacagcaattctaattcgatgaataacaggggtttactttacacaaattaatttaaagagacaccccggagggcttggggactataatctggggctacctgccttcctcccaagcccttctctccccacccctgcctgaggacccttgaggcacctgggaaagatgtgcctagtttgggaaaggctacagttccaggtgtgaccgccaggtggcagagcagctgcactaagccctgccccaagcagccccagaaaaacagaaaatacaaatgaaaaattccttggcctggaagtggaaagtcagttggagattccgggtgccttctggcaggtccaggaggtttgaccttctgctgtaagcaaagcctaggggtgtccatgacaggcaaagggcagggaagaagaaaaaatgtgaaagcatatggacggaggaaggagaaagaattgaagtgcttcctggacaccttggattccggcagccacctccagcccagagattttcaaagcaaggcccgggcccggtgtggtgcagtcagctggggacttactttaaaacgtgcactcctgggctcagcgcaccctgcagcagacgctcaagaaactgcgttctagccagcacacccgtgacttctggcacttgctgaggtttgcagacaccaacacagcaacacacttcactccacaggccagaagccaggagccagagagaggaggccaccacggaaggccatgtctcagggccaggcctacccccgacagcacggtgcttgctcaaaacaggaatagggtgcaattctttgcacgttagattaggcctttgggctgttttggactggggctctatccaaggagcccctctcctgcggcctcctgggctttaatttgggttggttctccacctcccccagtccctctctttttgctattttatcctaatgatttcctgcctggagaggccgaggaaggaaggagccccagctttgaagcccaggcctggaatccgactccccagcttgctggccggcctccatcctggctgagttccccaagccctccagggaggttctcggaggttcagggtccagacacccacccacacctcacccacacttccagcacttctcggacttctctccggaactgactcagccgcttccctctcgcactctgggaggtgacttcaggctggccctcattctgacccaaatcctgaattctagcttttggccgggatttggtccatgacaggctggagaccacacagcagctgcccaggggcatcagagaaagctcaggctgtggcgtctggctctgatctggactgcggcgagtgaccttgggcaagttgcctgccctctctgagcctcagtttccttgtttaagggaatttgccttgtttctctcctgggctgccataaggagtgaaggaaggggtgcaggcagtgaggtcagcccagagctgagcacactaagaggcaccacccagatggccatgggggagggctggcttcactctacctcgcccggagcctggaagcggggctggcctcagatgctgggtcacagcgtcgtgattttgctcacttccccaaccgcccgcctgctcagctgcgggcccacgaggggcttcaaagagaagccaggaaatggtagccatggtttccactgggggagcttactgtctaataaaggcaacctaaaacctcggaatagaagcttcccgaaatagtgagtctgcaagctggtctccccggcactgcctggtaggaggttcacatcaggaaagaaaagagcacagacttgggccttcctgccagctcgtgcccaccccacgtcctctcccacgcccaccagcaccatctccccagctagggaaggcccttcccaggccccacatctggcttcagagccttgaacagttgtcaggagggatgaagtttaggctgaccgttttctgatttaaagggcctcgcgtagaaggttctaaagatttaagaatgagatcagctggccagcagggagtggctgaggcctcaggtcctgagacatgaactgccttcctcactcagaagcccacgctgagattaaactttaaccaactcagtgaggcaacagcccagttgatatttcttccaaactgtaattcagtaacatcaaagcaccctgtctttttaaatagaatctgcctgactttcacttttggtgctggagaactcagaaggtggctcagccctctggtccacacttggtgggcagctcggatgccccaggcagcccgggcacagtgagcttagtccccttcaccccctccgcagagctctggggcatccgcacagtcactcctggacacaagataaggaggagtttccccgaggcatcacagggcttcccgggactgagggactgactcaactggttattggacagtgccccacccccaatccggctgaggggcaggaaggcagaaggtcttggtggccctggatcttgtggctgcaatcggttccaaacagcagttaggtcagcagtccgctcagccgaggcagctctgttcatggcgttctcgaagctcttggagcaagccggaggcgtgggcctcttccagaccctgcaggtgctcaccttcatcctcccctgcctcatgataccttcccagatgctcctggagaacttctcagccgccatcccaggccaccgatgctggacacacatgctggacaatggctctgcggtttccacaaacatgacccccaaggcccttctgaccatctccatcccgccaggccccaaccaggggccccaccagtgccgccgcttccgccagccacagtggcagctcttggaccccaatgccacggccaccagctggagcgaagctgacacggagccgtgtgtggacggctgggtctatgaccgcagcgtcttcacctccaccatcgtggccaaggtagggcctcccccagagccactcgagtcccgtcaccttggaggtcagagtcatggatcaggttggttggactccaaggtccagtcctgggagggacccgcctcctctcgagcctctcagcccctcgtcagccacacacaggggagtgggcggcagggatcagtctacagatggggccagcccaggctcctggtagtgcggggggcacctgggtgggcacctctgaatgctggcatctggacattcgccagcctcgcctggtcccggccctactgacccattagccgtgactccagacaactcagctgcagggggaaatcaggggtaaggggggtctggctgaactgacccaacaggcttcttgctgagacaggccagggtgacacacgtcaccctagagatggtggaggatgaggaacctgatcaatgttgaggctgggggcagaggggggttcttgctaaactgattcagcagggttctttgctaaaactggattttatgaggaagcgccagatgggcccaggagaaggctcaggaacctgactaaagtttggccaagcaaagcattctggtcaccccacgcccattt

SEQ ID NO: 5591 - DNA, 6000 bp, Homo sapiens
ttatcctttttcttcaccctcggccctgtatttagtcaaagaaaagcaatatgccccaaacccaagcatttctctccacctgccctaatcccctagccctgaccctcattgctcacatgatccaccccaacagcctcctgggggaaccccttcttctatatttgtcccattttcagtctgttctccacacagcagccagggagatttgtaaaaacattagtcagatcatgccacttctctcctcaaaaccctataaggaagtgtatgttttggccccaaaactgctctacttttcccactcacttctccccaaccatactggcctccttcctacttcttgagcataaaatcacatgcccaccccagggtctttgcataatactcttccctctgcctgcaatattctttccccagtcaactgtgtgtcttgtcccctcatctacttgggtctctttcaatgccacctccacagagaagtcttccctgactgccccacccaaagtggcaacatgatccttactctctgccccttatgctatcttgttctctccacagcatgattactacttgtcactatattcatttatttcttgatgtgtttctcctctctcattggcatgtctttctacatatcaatgagaacagggaattatcttgtttgttcaccgctgcatccctgtgcctagagcagtggctggtgcattatcaacactcagctcaacaaatgaatattgatattaagaagaaagacactcttcttttttttttttttttttttttgagacagaatcttgctctgtcacccaggctggagtgcagtggcgtgatcttggctccactgcaacctccgcctcatggattcaagcaattctcctgcctcagcaaccctggtagctgggattacaggtgtgtgccaccacctctggctaatttttgtatttttactagaggcagggtttccccatgttggccaggctggtctcaaactcctgacctcaagtgatccactcgcctcggcctcccaaagtgctgggattccggccgtgagccaccacgcctggcccaagagaaacactcgtaatatccactaagagatcaaggaaattattccacctatgaaacaagaagtggaaactaggaaacaagaagaagcagttataggaagaaccaaacacggattctgaaatggaaattacacattctgaaattaaaatgctggtgatttggggctgggtgcagtggctcatgcctataatcccagtactttgggaggccgaggtgggcagatcagttgaggccaggagttcgagaccagcctggccaacatggtgaaaccccatcgatattaaaaatacaaaaattagctgggcatggtggcacatgcctatagacccagctacttaggaggctgaggcatgagaattgcttgaacctgggcagtggagactgcaatgggccaagatggcgccactgcactccagcctgggcaacagagcaagactctgactcaacttaaaaaaaaaaaagtggagaaagctgcatgagaagcatttttttgggagagctcagctttggccacactaagtgtgagatgtttattaagcacctaagattaggcagttggatcaaaatctagcattccaagaagaggtacaggctaaagatgtgaatggaccagatgatagagaatatagagaagaccaaggagtgagctcagtggcctccaatgttaacagtgtgtggagaagaggaaaacccaaccaagaagattgagaactagtgagtcctggaggcccagggaagaaagtattctcagatggagatcagagacagatggctcaagtaagatgaggactgaaaatgtcattgaatctagcagcatggaggtcattggtgacagcagagtgataggggcaaaaccttgatgggaatgaatccaaaaacaaacaaaaaaatgggaagacagaaactggaaatgagtgtcaataatactttcatagaattttgttgtaaatacaagcaaaggtggggcagtcgcttaagaagaaagaggggctcaaatggagggggagtttttggaaggctacagaaaaaaatggcatatttgtacattggtggaaattatccagtagcgagggaaagacaaatgccaaagagagatgtgagcaggcaaaggggggtgggctctaggcacacagtgaggggttggcatggatgagagagaaaccaaactgggtggaaggaaggcagaatgtgggggcaccaaggcaggtgagctggtgagagaattagactgttggcttctgatggcttctattgttttagtgaaataagaaaaaaggtcatctattgagagagaggatagaagagaaggtggtaggtttgaagagagaagatggtatcaaataacccctggtttgtgtgttcaaatataagggtaacagaaataaaacgtacaactgacagaccaagacagtagaagaatataacaagaaaacttaatggattcagtagaaattaggaacaaggaaaccaagatttaaagggaaaatgtggtaaacaagaaaacatacagtaagtccaaacatgtcaataattacaataaatgtgaacaggttaaaatcgctaattaaaaggcagaggtatttcttttggattttacaaaaggaaatgtaaagcttatttggcagctcaagctgatgaagctaaacatatcagttactaaaacaaagtctgcacatatttacaccaaactgtaaacagtagtgtaactcactggttgatgagtatatgagggatctttattttcatttcaatatgttctgaatttttgaggaagtgtgtaaattatttcataattagaaaataaatgaaatttttaaaaaaatcatccatgcacttcagcaagtctccatggaacctttatttgttgtccaaatcagttccaaagagcctctaaagaagggttccagactaccaggagctcactggaaataagaccaactggaccataatagaagaatgcaggtcatggctgggtgccgcaactcacaccactttgggaggccaaggcaggcagatcacctgaggtcaggagtttgagaagaatgcaggacagtgtaaagatgagattccactgacaactctgagccctagttgtaggcaggaataagtgaagagagcccgctggaggaggagtatttggactgtgcccattccacacagtatgtggcctaagggtgagcctggagacagcattccaggctggaggtccaacataagcaagggtgggaactgagaaagcatgtacagggcatgtggtggaagcagtggatgactcaaggtgcagagcccagggaggcaaagaagttggcttggtaagccatgtggaggggcagcgggaagagtcggtgaagcaaaaagaagcagatgggaggggcatttatgcctcaaatggagagttttatgcccaaagctcataagagcaaacacctgggttgccatcactgctgcactgcacatatacgcatgcacacatgtacacacatgcacttgtgcaaacacatgtgcacacatacacagacatgtgcacacacccacatatacatacacttcttttttttcttttctttttttttttttttttgagataagagtctttctctgtcaaccaggctggagggcagtggtgcaatctcagcttgctgcaacctctgcctcctgggttcaagagattctcctgcctcagcctcccaagtagctggaattacagctgtgcaccacgaccatgctcagctaacttttgtatttttagtagagatgggtttttgccatgttggccaagctggtcttgaactcttgacctcaagtgatccccccacctcggcctcccaaagtgctgggattacaggcatgagccaccacgcccggccatgcacacacactttttaactgctttgtgttctctggccctttcgcctacagaattagctatcgagaccaagggggttctcttggcctcggtccagcctttcctgaaccccacaccctgcatcagcacacactgctgtccactcacctgccctagtaagtcaccactagctgttgttgactgggagccccttggcttttaagcaggatttgacccaagggctcgcagtgcgtggtgggtccaggggcaggagttgaggcagaaagacaagggcagggacagctgtggagtgggggaggtgggagagagaaatccttaggaggcaaaactagccaggcttggcccctggtggatttgggaggcagggagcaggaggcgtgaaccaagacgctgggttccaggccagacactgtgacatgagaggccatagctgaggtggggctctgcaggaggcatagatttggggaggggacagagatctcagggtggcattgggcacaccgaacctggggagtctgtggggtgtctgttgatgctgggaagctccaccgaggactcaggacagggtaacagcaaagcgggcacaggacgccaaccacagcaggtgagtggaggcaggagccacgggtggggccaggccacacagcctgggaggcgcaggggctgggcagctgccagtgacccaagcccacacagagacttgcacagctgccccagccccaaattagggggatcccctggcccaccttctcttggctcagccactctgggaggtgggcacacaggggcaccgaagggagcaggcagccctggcatcccacagccgccaggagaaaaacttaggcctccccaagacctggcacagagcaggccggccctggcccccaagcagaggaggctgcacctccctcgcgtctgtgcctgcctcaacgcgggttaaactttgaccaaggaaatgattgctaaactcgattccataagtgtcaccggtcacactttaattccagtctaaaattaaagtcttcagtctccacattccctactttccaaattcagctttcccgggaggtctggagcagctgcctctctggggagatgctggaggtctcggaatcacctcacgcggcctcagggcccagttggagccaccccaagtgacaccagcaggcagatgaccagagagcctgagcctccggccccgagtctgtgaagcctagccgctgggctggagaagccactgtgggcaccaccgtgggggaaacaggcccgttgccctggcctctttgccctgggccagcctttgtgaagtgggcccctcttctgggccccttgagtaggttccatggcattttctgaactcctggacctcgtgggtggcctgggcaggttccaggttctccagacgatggctctgatggtctccatcatgtggctgtgtacccagagcatgctggagaacttctcggccgccgtgcccagccaccgctgctgggcacccctcctggacaacagcacggctcaggccagcatcctagggagcttgagtcctgaggccctcctggctatttccatcccgccgggccccaaccagaggccccaccagtgccgccgcttccgccagccacagtggcagctcttggaccccaatgccacggccaccagctggagcgaggccgacacggagccgtgtgtggatggctgggtctatgaccgcagcatcttcacctccacaatcgtggccaaggtagggcctcccccagagccactcgagtcccaccaccttggaggtcagtcatggatcacggtgggtcagactcaaaggtccagtcctgggagggacccacctccccaggccccactcactctcgagcctctcagcccctcgtcagccacacacagggaagtgggcggcagggatcagtctacaaatggggccagcccaggctcttggaggtgcggggggcacctgggcgggcacctctaaatgctggcacctggacactcaccggcctcaccctgtcctggccctgctgacctgtcagccgtgactccaggcaactcagcagcag

SEQ ID NO: 5592 - DNA, 6000 bp, Homo sapiens
gatcctgtcttcacccttaaagctgtcttatagcacccaactgtctaaagaatacagttccaacctgttattgttgacattgaaggttcttcactatctcaccacatgtaataagtcatatcttctgcagctccccaccttgcacatgtactcaccagctacaaagaatgtcttatgcaccatttcttcaatgtaccatgctttttcatggttccttattttgcacatgcaattttccggttccacctttctcctcttcacttggtatgcactaagctgttcttcaaatctagttcttatgttgtctacagtaagccttctgagactctcctggagttatttgatcagtgccaccatatcagcatgaacattttcttgtttatataacctatttcttgtttgagttgatctcttctgccaagcttttgaagtgggattatctctatacatctctgtcccctttgactgtaaattctttgggattagggactgtgtctgtctgttttttttttttttttttttttttgagacggagtcttgctctgtcgcccaggctggagtgcagtggcgcgatcttggctcactgcaagctccaccctctgggttcacgccattctcctgcctcagcctcccgagtagctgggactacagtcacccgccaccacaccttgctaattttttttttatacttttttttttagtagagatggggtttcaccgtgttagccaggatggtctcgatcgacctggtgatctgcccaccttagcctcccaaagtgctgggattacaggtgtgagccaccgtgcctggcctgtctttttcattaatgtatcctcagcacatagcactgtgcttggcacatagttgtcacttaacaaatgtttgtttgtttgtttatttatttattgagacggagtcttgctgtgtctcccaggctggagtgcagtggcacgatctcggctcactgaaacctctgcctcctgggttcaagcgattctgctgcctcagcctcctgagtagctgggattacaggcgtgtgccagcatgtctggctaatttttgtatttttagaagaggagggtttcatcttgttggccatgctggttttgaactcctgacctcaggtgatcctcccgccttggcctcccaaagtgctgggattacaggcaacaaatatttattaagcaagtaaatgaatggttactttcagatactagaacaactaaacattgtccccagctgtgtgaccaggctgagactacctcacttttgtcattaccatatattccttttaatttttcctctaaacaaggtgactttgggaaattttcataatttaaccatttcttcatccttctcctctcttcctaaggactactggctgtcaggctgtctttgtatatacctgttgtcactactggtatcctaaggaggttgaccatttgaaagcagggctgccctgttggttgactgataggtctccaaagcccactcttcaggccattatgaaccatcaatctagtcttcagtacattgaaaccctacttttggccagttatataagggctgggatgttctttgctaagcattccagaagtttgacttctattgagaaataagatatttttgaatacctttggtcaccttgcttatctatcttttgactgttagctgggaagaatttagtagtaattcttagtgagatttcagcatccaacatatttaagacaataacttctttcatttttatgacactctactcaagccatacatacatccttgtgaaccccaaattattcagcacgtattaccacaaagcttacaataactcagtgggttaagttgtatatatatacacacatacacagatacacacacaagcacattatattaaggattttgcagtcaaaaatatattttgttatacccattgatcctttttaagaattttgatcctttaacccctatattttgttctcatttatgacagtcattggtttctgtcagctgcagtcaatatctgaccctaataccatatatattagctcctgcacacataattgctccatttgcaaaacctatttaatatggccaggcactgttgtactttttgtatgcacatatgttttgattcttacagcactctgtaaggtgggtgctgttacacacattttacagaggagggaactgaggcttagtgaagtagtaagtatcttgaccaggcttggttctgactccaagccaatgttctttttactgcaccactccgcctctccatcaaaaggcctactatgaaattgaatatttaaaagattgaataattacaatttatcctaatatcccagttcttacccccttgatcaagactggtcttgattgtattaccaaaaaatatgcttttctctgtttagtaagacaggagtggaaggaggcaaatgtgttcaaaaaatgatgcttgtggatgtgttaaaattttggagttctgttacctagtggcttattctcatgtcatttgtcctcaaagactttcttaagcattcagatccttctgtccctttgaagaaaacagggaagacacttgttatcgtgtcttaaagggcataaaacaccaactggctaccccaacagtcctgtgggtggtcatggaacttactagcagtagggactggtatttgatgggtaaaatggcttctttctcacaagtgtctcatactgaaccataggaagcatttttgacagagtataaggctatccatataagaactgaggatcttttcctttagcatttgattgagtagctccttccctccctctttatttccttcagatcctctccacattctgcagggtttgaggaggtagtgtgtgggaggggggccagataataacaagaaggtgagtcgagagtggtgaggttgtgtaggtgagtgaagggactccctgaggcacaatatccctctttgtcactcccccaagcagcaggaagcacagagatcatccagctcaccaacaggagcgagcaagaaagagttccaacattggtgggagtgttcccactgccaccctggcccctgaacagggatacgtggctggaattcacaggaagtaactgtgacaaggcaaagtctgtttcagtaccggccctgctcccagctacttggtgcactgtgaacaatagccgtactaccatgagggcatattcctaatgcctttcttagagtcccagcctcagataggcatggtcccctgtgaggcaggaacacagcttcctgacaaatgagcaggagtgacccttattcttggcttctgtctgaaatggaaagacagatgttccacactgctgaagtctggacagcacctctgaagccctggagatggtctcttccattcctctggtgatgtccacctactcctcaaatgtagcatcaaggaacttcagctgcttccttggctcaactggattccaattttatccttccctttagtccctcagaaataagcagcgtaggaataattcccttcctggggatatcagctcattcctctagtttatttgctgccccttaaaggagtaccttaacctggggtacctgtgattattgaccctagaatgggtccatcatagattctgggacagcaggtgtctcctgggattgtcccaggcaaaccaggacataaagtcaccttacctaggtgggtaatagccacctaactgacttgtaagagtgaaatgaatatacccccaagtacagtgagtggtctaatcaggggtttgatttagtgaattgccgctaatgacactggtcctttggtgtttcaagcctctgcaccctatttgggcctcccttctacttatgcctttcttcttttctctattcctttaccttttgtcgttggcgtgttaccgtcttcatttctgccactagacctatgccccctgactgcctgggattaacagaggcttttacaactctgcttaccctctttttcttgattctagggctggtacgagccaagcccattattctaggtcctaatctgtttggtggagttgttactccacttctctgaccttgcgcgtagggcctgggcactcctaggaattaggggcagggtggggttagggctgaaacccatttgctccgacactcctgttttatgttctattaactttattcctcaggggaatacttccctttgcagccttctgtatttcacccttgggttcatgtacaaggatctcacaattatcagtggaaacataccctgaaatcttcaggctagaggcagtcactttcaggaccacagaagtccctgcctggtggctgcttgcctccagaaaggagagcaggagtgactgccacattgtcatggcgggagcgcgtgggggccggtgtctgtgaagccggggaagagtggggtcctgtggaatatgagcagggcaggaagccccagcctgagcctgtggtgtgtttggggccgaatattgtcccccccccgcccccgcccacgaaaaaaactcctgcgctcccagaaggtgagagtaccgagattagtcatgcagggccgctgagtgtgacttccagccctccagcgtctcgtgtcccgcccgtgtcggagcccatggctttttaggacaggaagcgctgcggggtagtgcgggcaggcaggcacgtcacaccggacagcgtcgagattgctgctttcggttccccagcgggtggtgaggcagaaagtgcagggcggaatgaggagccccagcacctcagagctgtcgggcagtggcggggaagcaaagcacaggagcgctgtggtgccagcggccgggctagggacgactggcgggtttgcgctggacccgaccccgagggcgggcgcaagggggcgggcgctgccgtactcaggccgcggggccagggcgggccggccggcggggcatttaaaccccgctgacagccagtccagcccgggacacgcgcccagctctgtagcctcctccgtcgactcagccttaggtaccggtcaggcaaaatgcggtcctccctggctccgggagtctggttcttccgggccttctccagggacagctggtgagcggggcaggggagggaggcgtgccgggacctcctgggctcggggcttgcaggggccgcggggggcctcggagatcaccccagatcggccccggcgtcgccgcgtggccaggggtgctggggggacttggtcccgagctcctccagcggcgcccgcctcggaggttgataaccctccctgcccaactccgcccgcgctcccccagaccccgcgacgctggctcggtgacactggggaagaacaggctgccagggagggtctccatcgtttcccgtttccatcctcccctcctaacacacatccggggcgccttcagagcgcctttctgtcgttgggcagctggggaacctgggctcgaaggctggggaaccgaggccaggggatggtagaggaaaggggttgccactggggtttgtgagtgtccctcttggtctcctttagccctcgaacaccaaggccagaactcagtggtcctgggagctcgtctcgaggcctttcagcacctggaaagggcacagctctcagagcagagcagggcagcccctcggcagtgggagaagggcttcacagaggttctcttcctgaccgcagggaccacatgttgggctgcaaggtggggtggaggggtttcagccactcttccttagaggcggtcaaccattggagcagtccgtttggtctgcacagtttttaaaatattgtgttagttgccattatttacaaatcataaaatttaacaaaaatagctagattccagacttctcttgaacaatagacgacgtggaccgggcatggtggttcatgcttgtaatcccaccactttgggaggccaagatgggagaattacatgaggccaggagttcgagaccagcctggccaacatcgtgagaccacccctccattcc

SEQ ID NO: 5593 - DNA, 6000 bp, Homo sapiens
gaggccaggggccggcggctggctagggatgaagaataaaaggaagcacccttcagcagttccacacactcgcttctggaacgtctgaggttatcaataagctcctagtccagacgccatgggtcatttcacagaggaggacaaggctactatcacaagcctgtggggcaaggtgaatgtggaagatgctggaggagaaaccctgggaaggtaggctctggtgaccaggacaagggagggaaggaaggaccctgtgcctggcaaaagtccaggtcgcttctcaggatttgtggcaccttctgactgtcaaactgttcttgtcaatctcacaggctcctggttgtctacccatggacccagaggttctttgacagctttggcaacctgtcctctgcctctgccatcatgggcaaccccaaagtcaaggcacatggcaagaaggtgctgacttccttgggagatgccataaagcacctggatgatctcaagggcacctttgcccagctgagtgaactgcactgtgacaagctgcatgtggatcctgagaacttcaaggtgagtccaggagatgtttcagcactgttgcctttagtctcgaggcaacttagacaactgagtattgatctgagcacagcagggtgtgagctgtttgaagatactggggttgggagtgaagaaactgcagaggactaactgggctgagacccagtggcaatgttttagggcctaaggagtgcctctgaaaatctagatggacaactttgactttgagaaaagagaggtggaaatgaggaaaatgacttttctttattagatttcggtagaaagaactttcacctttcccctatttttgttattcgttttaaaacatctatctggaggcaggacaagtatggtcattaaaaagatgcaggcagaaggcatatattggctcagtcaaagtggggaactttggtggccaaacatacattgctaaggctattcctatatcagctggacacatataaaatgctgctaatgcttcattacaaacttatatcctttaattccagatgggggcaaagtatgtccaggggtgaggaacaattgaaacatttgggctggagtagattttgaaagtcagctctgtgtgtgtgtgtgtgtgtgtgcgcgcgtgtgtttgtgtgtgtgtgagagcgtgtgtttcttttaacgttttcagcctacagcatacagggttcatggtggcaagaagataacaagatttaaattatggccagtgactagtgctgcaagaagaacaactacctgcatttaatgggaaagcaaaatctcaggctttgagggaagttaacataggcttgattctgggtggaagcttggtgtgtagttatctggaggccaggctggagctctcagctcactatgggttcatctttattgtctcctttcatctcaacagctcctgggaaatgtgctggtgaccgttttggcaatccatttcggcaaagaattcacccctgaggtgcaggcttcctggcagaagatggtgactggagtggccagtgccctgtcctccagataccactgagctcactgcccatgatgcagagctttcaaggataggctttattctgcaagcaatcaaataataaatctattctgctaagagatcacacatggttgtcttcagttctttttttatgtctttttaaatatatgagccacaaagggttttatgttgagggatgtgtttatgtgtatttatacatggctatgtgtgtttgtgtcatgtgcacactccacacttttttgtttacgttagatgtgggttttgatgagcaaataaaagaactaggcaataaagaaacttgtacatgggagttctgcaagtgggagtaaaaggtgcaggagaaatctggttggaagaaagacctctataggacaggactcctcagaaacagatgttttggaagagatggggaaaggttcagtgaagggggctgaacccccttccctggattgcagcacagcagcgaggaaggggctcaacgaagaaaaagtgttccaagctttaggaagtcaaggtttaggcagggatagccattctattttattaggggcaatactatttccaacggcatctggcttttctcagcccttgtgaggctctacagggaggttgaggtgttagagatcagagcaggaaacaggtttttctttccacggtaactacaatgaagtgatccttactttactaaggaacttttcattttaagtgttgacgcatgcctaaagaggtgaaattaatcccatacccttaagtctacagactggtcacagcatttcaaggaggagacctcattgtaagcttctagggaggtggggacttaggtgaaggaaatgagccagcagaagctcacaagtcagcatcagcgtgtcatgtctcagcagcagaacagcacggtcagatgaaaatatagtgtgaagaatttgtataacattaattgagaaggcagattcactggagttcttatataattgaaagttaatgcacgttaataagcaagagtttagtttaatgtgatggtgttatgaacttaacgcttgtgtctccagaaaattcacatgctgaatccccaactcccaattggctccatttgtgggggaggctttggaaaagtaatcaggtttagaggagctcatgagagcagatccccatcatagaattattttcctcatcagaagcagagagattagccatttctcttccttctggtgaggacacagtgggaagtcagccacctgcaacccaggaagagagccctgaccaggaaccagcagaaaagtgagaaaaaatcctgttgttgaagtcacccagtctatgctattttgttatagcaccttgcactaagtaaggcagatgaagaaagagaaaaaaataagcttcggtgttcagtggattagaaaccatgtttatctcaggtttacaaatctccacttgtcctctgtgtttcagaataaaataccaactctactactctcatctgtaagatgcaaatagtaagcctgagcccttctgtctaactttgaattctattttttcttcaacgtactttaggcttgtaatgtgtttatatacagtgaaatgtcaagttctttctttatatttctttctttcttttttttcctcagcctcagagttttccacatgcccttcctactttcaggaacttctttctccaaacgtcttctgcctggctccatcaaatcataaaggacccacttcaaatgccatcactcactaccatttcacaattcgcactttctttctttgtcctttttttttttagtaaaacaagtttataaaaaattgaaggaataaatgaatggctacttcataggcagagtagacgcaagggctactggttgccgatttttattgttatttttcaatagtatgctaaacaaggggtagattatttatgctgcccatttttagaccataaaagataacttcctgatgttgccatggcatttttttccttttaattttatttcatttcattttaatttcgaaggtacatgtgcaggatgtgcaggcttgttacatgggtaaatgtgtgtctttctggccttttagccatctgtatcaatgagcagatataagctttacacaggatcatgaaggatgaaagaatttcaccaatattataataatttcaatcaacctgatagcttaggggataaactaatttgaagatacagcttgcctccgataagccagaattccagagcttctggcattataatctagcaaggttagagatcatggatcactttcagagaaaaacaaaaacaaactaaccaaaagcaaaacagaaccaaaaaaccaccataaatacttcctaccctgttaatggtccaatatgtcagaaacagcactgtgttagaaataaagctgtctaaagtacactaatattcgagttataatagtgtgtggactattagtcaataaaaacaacccttgcctctttagagttgttttccatgtacacgcacatcttatgtcttagagtaagattccctgagaagtgaacctagcatttatacaagataattaattctaatccacagtacctgccaaagaacattctaccatcatctttactgagcatagaagagctacgccaaaaccctgggtcatcagccagcacacacacttatccagtggtaaatacacatcatctggtgtatacatacatacctgaatatggaatcaaatatttttctaagatgaaacagtcatgatttatttcaaataggtacggataagtagatattgaggtaagcattaggtcttatattatgtaacactaatctattactgcgctgaaactgtggctttatagaaattgttttcactgcactattgagaaattaagagataatggcaaaagtcacaaagagtatattcaaaaagaagtatagcactttttccttagaaaccactgctaactgaaagagactaagatttgtcccgtcaaaaatcctggacctatgcctaaaacacatttcacaatccctgaacttttcaaaaattggtacatgctttagctttaaactacaggcctcactggagctagagacaagaaggtaaaaaacggctgacaaaagaagtcctggtatcctctatgatgggagaaggaaactagctaaagggaagaataaattagagaaaaactggaatgactgaatcggaacaaggcaaaggctataaaaaaaattagcagtatcctcttgggggccccttccccacactatctcaatgcaaatatctgtctgaaacggtccctggctaaactccacccatgggttggccagccttgccttgaccaatagccttgacaaggcaaacttgaccaatagtcttagagtatccagtgaggccaggggccggcggctggctagggatgaagaataaaaggaagcacccttcagcagttccacacactcgcttctggaacgtctgaggttatcaataagctcctagtccagacgccatgggtcatttcacagaggaggacaaggctactatcacaagcctgtggggcaaggtgaatgtggaagatgctggaggagaaaccctgggaaggtaggctctggtgaccaggacaagggagggaaggaaggaccctgtgcctggcaaaagtccaggtcgcttctcaggatttgtggcaccttctgactgtcaaactgttcttgtcaatctcacaggctcctggttgtctacccatggacccagaggttctttgacagctttggcaacctgtcctctgcctctgccatcatgggcaaccccaaagtcaaggcacatggcaagaaggtgctgacttccttgggagatgccacaaagcacctggatgatctcaagggcacctttgcccagctgagtgaactgcactgtgacaagctgcatgtggatcctgagaacttcaaggtgagtccaggagatgtttcagccctgttgcctttagtctcgaggcaacttagacaacggagtattgatctgagcacagcagggtgtgagctgtttgaagatactggggttgggggtgaagaaactgcagaggactaactgggctgagacccagtggtaatgttttagggcctaaggagtgcctctaaaaatctagatggacaattttgactttgagaaaagagaggtggaaatgaggaaaatgacttttctttattagattccagtagaaagaactttcatctttccctcatttttgttgttttaaaacatctatctggaggcaggacaagtatggtcgttaaaaagatgcaggcagaaggcatatattggctcagtcaaagtggggaactttggtggccaaacatacattgctaaggctattcctatatcagctggacacatataaaatgctgctaatgcttcattacaaacttatatcctttaattccagatgggggcaaagtatgtccaggggtgag

SEQ ID NO: 5594 - DNA, 6000 bp, Homo sapiens
aaagggagctaaaaactttacataggatttgtataagtatgcctatagtcagaaaggtaggctggaaagttgtgctaaattattctggtacctttccacctaccatgctttgtctatggattaggtataatcctgagttccacgatgaagaaacttcagctcaaagagttaaagcaactttccccaaagtcggtaaatggctgagctgaaacttgaattcagacttgtctgattttaatatgaggaaaagcatttcacattaattgaagtaatttctaaataggcacctgaaaagctgaattctaatgggaactccatttatgagtaattttccatgcatcatgaccccaaaacaaaaccttccagggcctggcaacttagtgaagaaatcaaggcttttcagaattttcagatatatgaacacacacaaacatcactaaaattctgaccacttgaagaagatgaatgacctgaggctggaccttcattattatcagcttgatcacttataaagaaggatagcaatgtctttgatttgccactaaacacttgagaacgtaattactcgtatcatggtagtatcaaaagaaagtcttgcaaaaatgtgttgaacagtagtaactatagcgcatagttttttatcagcgactcaattgggtgataatgtgcaccatataaatgggctacatttatttatgtattcccagtgatgacaaatatccactggttttcagtttggaaaatatgcaaaagtcatttattcagagtgatacctagtgatgggccaaggtggcataaagaacactggaattgccaagaaatggaagactgaagagttccactggtaactgatagaattgcctctgagcttgtgtgaagtgtatttccaaagaatttgagtaataaaaatcactcaatattaaatcttgtttgaatttaattgaagttccatttgtttataaagtatttgagaatttcttccttttttgaggcctattcaaacgtcctgtttaagtccctacaagcctgaactaaataagacatctttcccttcatgcttatttagcaaaattgagccgatagtagatcatgctggttttcccctttgccattctacaatggagtggatgattgagatccatgagacaattagctaaggaccttgaacctcacgctcagttgccctcccagctgaatattctgcttaaatgttctacttgtttactgtggaatggtgctggcattagtctgttttaatattaaataatgttctctgctgacctttctaagtggactctgaaatttgcctcctaaaagtttgagtcaacatctcttttcacatttgttaagtgtctgtagaatatgtgaataaatgattagccacagtcacatttagttacaatgaattacaggaatcggataggatggaatataaattcagtttttattttcatggaaacatgtttgtgaatagataaatatttcaatctaaataaaagcttgaaaaacttaggtttttttttcagtaaaagaggaattaaacataaattgtaaacatggaagagactcctagaattcacgtaatttattttaatttattgagtgtctactatgggataggaacttctagatgctaagagtacatcggagagtaaaatagacaaagtcctttaggggcttacattccagtagagggatgctaacatttaaaatatatagtatattagtaaaggatacatttcttggagaaaatttacagctgtgaagggagattttgagtgttagggtttgcaatttaaatagggtggtcaaggaaggtgacatttgagcagacttgaaaaggtaatttaattacttacgttgatttaattatcttgctattaatctgatatattctcatttttacaaatgcggccactaagaatcagagaaattaagtgatatgtccaaaatcacaagataccttagtaagagactgtaaaaagagacttggtcttttgttggggctaaagaatgttttccacttaacacaaatagccttggagggcaaacatttttctaataagggtatttgaatgaaagtggagtggcaaatcctcaactcaaattcttcaaccttccagcattctcagattacctttccctttgagagatagagagggagaagaaggaaggaaggaaggaaggaaggaaggaaggaaggaaggaaggaaggaaggaaggaaggaaggaagaaggaaggaaggagagaaaagaggaagagaaaaaagaaaaataaagaaaagaaagctcaaccttctgactttggtagaatcgaataccaagtggtcttttcctcttcaacctcaagactgtaaagatcccaggagatctttctccaatttctgtttctgctgtattctctacgtcctttgtgagttttacctcctctaacagttatccatctctaccaccattttgagcctaaagtggaacacaaacttctttccctttaatttaatgataaaatacaatacaatgtcaatgatgtagcaagttttccctaaacactgggagtaaagaaggaatttatcccccagcacagcacaacaaaaaatatttaatatgagttattcccattattaaaatctcatcagctcttccttacaatgggatattttttgagaaacgtccgtgccaccagccagatttttgtgccacttctttgtcttcactcctatgacaagtctccaatatcattcccatggactaaaaagaaaaaaaaaattaaaggtctgtttattcgcaagcagagttcttttatcttccccacctgctcatcagatcaactctttctatattcataaagatatcagccaatcaagaagccgctgttgtaggccatatcttttatagcttacaggaagaggagaacttctggatttgcagtcttttgtcttttatgataaaattattggacatggttttttccctatcaatctctgtaagcagaagtaagcattatattgaattatcctcttcaggataggaattactcaattcctcctggaaggaggcaatggccacagttgctttgcagtttgtttttttaacccataatttctgttaaagtatagtttggcatcaccaatttgcctcccaggaatttgtttgataggcatgctcattgagagaaagctctatggggaggactactttcactatctcaattaagcagcttattcacattgtgaggaattctttgagccatccttaatattcattggactgaaatatgtaaaaattattataataatttttctgaaacatagttttaatcttgccacttcctagtttaaaataaaaacagggccgggtgcggtggctcacgcctgtaatcccagcactttgggaggccaaggcgggcggatcacgaggtcaggagatcgagaccatcctggctaacatggtgaaaccccgtctatactaaaaatacaaaaaattagctgggtgtggtggcaggcgcctgtagtcccagctgctcgggaggctgaggtcggagaatgctgtgaacccgggggcggagctggcagtgagctgagatcgagccactgcacgctagcctggccgacagagtgagactctgtctcaaaaaaataaaaaaaaatgaaataaaaaataaaaatagagcaaaataatagccattttattcttgtacaccactcctactcccattggctttgagaacagatgaaggaagacaccaatttagtgaaagtctagtctcaaatgaccaaggcttgttcatgtgcattttcttctctttgatcccaggccaaaataaccatggtgtgcagagttcactcttagcaacattgcaacaatggtgttttttgttttgttttgttttgttttgttttgttttgttttgtttttaatgccccatttcttccagttctttacctttttctcttttggtagcatttgatatcatcaaactctttctttcccattacaacttgttgcatgcaaattgctgaactattttaccttgcggagactactaatgttagcaattacaaatttaacttgttaagcatgtgagtaattgagtagcaggaccttgttaaggccatgtatgagtaacaggtgatggtgtttatattctgacagggtctcaagccttacactaaatgagtcaaatacaaatggcagtattctgtgcacatgagagagggtagaggcgctacagggatttcttcaggtcgaagaagcatattttccctccttctcgctatattaacatttctgatatagaaatgtgccttctaattaatgaggtcattgaatgtactggggttttttttttttcacctgaaaagttatgaattgctgctgtgctttacaatctgcatgaactttgcatggagtgagtctttatggaattaagaagagcgtttgaggacaacgaatgctaccaaagggagaaaagggtaaatatgtagaaaataactgaaaattaaattactgaattgatgctgtgccttataatcaacaaaatgttgaaagcaaggaatactttcctaagaggcataaaggtttcttcatatcccaggtattaaccaatctgctccctaccacttcaaaattcaagactaattggagtcatgcagataatactgttactacacaaagtttaattaaaaccatcagtactcattaactcttttgttataggtttctagtatgtacctttagaaagttattgatgataatgttttgaaccattcttaacctgacttatacaaggggattacatgttttatagattgaatattaaccattaggtagtgtaaatattaaactataaaggagtcaagtttctgaaagctaaaaaagttctgattttctgctgagatcacaacaaaaacctcatatataattggaatacttcatgatacaaataattaaaagcccaggttaaggtaaatatattaaagaccaagatttgcagtaacatttatcatatcaaatctccaaatctagtggaggaatttaaacagaggacacagacagctcttgggagagtcttcatatttttattggtaactaaaagcatactttagctatctaattaaacctttctttggtctaattcaaattcatgaagcaaagatttattcagttatccagatgtgaaaagcaaaattagagcgttttttgttttattgtttggctggaaatgtttctgtctttgggcattatggataattttagttttctcctttctaaaaattattttttttattttctacaatggctataatgtattgggtatatggactagagctttgcttctgtcttcaaggaaatgtcatttgaacagctgacagactcctgtagccggttacatagagattccctaaaataggcaagatgatggctgagtacaaaatgagtactagggaggctacgttctacaggagttgacgtggagaggcagaaaagcttcacagagtagagaaaactcatactagatcttgtagaatacacaagctttgtagaggtggggatggagaaggccactgaagaaggaggagaagcatgaacaaaattagaaattgcactagaggtactttggaacaattgacagagtctaaagagagcagaaacaggaatttataactggattgttaccttccttctctaatttgtcctggtcctaattctaacttagcctgtgggtacagtgatagtaacctggtgaaaataagagaaagacaagataaagttgaaggctataaataatttattaattaatggcaaattgatttttctaggtcctagaataaagaaagaaaagctatgatgttccagagtgctctgctgtaagcacagataatagccaatggggtacatattattacctttcattttacagatcaagacaaagagagtcaggaagtttaagacttaagtctttaaagaccttgtaaggtcttattatccctgtgttccagg

SEQ ID NO: 5595 - DNA, 6000 bp, Homo sapiens
ccaccatgcccggcctatcttctcatttcttaacattctttggaaatacagtgagcaaactagcatttgagtccctactatcctgatcataaagtgctttaaaatgtttttccatttaattcccactgactgggtgcgatggatcatgcttgtaatcgccgcactttgggagcctgaggcaggtggataacctaaactcaggagtttgagactagcctggccaacatggcgaaaccccctctgtacgccgggtgcggtggctcacgcttgtaatctagcactttgggaggccgaggcgggtggatcacgaggtcaggatcgagaccatcctggctaacacagtgaaaccccgtctctactaaaaatacaaaaaattagctgaccgtggtggcgggtgtctgtagtcccagctactcgggaggctgaggcaggagaatggcatgaacctgggaggcggagcttgcagtgagcccagatggtgccactgcactccagcctgggcgagagagcgagactctgtctcaaaaaaaaaaaaaaaaaaaagaaagaaaaagaaaaaaagaaagaaagaaaccctgtctgtactaaaaatacaaaaattagccaggcgtgtttgcgggcacctataataccaactactcaggaagctgaggcagaagaatcgcttgaacccaggtggcctggtcctgtagtcttagctacttgggaggatcgctcaatgctcaggaatttgaggttagagtgagctaagataccattgcactccagcctgggcaacagagcaagcctgtctcaaaaacaaacaaacaaacaaacaaacaaacaaaaaaaacagaccgggcgcagtggctcacgcctgtaatcctagcactttgggagaccgaggtgggcggattacctgaggtcaggagttcgagaccagcctggccaatagggtgaaaccctgtctctactaaaaatacaaaaattagctgggcgtggtggcacatgcttgtaatcccagctactcaggaggctcaggcaggagaatggcttgagcccaggaggcagaggttgcagtgagccgagatcctgccactgcacttcagcctggccgacagagcaagactctgtctcaaaaacaaacaaacaaacaaataaacaccatcgaccaggcacagtggctcatgcctgtaattccaggatattggaagaccaaggcaggtggatcccttgagctcaggatttcgaggccagcctggccaatatggtgaaactcttgtctctacaaaaaatagaaaaattaaccgggttggctgggtgcagttgttcatgcctgtaatcccagcactttgggaggccaaggggggcagatcacctgaagtcaggagtttgagaccagcctgaccaacatggagaaaccctacccctactaaaattacaaaattagctgggcatggtggggcatgcctgtaatcccagctactcgggaggctgaggcaggagaatcgcttgaaccccagagaaggaggttgcagtgagctgagatcactccacttccaaaacaaaacgatagggctgttaatttaggtggtggttacacgggtattaacatgtgtaaaaaatcactgagttgtacatgtaagattcctgcactttttgtattttattatgtgtatgttaaatcttaaaaataaaagcggagaaaaacctgatggcttcctactcctctattaggtaaagtaagaatctgctctggtttggtttcggaggaactgtttcctggtccttggatctacctggctgaaagcacagtgcctggtacaaactaggctcctccccgattttgaattaacgaagttcagtgacatcgtcatcctatttttttttttttttttttgagacaggctctcgctctgtcacccaggctggagtgcagtggcacgatctcggctcactgcaacctctgcttcccaggtccaagaaattctcctgcctcagcctccccagtaactgggattacaggcgtgtgccaccaagcctggctaattttggtatttttagtagagacagggtttcaccatgttggccaggctggtctcgaactcctgacttcaagtgatctgcccgccttggcctcccaatgtgctgggattacaagcatgagccatcgcgtccggcctgtcatcctattttatctcatctcctcctcctcccttccctgaccatcttctctggagtaaaagatctttgctctcaattttggaacacttacaattccttcagccactcttgttaggaagatataagggaagagagcgagagacaggaggcaactcaacggccaaacaggtttattcacaggaataagcctgcaaggagttccagtcaggagtctggctgagaccctgatcgcttacaagctgaggcttttataatatcgtttctattggggagaggtcgggaagtgctggctgattgggactgttggggactttgttaggctatgttaccttctgttgaagctatgggcagggttaacatttgctctgtttctgagaacacagtcatcattgttgtaaaatagcatcactactgttactcctcacaactcttaactgggatcagtgaaaaccattgttgttgagaactcttatagaatttctgagctcttatctaaatcatctgttgagtcttcacaatgatctaccaggctggtaggaaacgggagctcatagagattaaccaaggtcatacagttagaatgctgtgggtctaggactagaatttgatatttactccaggccccgtctctgtccccaacaatctaaccacaagttaaaattccaaattgtgggctgggcgcggtggctcacgcctgtaatcccagcactttgggaggccgaggtgagcggatcacgaggtcaggagatcgagaccatcctggcaaacacggtgaaaccccgtctctactaaaaatacaaaaaattacccgggcgtggtggtgggcgcccgtagtcccagctactcgggaggctgaggcaggagaatggtgtgaacccgggaggaggagcttgcagtgagccgaaatcgcgccactgcactccagcctgggcgactgagcgagactgtttcaaaaaaaaaaaaaaagaaaaaaagaaaatactgtgtgttcctacaacacctttcccagactgtgagcaacttgggaacaatgattatcaccttagtgttcggtgtgttttgtagaggagggcactcactaaaaactggtttgttgaatgcaaccacttaagaattggacatgccgtgcccagcccctaaggggcgctatgctcgttcgtccaaggagcagcgtgaccagcgggagggagtaagtcgacgtccccggcatgtggggcggggaactccactggccggcaagcgaagcagcaggcgaagaccacgcccccgccggccgcgcttgcgcagccttcgctagccccgccccgtcctattcgggctcccgcctctgttcaggtaggaggcggtatgcgggggaggggagtcacctgagggcggggatctcaggtcttggggagccattgttggcgaaccccaacttccgatacgacccggagctgttcctgcagttccagagacaattcatgggtcttggggccaccgaggcgctgtccctgaccaccagcacgagacccctttctatcgcgccagtcctgtggtctccgcacctctccagctcctgcacccccggcccccgtggttcccagccgcacagtagcgtgtcctgggtagcgtgaggacccacggggctgggcaggtgccacgagcccgccgcctcttcgccgcccgccgcctctcctcctctcccgcccgccgcctggccctcccctaccaggctgagcctctgggtgccagaagcgcggggcctccgggagaatacgtgcggtcgcccgctccgcgtgcgcctacgccttctgctccagttgctttcccaattgagcggaaaagccggggcatgttgccggggccctgggcgggacggttgtgccctgcagcccgaagcccgccggggcaccttcccgcccacgagctgcccagtccctctgcttgcggcccctgccaacgtcccacaggttggaaaccagaccctgcagcccccagctagcccgaaggaagcccagactgacgtcgcagggtaatggggacccagaggtagctctgtggggccccatcaggacctcagcccttagcggggctttctgtgtgacaccgtgggacctgaactggggaggtcccccttgcacagaattacaaggggcaactgtaggaaacaattaaatctattatgtgctaagtattgagagttccacggattgaggccctctctagaaggcttagaagtggggtagccggggtatgtgtctgactttgtgttttggtgcggtggtggtgagtgggtgtagaaactaatagtgccaagtgcagtgcctgtcaactagtaagttaataaaccttccgtgaatgaatgagaaggttctgtgactgagggagcagggctagagagggcatctctgctcatcccacccctgcctcccctgggctcaggcagacaaaagtaattaggttgaacctttaatcaaagctggtttcacaggcaagcagacatgatagaggaggtaaaggcagaaatcctggggacacagggtgctggcctggctcacaggcatgcctccttccgggacctcctccaccccctacagtttggcgctcagtaatctcttgttttcttgtctccctcaggacactgggtccccttggagcctccccaggcttaatgattgtccagaaggcggctataaagggagcctgggaggctgggtggaggagggagcagaaaaaacccaactcagcagatctgggaactgtgagagcggcaagcaggaactgtggtcagaggctgtgcgtcttggctggtagggcctgctcttttctaccatggcagcccagggctatggctattatcgcactgtgatcttctcagccatgtttgggggctacagcctgtattacttcaatcgcaagaccttctcctttgtcatgccatcattggtggaagagatccctttggacaaggatgatttgggtgagccctgaaacagcagggtggtggacctggggacacagaaccagccagacacactgggtgtttgtgtacaggcatgtggtgtgggtggattgtctgcacagtagaggccaggggccagtctgcatatgccagataaagaagctctgagatccatggacatgggtgcctgcggggctaaggagggctgcttatttgacgtgtgtgtgcatgccctggaggcactgtttattccgagagtgtttgaggggcttctgagcatggttttcacacctgtgtgggtgcatgtggaggcttcagggtgagtgctggctactgacactgtgagcactgggaactaaaaagttggcacaacgacttcatgtggcctggcatgctacccttcaggagggacaaggtccctgactccaatcctgagccctttgccccatgttgggtggtggagcaacagaactgctagaggcccgggactggcatccagagtgaggtgggaaatcccatatgcaaatcccagggagggggaactgccacgtcctgctccctttttgttccctgacaactgtagctgagaatcatgggtcagtctggggctagtgccgatggtgaggcaggagaagtggccgaagtagtagggccccatgagtgtcagattgcagcacaggctcctcctgttcctctgggaagtaacctgtctcaccccactgggcacccctgcacacctgaccccatgccttctttcattgctcctgtgtttctcccctggtccctaacccctaagtgtaatgttccctgcagggttcatcaccagcagccagtcggcagcttatgctatcagcaagtttgtcagtggggtgctgtctgaccagatgagtgct

SEQ ID NO: 5596 - DNA, 6000 bp, Homo sapiens
agctctaaggaaattatataatgataatttcttagaaattgtctctgaggctaacactgcaaagtaaaatcaaataaagctgaactaaaaattgtctgcttaaaaacccttggtaagaaaaaagtcacagatgaattctagggcttatttgtatagcttcgaactgaaagaagtgtgtaattattaggctgaacatttacttaggaattcaaagtcaaataaagccatactgtaaaaaagcttttcaaagcagttttgtctttaggaatgtccactctctacatataatataaaaagctataaaactgtattgagtccatttatttactatatcccagaaaagggcctagccaacagtagataaaaatacctattgagtgaatattttttgaaataataaactgaagatgttgcattcaaaatagcctcagaaacagtcaccttaaggttcgtttttctctttttgaggtggggtctgggtatatttcccagatgcacttcaaacttctgggttccagcaatcctcccacttctgccttcctagtaactgggactacagatgcacaccaccaccttgaggtatgtacttgaggtatttcttaaaaatcagtttgccttaaaaataccacagaaatagtttttgaatgatcttaaatagaatgcctttaaaacatgtttgtatttttggtaatagggagcaaaacatcaaatttatgttactatttcaaaatatttataaaattatcacaatttattctattgtatatcatttttacctatgtgattaccacaccattactaaatcttaatacagtgaagtttcctttagtactagttttttggttaactgggggattctcaatcaacttatttctaaatacatttagtactaagacaactgcaaatgtgttgcccacaaaaaagactttatagtttcagatgtagatttaatttaacaaatatccaaaagaagaaagaagaaagaaagagagaaagaaagaaagaaagaaagaaagaaagaaagaaagaaagagaaagaaagaagaaagagagagaaaacagtaggtgtaattgcataattaaggaccacaattgtctctaaaatattaacatatccttccaccagagggcaacatttgcaagacatttaaatgattactcaaaagtatttcctcccacagggatataaacaaatagaaacctattacattgctgttggctaataccttatgtacatcttgaaaaatagtatggatacaattatttaaacaattgcttataaaactcagtgtatacatatagtgaaacaacaaataaggtaactcttctttaaatatgtaaaaagaactttcagaaagcacatttctacatattagtattttttcagtttattattaatcatttaactcaaatataataaaaaaaacttaggatgggagaaacaaaagaaaataagttttacatctttttacatctaaagacttttcatctaaagtcatgaaaaggcataaaattttacaagcagaaaggataatagaaaccacacgatacaagccttcatttgtgccagtaagcaaactggcttattagtgttcgatgattgatacaaaattgcagagatgataatcagtggaaccaggacccaaactcaggtaaactgatttcacatttcatactccgagatgttgatgttcaaaatgtgatccttaggcaagcagttgtagaaacgtgttacagtggttgaatcttgggcaccactctagacctattgaatcagaatctgtattttaacaagaccttaaactgtgagaaactcctctaacctgagctgttttctcatcaccagttacatgacttcaggtaattactaaatctcactttcctcctcaataacatgggaatacaactattttagtttaaggaataattataaggaataaatacgtttatcatgtaaataaaagctactcataaattgtaatattgcacacatattatattagttatattcagtgaaaacttctccttttattgttaacagttcttgacaagagggacaattcttcccctagaagaaaagtggtctaataatgcaattcaggacttgttataattggatgtaagttattggggataaaggagggtgtcaagagaaaggaagccttttctgatatgcttaaattaatatcttacatataactactagtgtttctttgcataaagataaatctgatgaatttagggctgcaaaagtacacgttcagcgtttgcaatttgtgtccactcatgaagaaaatctgttgggttagcaaatggtgtctgaatatatgtttcttacactgggagcagctatgggtttaaagccagcctaaatgacattcttcagtcgcaggtggtctagtaacgtttcttgtaattttccacacataacatttttcattgtttatgaaaataccattaaatacaccccttctggctagggtgctatccaaataccaccactccaccctgccaaactccactgggctgccatcatctttatagaactacatttcttttaactattaagacagacaagaaaacattgtctcttgaaatatattctggacattttcactcccgggctgggttatttaacttgtgtaatttcacccataattgtttgaaattgtatttttgtgtctatctcccaagtagcttgtgagatatttcagggagaattcccagatctagtattattcttgacactcaatgaatatttttagaatgagtaaatcaatattaccagttattctgattcagttgctcaccctattatcaagagagtggaagagagaggaggatgacattcatttcaataaaggtgaatataactgtttaaaaacaatgcttttgtgttggatttatattgcttagtgtcccctcatatttgtgtattggagacttagctatcatgtttactgatggtttagatagatctctagtcatttgtggtgcaacttaagctggagtgcttaggaaaatcatttacatatcatcaccccagcttcacaaatatttgttgtaaattctatttttttgtataacttcccagaattccaaaatcattaatatctctaaataaatataatttaatgaacttagttattaaagatttgaaaaatacagatattttgaaaacacctagataagtcaagtcctgaatagcttgaatcttttaatctttttcttttctttttttttttgcaaggaaatagtttaatgagggttttttttttgtctccttatacttgatcttgagaaatagatagtattctgaggcatcccatggttttagagaaaaattaaattcactgttttattgaagatacatattttaacacaaatttatcaaaaaagataaaaatgtcttcattatccttttctttattatatttcacaatggaaataatttgacaactatcaaacttaataatggcagatggttttagctactttgacatttttttccagctatccattcagtgaatacatagccattatatcatttgaactattcaggtaatattcttatttgattctcaatttagatccatatttttgagattttgtctcaggatcctaagtaaaattgactccctctgttggcttatgtgacatccaaggttttgaccttgaaaatgtggttcaaggccagtctgttctgtaagcattggcctgaattgtacttaagaagtttgtgattcatgtgaaagagattaataatttacattaatctagcagttttcttgcttgcttaatgagataaattcattgatgctgtacctgtatatataaagccaaaactcttacatgaatgtctttcaaaatttatgctttaggagaaggacatacaaagaaaaataaaataagatttgaatggaatatatgtaaattaaaataaatctttttaaaaataaatctttaaattatcaattacaatttgttggcaagcacaaggtatagccacatatttcatcagtatattggtatttcagtagtgtattgtaaattagttaaataaagatgcttaaaattccaaggaatttatattaaattaactgtattttatttaatcaacttcactgagtttatagctattcttttttcttctctccatacctcccacctctttttctttatctctcctttcctctattcttcattctctccctttctttctttcatctttttcctgtcaggagttaaaacaaacacatgaacaatgtaattatgtattttgtgtgcacatattttatattcaagggagcctaggtgtcttggaacaccacaagcataagttaaatatgttgaaatctttcttccctgcaatactggcatcagcgtgctggacaaaacgtagcaaactagaagtaacttgtgaatttttaataaagttgtcttccctagcagagctaaatgcaccattctccctgcaaactctggagatgatgacatcttcccaatggtttccatagcatccgttcctgaagagcccccgtatggtccttggtcagggcgatccgcccagctcccctagaaagttggcaacctagctagccaaaagaagagtcccctattcctgaaacttactctgtccgtggtgctgaaacattgtaccgagacccgcccagacgggcgctgtcagccgctgaaaaaaaaaatcttccccgaggctgcccaaatcagaactgtgtatcttttatttactcacgtcctcaaagagcagcaagccttctccatcttaatttgactctaccgcagagcagacttacgctggcgtgatgggaggagatcatgggcagagaggaaaaactaatagcagcattgctcacctgagacctgagatgctcccatgagttttgaatatgctctgctccttacagcaaagacaccatttttaaaagtaccattcttttgactttgctgttcccaaggcttctgtgatattccggcccctccgtttaaaagccatcagatttgagagcaataagtcttcaaaaccgggaatttacattgtttttcagctgaccgacttccaggaaaaggactcaaccgcatctacccaaataccgtggcactgcttgcgctctttgccaccggatcctccccttccaatgagactttctgattgtgtctaccaactctcctattaggaaacccgtgggttgcatgcagctattctgttgtattctcattctcactctccctcccttctctcactctcactcttgctggaggcgagccactaccattctgctgagaaggaaaagcccgcaactactttaagagattaagacaatatgcgcaatcctcgcctttcctagcaatcactatttaaatctggcaagaactgacaacagtctttgcaagaatggaatccgtaaaacaaaggattttggccccaggaaaagaggggctaaagaattttgctggaaaatcactcggccagatctacaggtaagacaaagcgaacacttgcttacctggggctcagcatgaaaaaatctgcagggccgtttccgtaaaccctggtggctcagaaagattgtaatatgatcggaaagtctttttgttgcccattgcttggagcgggggtgctctggaaacctgcttattaatgcaggaatgttgcactaaatgaacctgtctggtgtgtgtgtgtgtgtgtgtgtgtgtgtgtgtgtgtgtgtttgatttttgctttggtgcctgcagagtttttgtcctttactacacaggatttatcttctttacagttaagaaatggccagcccctgctcaaacagcgtttcttttggtgcttatagataccccgaattaaattcctttgatgcagacaaatgaatataaaacacaaccatctaaaaaaataaccaagaaattccaaagagtaatggtttatatatatatatatgttatatatatatgttatatatatatgttatatatatatgttat

SEQ ID NO: 5597 - DNA, 6000 bp, Homo sapiens
cctgcccctccctgcccagcccctctcacctttgggacttggggcactttctcccagctcagcggctggggccggggcttctccaggggctccagtggcctcagcaggggcaggggcaggggccagcatgggctctgccttctctggaggggatcagatgggagtcgtggtgcagccactaaccagagacccctccaccctctctctcctgagcattggacccatgagcccgctgtggatgaggaaagtctgccatggctgtcctcccgctgcctgggcccctcagaggcagctcatgctgagctggagagccagcctgcctctcacattctcctccccgtcccaggccatcagttcccatgtcctctgcatctgccctgaacagctccaggtccatccctgctctgccccagccttagagcagcccctcagactgggctgcactcccctcatccacagctcctggggcttcccggccgtctgtgcagggtcatctccccagggaggtctgcagggggagagtggggttgtgtcttgttcatctctcccacctaccccatggctggaacaagccaggatggcacatgggggtactcagagaggtcatgtgcagaaaagggggaaagggcgttcctggcggggggcacagccacagcaaaggcaagaaagtgtgaaagcacctcctgttccctggatggatggagagtcgctgggctgcccctcccccagcagcccaaacctcagggaaggctgatcaggatcttacctgcctctatgaccttgaggtcgaacttgaccttggaggagccagcaatgactgcgtaagatccctggtcggcagggcccacttcccgcactgtcagcgtatgccgtgtgccctctgtggccaggccgtacttgttgctggcgctgatgtcactgcctccgcgctgccagcgcaccttcactcctgcccgctctgtctcggcctcgaacacggcagggctgcctgcggccacttccactgaccgtggcttcttgctaaaagctgagactgaagggccaggtggaggctacagcggcccctggttggagcgtgcaccccgcccctgcagcccctctcagtaaatactgtgctagcactttctatgcatcccctcacgtaatactctaccagttctctgaggtagttgcagttattctgttcatttctcagaggaggacactgaggctcagagaagctaagcggctcctccaagatcacacagctagcagtcgggagagccagggctgtggtcctgacctcccaacaagactttttctgcatgtgtccactttccctgcttggagacacccgtgatgaacccagctccctttcccccaaccatttcgggcccttggcagggggcggggaagtctgcctacttggaatgtggccaaatttgtcctccaaggacctcaggctgggtatcagcaactgagataaagctggcctgggagggcgctgggggatggggacctggatctctgccctggacaaccttcataagggcacagcccaggcccaggtccctgggctgtgattttccctgcccttggcctgggttcaggggctcctgactgtcctctctcagagaagaggggctgtgtcaccctcaacatgggggccacaccgtacaggctcatgaagcagataatgtcacagccaggaggaaccaacccaatgccaccaccacccccggcaccccaggttgggagactgagacccatagtgggtagagactggtctgaaggcatgccgtgagcctggctcagctccatactaaacgtgggctctgtccgcggggaaccttgctgtggaaggtgaaggcaatgggacagggaaggggtccctttgcattctcagaatgggttgaccccgggtgcttcctgtcttggctgtgtcccctctctgcgtccctgaccttgggtttaccttcacctctcatcagagggatgggaaaaagaaaccgagaatcaaaaaaggaccctggaggactggctgcccctgtcctggggctcagaggccacgtcctcgtcaaccccctcaagaactccctcctagccctgctccccaattgtagacacccccctgctcccacacttagacccaaccccagtcctaaagctacctggcttcttccccggctcaggcatcctgagagacgtcacaccaggcacgaagcaggcacaggtcacccaaagagggactgagtggggtcctgtccttcccactatatatggggacctcccccctccccaggctctgcttatctgcctcctgtccagccacctgctaaatatagatgaattccagagagctgaggtctctccagggagaaggtagggccacattgtccctggctggctcctgtcccttcccccctcaccccccgcagcacaattctgcctccccaacctttggcaagcctcaggggtactccaagccccgtgtgtgtccctcttacagcaaattgtacggtgggagcatgctgggcccataaccctaaggctaacgggtcaggagcatcctcgcaggcagttcaggcagtggtcatgtccacagaccctggggccagggtgtctctgagtcctagcactgccatctctttaatctcaaagcacctggtttcctcatctgtaaagcggggtgggtgaaagcagcacccactgcacaggattgtcacacgtatgaagtgggtttataattttaaaaatgttaggccgggtgtggtggctcatctgtaatcccagcactttgggaggccgaggcaggcagattatttgaggccaggagtttgagaccagcctgggcaacatggcaaaaccccatctctactaaaaaaataaaaaataaaataaatacacacacacacacaaattagccaggtgtggtggtgtggacctgtagtatcagctacccaggaggctgaggtgggaggatcgcttgagtccaaggagttccgggctgcagtgagccaaaatcgcaccactgcactgcagcctgggtgacagagtgataataataataaaaatattatttattattattttttattattaatatctcaaagaataataataaaaaaataaaaatgggctgggcgaagtggctcacacctgtaatcccagcactttgggaggctgaggcgggcagatcacttgagctcaggagttcgagaccagcctgggcaacatgatgaaaccccatctgtacaaaaaatacaaaaatcagtcaggcatgtgacgcacacctgtagtcccagatgctcgggaggctgaggcaggagaatcacttgagcccggggggtcagggctgcagtgagccatgttcgtgccactgcactccagcctgggcaacaaagtaagaccctgtctcaaaaaaaaaaaaataaaaatagaagaatgaagacacaacaccattttgccttctcttgtggccctgcagtaggactagggagctgcagggttgggctgcagtgagccctctggggttgaggaggtgtggggcgggtatttgtccctacgataatggccccagaatctgggttccctaaggtctttgacagcgttgggaagtccctcactcccaggctgtctactgccactacttgctaccgtctggaggaaaacacaggacttacaggcttctccgctcagcttggtctgtttctcccctgctgtggctaggagctagaaagcaaatagaacctgggggtcccaccagggattcacttgggtctaaagtcctgctgggcgtgcagctcgtgagaaccctttgcggcccacaggagctttggggcttaattcctgtcctcggaatgctgaagagtatcctcttccagataagcaaggcctcccactccatgttgacgtgtcgggacagacctggagtgtgatccaacttggccactcaacggctgtgaccttggggaaataatttgacctctacaagcctcagtttcccattctataaaatggagtgatattagactccacatctcaaggttggcagatactaattgaccagaatatcaaatgttgttgctggtcatggtcatcatcatcatcatcatcatcatcatgagttcaaacctcatcaaggcttaaaaacaacaactatcaggagtagagagcttttaaataggatctgctctcctaatcacaattgaggacttgttctttccaccaaactctaactcctgttcaggcgctctgtgtcattggtcctcatgttcccagggtccagcattgggtacagtcctcggtaaacacccgatggacaaatgacaaaaagagacgtcgcagcacacaggggccaaaagagatacacaacaaattttaaaagagactctgtgctgcaagaggatggattgagaataactttacttgttttttgggaggaggttaatgggtgggaggggtgagaggggagatctgatttacatacggacttgagactcccaaggcagtaccccgggtcgtcctctgcaaggttgccccggtggggtctgacgcccagctggcgtccgggagccggggtggagtcctggagggaggcgaagcgggatgtggagggggcctggagtggggggagggggcgggtgaggcgaggcccggcccgccacagtcctgcctctgggccccgggagcgtcctccctgtgtccgggccgggcgagggcttaatgctatggccagcggggaggcctggcggggcccggcgggggctgcgggctcagtggggcgggtggcgccgctcggccaggcccccgcggcccagcacttcgccgctgaactggtaggtgagcttcttcttcaccttcttgacctcgcccgtcttgccgtagttgcgcagcgcgcgcgccatcttctggtaggtcatcttcttgcggttgcccttctggatgccccagcggtgcgccagcgcctccttgtgcttggacgagaactggaaggtgcccttgtccttgtccacccaccagatgctgtccttcatgtcgccgctgcggagcaggtccaacaggaactggtacaggcggatcttcttcttgctgcctgcgggggggagggcccggtgggagggggcccggggcccacatgggagccgcccccaccgccttgcgtacgcacaggggcccggggacggggtggccgggaagggcaggggaacggctgccccagcccgcgccgggcgtgcatacacaacgcacccacactcacacacacacacatgcttgcgcacacacaggcgttcacacacacccactcacacccacgcactcaccccccccacgcgcacacactcgcacccacacagtgcaccaagtacacacacatgctcacatccacataacgcacccacacctccttacacatgctcacacatcacgcccacacccactcacacacgtgctcacacaacgcaccttctcacacccactcacactcatgcttaaacacaatgcaaccactcactcatgctcacacccacacacgctcacacgtacaatgtatctgatcacacacatgctgtcacacacatgcacacacaatgcacgtgctcacagactcacacccacatgctcacacacatgcttgtgcaatgcacccaaacgccagattgcacccacacccacccacttgcacattcacacccacatctgccctcacacactgtcactttctcacacacccacacaatgcaccagctcacactcacacacatgctcacacactcattcactaacatgcccccacacactggcacccacacgacacacccactcacatgcttgcacccacccacatgttcaaacccacactgcatctgcttacacattcacaacccactcacacacacctggtcacacccactcatgctcacacctcattcacacccactcacatgcacactcacacccacccaatgcacccactcacacacatgcacacacactcagacccacttactgcccccacac

SEQ ID NO: 5598 - DNA, 6000 bp, Homo sapiens
attcacctgcctcagcctcccaaagtgctgggattacaggcgtgagccaccgcgcccggccaaggatgtgacattgctgattgactctgtcagatacttttcactctggcttccggggcatcctgctgtcctggtttccaggcctcactggttttgccttcacagctcttttgctgggtcatcctcttactgacctctcaacatcagagaccaaaggctccatcacaaacgtcatctctttgctatgaaagcttgcaccctacgtgagcttatccagtcctgtgacttaaaatgccttttatcccctaattattcccaagtcgctccatgatgccaccacctggatggctaatagacatgtcaatatcatcacacaaaaaaagatttattttcccatcaaacttgcttctccccgagtgttctgcttctctgtaaatggcccaccatccacccaccacccacctgatcatcagtttatcctttttcttcaccctcggccctgtatttagtcaaagaaaagcaatatgccccaaacccaagcatttctctccacctgccctaatcccctagccctgaccctcattgctcacatgatccaccccaacagcctcctgggggaaccccttcttctatatttgtcccattttcagtctgttctccacacagcagccagggagatttgtaaaaacattagtcagatcatgccacttctctcctcaaaaccctataaggaagtgtatgttttggccccaaaactgctctacttttcccactcacttctccccaaccatactggcctccttcctacttcttgagcataaaatcacatgcccaccccagggtctttgcataatactcttccctctgcctgcaatattctttccccagtcaactgtgtgtcttgtcccctcatctacttgggtctctttcaatgccacctccacagagaagtcttccctgactgccccacccaaagtggcaacatgatccttactctctgccccttatgctatcttgttctctccacagcatgattactacttgtcactatattcatttatttcttgatgtgtttctcctctctcattggcatgtctttctacatatcaatgagaacagggaattatcttgtttgttcaccgctgcatccctgtgcctagagcagtggctggtgcattatcaacactcagctcaacaaatgaatattgatattaagaagaaagacactcttcttttttttttttttttttttttgagacagaatcttgctctgtcacccaggctggagtgcagtggcgtgatcttggctccactgcaacctccgcctcatggattcaagcaattctcctgcctcagcaaccctggtagctgggattacaggtgtgtgccaccacctctggctaatttttgtatttttactagaggcagggtttccccatgttggccaggctggtctcaaactcctgacctcaagtgatccactcgcctcggcctcccaaagtgctgggattccggccgtgagccaccacgcctggcccaagagaaacactcgtaatatccactaagagatcaaggaaattattccacctatgaaacaagaagtggaaactaggaaacaagaagaagcagttataggaagaaccaaacacggattctgaaatggaaattacacattctgaaattaaaatgctggtgatttggggctgggtgcagtggctcatgcctataatcccagtactttgggaggccgaggtgggcagatcagttgaggccaggagttcgagaccagcctggccaacatggtgaaaccccatcgatattaaaaatacaaaaattagctgggcatggtggcacatgcctatagacccagctacttaggaggctgaggcatgagaattgcttgaacctgggcagtggagactgcaatgggccaagatggcgccactgcactccagcctgggcaacagagcaagactctgactcaacttaaaaaaaaaaaagtggagaaagctgcatgagaagcatttttttgggagagctcagctttggccacactaagtgtgagatgtttattaagcacctaagattaggcagttggatcaaaatctagcattccaagaagaggtacaggctaaagatgtgaatggaccagatgatagagaatatagagaagaccaaggagtgagctcagtggcctccaatgttaacagtgtgtggagaagaggaaaacccaaccaagaagattgagaactagtgagtcctggaggcccagggaagaaagtattctcagatggagatcagagacagatggctcaagtaagatgaggactgaaaatgtcattgaatctagcagcatggaggtcattggtgacagcagagtgataggggcaaaaccttgatgggaatgaatccaaaaacaaacaaaaaaatgggaagacagaaactggaaatgagtgtcaataatactttcatagaattttgttgtaaatacaagcaaaggtggggcagtcgcttaagaagaaagaggggctcaaatggagggggagtttttggaaggctacagaaaaaaatggcatatttgtacattggtggaaattatccagtagcgagggaaagacaaatgccaaagagagatgtgagcaggcaaaggggggtgggctctaggcacacagtgaggggttggcatggatgagagagaaaccaaactgggtggaaggaaggcagaatgtgggggcaccaaggcaggtgagctggtgagagaattagactgttggcttctgatggcttctattgttttagtgaaataagaaaaaaggtcatctattgagagagaggatagaagagaaggtggtaggtttgaagagagaagatggtatcaaataacccctggtttgtgtgttcaaatataagggtaacagaaataaaacgtacaactgacagaccaagacagtagaagaatataacaagaaaacttaatggattcagtagaaattaggaacaaggaaaccaagatttaaagggaaaatgtggtaaacaagaaaacatacagtaagtccaaacatgtcaataattacaataaatgtgaacaggttaaaatcgctaattaaaaggcagaggtatttcttttggattttacaaaaggaaatgtaaagcttatttggcagctcaagctgatgaagctaaacatatcagttactaaaacaaagtctgcacatatttacaccaaactgtaaacagtagtgtaactcactggttgatgagtatatgagggatctttattttcatttcaatatgttctgaatttttgaggaagtgtgtaaattatttcataattagaaaataaatgaaatttttaaaaaaatcatccatgcacttcagcaagtctccatggaacctttatttgttgtccaaatcagttccaaagagcctctaaagaagggttccagactaccaggagctcactggaaataagaccaactggaccataatagaagaatgcaggtcatggctgggtgccgcaactcacaccactttgggaggccaaggcaggcagatcacctgaggtcaggagtttgagaagaatgcaggacagtgtaaagatgagattccactgacaactctgagccctagttgtaggcaggaataagtgaagagagcccgctggaggaggagtatttggactgtgcccattccacacagtatgtggcctaagggtgagcctggagacagcattccaggctggaggtccaacataagcaagggtgggaactgagaaagcatgtacagggcatgtggtggaagcagtggatgactcaaggtgcagagcccagggaggcaaagaagttggcttggtaagccatgtggaggggcagcgggaagagtcggtgaagcaaaaagaagcagatgggaggggcatttatgcctcaaatggagagttttatgcccaaagctcataagagcaaacacctgggttgccatcactgctgcactgcacatatacgcatgcacacatgtacacacatgcacttgtgcaaacacatgtgcacacatacacagacatgtgcacacacccacatatacatacacttcttttttttcttttctttttttttttttttttgagataagagtctttctctgtcaaccaggctggagggcagtggtgcaatctcagcttgctgcaacctctgcctcctgggttcaagagattctcctgcctcagcctcccaagtagctggaattacagctgtgcaccacgaccatgctcagctaacttttgtatttttagtagagatgggtttttgccatgttggccaagctggtcttgaactcttgacctcaagtgatccccccacctcggcctcccaaagtgctgggattacaggcatgagccaccacgcccggccatgcacacacactttttaactgctttgtgttctctggccctttcgcctacagaattagctatcgagaccaagggggttctcttggcctcggtccagcctttcctgaaccccacaccctgcatcagcacacactgctgtccactcacctgccctagtaagtcaccactagctgttgttgactgggagccccttggcttttaagcaggatttgacccaagggctcgcagtgcgtggtgggtccaggggcaggagttgaggcagaaagacaagggcagggacagctgtggagtgggggaggtgggagagagaaatccttaggaggcaaaactagccaggcttggcccctggtggatttgggaggcagggagcaggaggcgtgaaccaagacgctgggttccaggccagacactgtgacatgagaggccatagctgaggtggggctctgcaggaggcatagatttggggaggggacagagatctcagggtggcattgggcacaccgaacctggggagtctgtggggtgtctgttgatgctgggaagctccaccgaggactcaggacagggtaacagcaaagcgggcacaggacgccaaccacagcaggtgagtggaggcaggagccacgggtggggccaggccacacagcctgggaggcgcaggggctgggcagctgccagtgacccaagcccacacagagacttgcacagctgccccagccccaaattagggggatcccctggcccaccttctcttggctcagccactctgggaggtgggcacacaggggcaccgaagggagcaggcagccctggcatcccacagccgccaggagaaaaacttaggcctccccaagacctggcacagagcaggccggccctggcccccaagcagaggaggctgcacctccctcgcgtctgtgcctgcctcaacgcgggttaaactttgaccaaggaaatgattgctaaactcgattccataagtgtcaccggtcacactttaattccagtctaaaattaaagtcttcagtctccacattccctactttccaaattcagctttcccgggaggtctggagcagctgcctctctggggagatgctggaggtctcggaatcacctcacgcggcctcagggcccagttggagccaccccaagtgacaccagcaggcagatgaccagagagcctgagcctccggccccgagtctgtgaagcctagccgctgggctggagaagccactgtgggcaccaccgtgggggaaacaggcccgttgccctggcctctttgccctgggccagcctttgtgaagtgggcccctcttctgggccccttgagtaggttccatggcattttctgaactcctggacctcgtgggtggcctgggcaggttccaggttctccagacgatggctctgatggtctccatcatgtggctgtgtacccagagcatgctggagaacttctcggccgccgtgcccagccaccgctgctgggcacccctcctggacaacagcacggctcaggccagcatcctagggagcttgagtcctgaggccctcctggctatttccatcccgccgggccccaaccagaggc

SEQ ID NO: 5599 - DNA, 6000 bp, Homo sapiens
atgagactggtcatacagagtgaccaatttgacagtagcccaagctgttgagcttatgttactacagtggtgatagaggtggaaagaggctatgtactggagcactagctaagaggtagcccggtgagtcttggagactgaatgtgaggggtggggaggaaaggtgggaggctgagggagctctgagcctggcttgagtgcccaaggggtggcattcactcagatgaggatagcaggatgatgaaggcgtcagggtggttggtgggaagaggaagaggaattcagcttaagagcactgggtttatttaaatgccccgggggcatccaaataaagatgtccaggaggcacctgtctgtgactgtgaagctctgggagacagatcaggcctgaagatatgcatgtgatgcctgtggagctatttagcctatgggtggttgtggcaatggtgaaagtgttgcaaaagaccgcaccgagaggaaaacgcacgacacgaggggccggccaagcggaggaagatgggaaagctaaattcatggagcatggccaggtgtcacagaagcagtgggggacagaggttggccccgtcacatggcaacacagaagtcattggtgggaccttggccagagccacttcctagcgtggtgggggcagaaacatggtagggagttgaggtggacacagaggagcttaaccgcagatccaactttctcttccccagtggggtttttggggagcggcttccgctccgttactacctctcagctggaatgctgctcagtggccttttcacctcgctctttggcctgggatatttctggaacatccacgagctctggtactttgtggtcatccaggtatgaatcaccgtcttgcacttgggcctgtgttgccgtctcgggaaggacctgggagaccgcagctcacagcgggtgggagcctgtgttcctggctccctgtccagtgctctctattacactgcactgagttctacctcctggccccactgcccccgcatttgttcactcagagagttggccttgagcacaacgctgtggtcacttccaatgcacgagaggcttggtctctgcttgaacaatcttgagcgagagaagccagctcatgccattgaggaggtgtggcatgtgtgtaagggaagggtaaggtttgtagtgtggggtatggagggccccttggccacgaaattgaacctcctcagcccagggtggtcagagcagggagccagtcgcacagcccaggcctgttcccaccctcccttctctctccctgcaggtctgtaatggactcgtccagaccacaggctggccctctgtggtgacctgtgttggcaactggttcgggaaggggaagtgagtgtaacaagggaggaggagtgggaaggattgggagggctgggggtcctgagctggtcaccgtggcctctgatgtaatttcagagggaagggtcagaaagcggcctccacgttgctgttcacgtgcttagaagtggctaaaagcagtgctgattttctcactgatgaggctttaacccatagagcaggcaaccttagttatgtttttttctaataatagattaatttctattttcaacgaagacaaaaagaagcctataaaacttccgccctgccccccaaccccgaccccgaattggcttgtgtgcaaaacaaagttgctttggagaaggagttctcacccttggcactactgactttctgggctattggacccttgtttggggactgtcctaccactgcaggctgtttagtagtagccttcctggcatctgctcactggatgccatagcacaccctgagctgtgaccatgaaaaatctctagctgttaccagatatcccttgggggtaggatcacccctggttgaggacagtgctttagagtgagatcgtgggacagaagagaagaacgagggccggggcccccatgccctcagtgtggctagagctcccatcggcactcactcagggagctgggcaggcggagcgagaccacaggccctgcagccacctgcttgacaccatccaaggtctcccactccttgctgacttggggctttggggctgtctttggtgcctcggggaagctgtagtcagcccagctttagagcttggctggggcagttgctatgaacaatgtgctttgctttttactttttatacctcttcccttctctccctcccttccaggcgggggttcatcatgggcatctggaattcccacacatctgtgggcaacatcctgggctccctgatcgccggcatctgggtgaacgggcagtggggcctgtcgttcatcgtgcctggcatcattactgccgtcatgggcgtcatcaccttcctcttcctcatcgaacgtgagtgggcccctcactccccacaagtgagcctagaagttctcggtttctgggagaaggcagctggatctactggaaagattgctggtcacagagtgggaggaccagccgtgtgactttggacaatctttcagagcctttattttctcatttgtaaaataataatagtaataataatgtctatttcgtaggatttctgcaggcttaactgagacaccatagttaaaatgccaggcccacaggaggtgcttggcaagcattggttgaatctgagaggtgtgatcagggagggtggagttgaagggacattgttacagtgaccaggctctccacttgctgcaggtggtcttgtgcactagccaggccaggtatgagagccactctgtagctaagagtactaaagtccaagaggcagtagtgacactgctggttgttaggaaagccaggcctagaaagctgtctcctgagccccaggccccgctccctcctgctgggacacacactggccaccttaggagctggaggcggggctggttcccgggatggcttagatccagtgcaaggtgagggcctggcaatcacctcgggattgggggggcgggggttgggaaacttcttagaaagcgatttttttttctagacccagaagatgtggactgcgcccctcctcagcaccacgtgagtgtgagccctcccagccctatccctgccctccaactccatccagagggctggacccggagaggcctggggagctagagcagggagttctggccctcactgacctcaccgacccagtgctaggcccatgggttggccctacagcctgatgagtctggcaggtcagtccagcccgagacgaacgtgtgcctccccatcctgggagccagtgtctcttgcctgggctgcaccttcagctggtgggaggcagcacatggacgcacccacagcagggctcatctcctctgctcagggtgagccagctgagaaccaggacaaccctgaggaccctgggaacagtccctgctctatcagggagagcggccttgagactgtggccaaatgctccaaggggccatgcgaagagcctgctgccatcagcttctttggggcgctccggatcccagtaagaagtttgtggaatggaggaaagagaggggctttccagattttttctgttggtgatgaggagatggggtgcttgggtgatctatttttctagaacttctttataggggaggtgtaagttgggcagcctgcttggggagggcagtgtgggagatttgtcttgaaacaaccttgcacagtggtcatgttgcttttattgggactggatgtgttggaggctgccttgtgtggcaggtgatggaaagtactggggtggtgctgagcaccccttggggccaccactgaacccaggacctctggaccccttcccatgtgccccctgttgcactccccagggcgtggtcgagttctctctgtgtctgctgtttgccaagctggtcagttacaccttcctctactggctgcccctctacatcgccaatgtgggtaagtccaagagaaggggaatgaaggggtctctgaggaggccaaggctgcctctggtgggagaggaagcccgtcgtggtgatgcctgtgattccagtatataggcagaattcctgctgaacctctcctagagtgaaaggagcttgatttagttgtttacttaaatgaaagctaaacccagcaaactaccccctagaccctgactccagccaccttttctccccttggaactgagctgggggttaggaactcagagctctgttctgcaattcttgctatcttcttctctagcccttagtgtaggagaaaccccctccaggctgcttggctcataggtggtagcattggaggtgctagggaaggcctgcctgctagatctctcccccagcccaaggaagagggcctggtgagtgaccccactccttgtagcctggtggtgaccctggtggtcttctccccgtgggacctaatgtgatcgatgcccctgtgcctggatctgctgggctgcactggtgttctgtcctgtctcatggacctactcccgtctgctcctgcccagggatgtatagatgagaagagctcatttgaaaaaggatgtttcatgtccacctggcctgggtctctgcttttccataggtcaggctgctctaccaaacagcagcccaccccgccctgcccagcccccaggagcctccaagctccaccagggctgagggcctgtcacccagtactgctgccctccctcccagccctggggaggaacaacagtgccttgccacacattgtgctcgctctgaacaggatactgtaggaattagtcatggccaagttcaagccatagcttgccccgcagctctgtcggggcctctctcgtgacagtgtggagcactagggcagctttgtggacaccgtgactctttgttttgtggccttggtgctgacttcagagtatgaggcaccctcgagggtggggctacaatctcagcttctggacattccttttttaaaacatggagccaaggcctgtgacctgaggcccctgtgtccctgcaagtctccttcctggctctgtgtatgagcacagcctaaggtaaacgggaagagttcctagtgctgctagggccggagtgaagcagagaaagggctgggctgagcttcaggttgcgctccaggggaaaggtggccacgggacagcaggctcgggggccagatcccagagcttgccagggagggcttgttctgagaggtgaaggtcatcctgcaggggaagagggcaacacaggacgggaccaagagggcgtctatccaaactgctgcattctcaccctgtggccctggccagcctgctccacaggtccccagctcttcctcggaaaagggggcagtggtctggatcacgctctgcagggcttctagctgtgacactccaggatgtttgccccaaaccccaggtctgaccacatacctgtattttccacagctcactttagtgccaaggaggctggggacctgtctacactcttcgatgttggtggcatcataggtgaggccttgccctgctctgccagcaggctcccttcccctcttttcttgtggggtgcaggaagaagggacaggtccgatgggctatgacctgggtaggtggcaccagaggaaaaatggctcctgggtttattctcagctctgatcctgcctggctgggtgggcctaagaaagatgcccttttgtttggtctccagtagtgatgggcactacaggaaggggagggctgtggaaaaagcagctctgctggttcttgctgacaggcccaggccagcactggggcacagctggggtgccaggcgaggggatggcagggtcctgtctgggagtcagtgcgtgagtggctgtgtgttccaggcggcatcgtggcagggctcgtctctgactacaccaatggcagggccaccacttgctgtgtcatgctcatcttggctgcccccatggtgcgtataaccccgagggtgaagtgcgaatgcatgtgagcaggagcctgtgtgggcctctggcctatgtgc

SEQ ID NO: 5600 - DNA, 6000 bp, Homo sapiens
ataaaatatctagaagtaaacttggtaataattatgcagaacctataggaaaacaattgttaaattcactaaataatgtaaaaccttaaaatagttttttttttaaaaaagccaattcaaatggaatattgtctaggtatacatacatatgtcagaaaaagctttatcaaaaaaataaaagcaagagtcaggtgtggtggtgtgtgcctgtagtcctagcttcttgggagactggggccagaggaccatgtgagcccggaagcttgagaccagcctgggcaacaattttaaaaaaattttaaaattaaaattaaaatctctaattttaaaaaaagaaaggccaggcgtggtggctcacacctgtaatcccagcactttgggaggccgagaccagcgaatcacttgaggtcaggagttcaagaccagcctggccaacatggtgaaaccctgtttctactaaaaacacaaaaattagctgggcatggtgggcgcctatagtcccagcttctcgggaggctgaggcaggagaatcgcttgaacctgggaggcaggggttgtagtgagctgagattgcgccactgctctgcagcctgggtgacagagctagaatctgtctcaaaaagaaaaaaagaaagaaagaaaaataaaaagcaaaggactgatcatcacaaaattcaggtttcactgaaggaggagacagggagatgggataggggaagggtaacaagtaaggaaagatgtaaatcaacacaaaaattaaacaagagccttgcagggaccaaaagggcagtgcagaacgcacaaggatttcaccccaatttgtgcacctgagacaagagaaggggaatgggagacatgaaattgatttggataaacttttattcagagtatgggcaaaagcttgctttttctagcagcccacacctggcagggaaagaggcctgtgtatccaggggacaaggctaagggatccaaagacacaccgacatgcagagccttcagaatggacaggtcaggaaggctgcagggaggaggtggccttgtcaacaggctaggtttcaatcgactgagatggcgaaaggggaaggacatcccaggcctgccgagagtggggtgggggtgacagaacttgccacagtggagaggctggacagagagtagtgggactcagctgttcatggtggagctgctggtggcaagggaagaggggagaggccctgtggggtcactggagcattgcccagccagggcttaggattcagtggagaaaataccccaggaactcatgagggagctaaggctaccctggaaagaaggattgagaaaggattggggtcaggggtttcagaggggcagggctcctttggagaagctgaacctgtggccctgggggagctgctgtgcctctttttagctgtgaccctgcgtaatgtgattaccatcctgagccccatatgcctttcaataagagactgctatcttcctgctgacccccacgggaggaagccctgtgacaaggataaggccagatatctcactagagaccacactctggaagtatccatccccagcccaagtctctagccctcgattgccagagtggagggaaggatgtcaaagcattggccattgccaggccagccagtcttgcaggggccagagacaggaacaaggggttaaagtcagattctgggcattgcagtgaagtcagagaaatagatctgtggctccctgatcccagacacctctcagccacttagagccacgcagtacccaggcccatccagctctgctgaagtttgtccagtgcttcaacccaggaaaaccctatggcctccaaaccaactgataaatatgtcagaaaacactcatttgtggctgggtgcagtggctcacgcctgtaatcccaacactttgggaggccgaggagggcagatcacctgaggtcaagagttcaaaaccagcctggccaacatgttgaaaccccgtctctaccaaaaatacaaaaattagccgggcatggtggtgggtgcctgtagtcggggggctgaggcataagaatcacgtgaacctgggaggcggaggttacagtgagctgagatcacaccattgcactccagcctaggtgacagagcaagactccaactcaaaaacaaaaaaacaggccgggcctggtggcttacgtctgtagtcccagcactttgggaggctgaggcgggcggatcacaaggtcaggagttcaagaccagcctggccaacatagtgaaaccccgtctctactaaaaataaaaaaattagccgggagtggtggcgggagcttgtaatcccagctactcaggaggctgaggcaggagaatggcttgaacccgggaggtggaggctgcagtgagacaagatcgtgccactgcactccagactggtgacagagcaagactccgtctcaaacaacaacaacaaaacaaaaaacaaaaaacaaaacaggccgggagcggtggctcacacttgtaatcccagcactttgggaggcggaggcgggcagatcaccaggtcaggagttcgagaccaacatggtgaaaccctgtcactactaaaaatataaaaaattagctgggcgtggtggtgagtgcctatagtcccagctactcagaaggcttaagcagaagaattgcttgaacctgggaggcagaggttgcagtgagccgaaatcgcgccactgaactccagcctgggtgacgaagcaagactccatctcaaaaaacaaaacaaaacaaaacaaaaaaacactttcttatgcttagcaaggagagagggtgtccccactctgtatctttaatgtagctattctttatgttgctttaatatttttatacccatatatccatacatataaacagcattaatttctagctctatataaaacttcccatatgtcaggcatagttctaagtgctttgtctgtatttatccatttaatcttcacaacaacatctaagtctaatttcgagatgaggaaactgaggcataaggagttaagtaatttgtcccaggaagtctggcatcagaatcttactgtcttgaatgggcacagtggcacacgcctataatcccagtgctttgggaggccgaggcgagaggattgcttgagcccaggagatcgaagctgcagtgagctgtgatcacaccactgcactccagcctgggtgacagagttaaaaaaaaatttgttatattcaccttttgaattttctcttctgttcccttttatcttctttctaaacaaaacaaaacaaagaatcgtattgtcttaaccaccaagacaccaagaggtaagccagagagagagagagagagagaaagacagaggctaggtgcagtggctcacgcctataatcccagcactttgggaggctgaggcgggtggatcatttgaggtaaggagttcaagaccagcctggccaacatggtgaaaccctgtctctactacaaaaattggccgggaagtagtggcccatgcctataattccagctacttgggaggctgaggctggagaattacttgagcctgggaggcggaggttgcagtgaaccgagatcatgccactatactccagtctgggtgacagagtgagaccctgtctcaaaaaaaaaaaaaaaaaaaagagaaagagaaagagattttatatagtgagattttcatatatctgagatgagatttgatatatgtatacaattttacacattgcatacatgtgatcatatacaccttttatttatttattttgagatggagtttcgctcttgttgcccaggctggagtgcaatggcgcgatctcggctcactgcaacctctacctcccaggttcaagcgattctcctgcctcagcctcccgagtagctgggattacaggcatgcgccaccacacctggctgatcttgtatttttagtagagggggtttctccatgttggtcaggctggtcttgaactcccgaccgcaggtgatctgcccaccttggcctcccaaagtgctgggattacaggcataagccaccatgcccagccatatatggccatacacatcttttaatgtgttgttttcctttaacattttttccttccctattcacattagttcctcccaccatagaatccataatatcactttaatgtgttatctatgttttttatgtattcattatacatagacttatatatactgatacctttaatcacatacacatatacaaggtttctttttgtcattattttaaaatagtctcttaaaaaataaaaatagtggatcatattaaataaatatttctgcatctcacttttctcacacacctggaaacccctgcaattttattaatttgtaattttttttatttttttatttttgagacagggtctcgctctgttacccagactggagtgcagtggcacgatcagggctcactgcagccttgacctcccgggttcaagcaatccttccacctcagcctcctgagtagctggggctacaggtgcgcaccattacacctgactaattttaaatttttttgtagagaccagttctcagtttgttacccaggctggtctggaactcctgggctcaaaagatcttccttcctaggcctcccaaagtgctgggattacagatgtgagccaccgggccttaggtatccgatgggaattccaggccaggtgggaggaaagggtagtgcattggcaccaagtaacgtttctggctgggtcttgcccatccccttgttgggtggccaggagcgctcagcctccagaggcaggaatgctgactgtgttattgtgaaatcatttgcatattgtgaagtgctttgcataagatggagcgcttttgcatacagggaggggggcattttagaagtcctagggcaggatccctgagtagcttttctttgccaagaaactaacccagggattccattttggaactcagggagggaacagaacgtcctggcagttgtatgggcccggtggggtgagatggacagaaagcttcagaagacaagctgggccaccagggagaagttggcggtctaaggaaggccaacagtgcaacatgaagtgggacaggcaccagaggcagccctgagagctgagtgtgctctcaagagccccagcagaggggaaagtgacagagtaaatggttggagctgccatgggaggctgatgagggtcagagacttaagagacctgtactcagtcgctatctctgcccaagtgagtacccacatgccccttcctgaatcttctcctgtactggctgatttccagagaagaatacaaactcgaaacgccaagccagactcccactgctgttcaggacctagacgtgagaagtggtatcacatactctggcttcaggacacccaggtttgaatcctggctctgccatctgtgccactgtgtgaccctgggctaacagtacccaccacaatgggataatatgaggattcagtgagatagtgcgagtaaagtgaatagcacatagtaggtggtcagtaaattgcggttataagaactgctatccagtgtttgctgccttagtctaaccaaagaggtcaggtctagcttcctccaggtgagggaagcacagagccctcgcctcccaggtttggagttcccatcagcagggtccagccaccatgcattggaccccaaagggttacaagccctggagacagtggcctgaggttcccagtgaaaaaccaaagcataaaaataattcgatgagtaagaataaaattccctcttctgaggttcccggggccaggcccctccctgcggcaggcacttcccctttcccttgctcatggaggagccaggccgggctgactcagagcaggagcgcacagtagtcctcccagcccgacctgggcggcgtggtctggcggccgggcgcgcccccgtgcggccacgggcagactgcggccctggacgggaagcggcggccagatccgca

SEQ ID NO: 5601 - DNA, 6000 bp, Homo sapiens
acaaaggaagaatgaaaactaggtcttggccgggcatggaggctcacgcctgtaatcccagcactttgggaggccaaggcaggcggatcacctgagatcaggagttcgagactggcctagctaacatggcaaaactccatctctactaaaaatacaaacgttagccgggcgcggtggcacacgcctgtaatcccagctactcaggaggctgaggcaggagaactgcttgaacctgggaggtggaggtggcagtgagccgacagtgcaccactgtactccagcctgggcgacaagagtgaaactccgtctcaaaaaaaaaaaaaaaaaaaaaaagaaaaaaaaagaaagaaagaaaaaaaaaaagaaaactatgtcctggacctggacctgagtggtggaacggtacctgtttgaagaggtggaagggtgtgtgaggagagggttttgctttcgtgtgtcccccaggttagccgtgttatatttgaaatgcctattaagcatcgaagtagtgttgtctgaagttcagagaagtccaggctggagagagaatttgagcatctgaagcacataaacaattgtaaagctatagaggaacttactaagacaggtccaaggaatggacattttcacaggtaaaggaatggtgggctgacaggctacatcatttgtcccaaatcccatggctggtaaactgcagagctaggattcaaacccaggtcagactcgtgccaacctctgttggcagctgctgtacagtcttgctgctgttgaccaggggtctcgtgtgtgtcacttgacctttcagtggctgtttctttttcttttttcttttttttgagacagagtctcaaaaaacaggctggagtgtactggcatgatctcggctcactgcaacttctaccttccgggttcaagccattctcctgcctcagcctcctgagtagctgggattacaggcatgcgccaccacgtccagttatttttgtatttttagtagagacggggtttcaccatgttggccagattgttctcaaactcctgagctcaggtgatatgcccaccttggcctcccaaagcgctgggattacaggcgtgagccaccacgcccggcttcagtggctgtttcttcttctattcaaggacagtggcagtggaggggcaggtggaaagcaagaatggtgccgggggtagtggtgctcaggaatgtgaccaggaaacccgccagccgcccagaggggccactgggaaagccgggtacgccccactctccctccggtttcagacacctgctcccatcagaggagtcctagcttccgggcggggtggggactggggcagacgcatgtgcggagcacgaaagccaacatatcgctttacaatgaaaagcaacctgcctccagcctggaattctggggtcaacgtgacctgtgggccatcccagtaagcacaggatcaaagcaagtgaatccctgccatcctgtcactgagtgaacctggcactcgaggaaagggagcgagagagcatagcagggtgggtggcactaggctggagtgcccctggacacaccagagccagacctgctagagagaccaaaatagactccatggcctcagtcagtgccctggcaagcgtgccactcctaggccagctccgggctaggctggcactcctggccagcctcacggtgcttccggggccagccgggccccttccgctgactcggtctttctttagagctgttaatcccttttggtccggccaggctggggaggccccccagcctctgtggctcagctcttccactttggggtgcctagagctctcccagtgtaaatgccaaaggctcctgacacacaggactgggcaggtgcctggctgcctacttcctgctctccctcccctgccagctggcaggaggagcctccaactggcctctcctgtgggagtctccctaggaagggctctcctgggctgtgctctcagcccagcctagccctggcttccctgagtggggacccccaaaggcctcaagccccctgcatggctccaccaaggtcctgaaccccaattcagctctgccaggagccctggcccaccctgggcctctcagctgaggctggaagagcagctggcaacgtagggggattgagggaggaatgcacacagaactgggggcctgggagcaggctgggcttgggtttgctcatctgtatccctgccaggctgtgggcccagccttgcaaggaaatgtccagaacacttgacttggcatcaggcagtgaacacatggaagtgtctgcatcttggaagtatgggggcttcacaggactcaggatttggcgttcaccctgaagggcacatggagagcacctctatgctggggtgggctctggaaagctgggagtgggcaggacatcggctttgggggctctggagggctgctcaggcatagctggacttgggacctgagaccaaggtcgacttagaggcagatggtattcccctagtgagctcgcctcccataggcattcggtggtggtgggtggcaaaggcaggctcagtgtttctggggtgcaagttgagtatttggagccaggcactacgaaaatcttggaaagtttctgataaaccagaaaccaagaacaccaaagcaatcatttgttagttgcgtctgcaaagacgaacgtggcagagtggattctgctgccacagatgacgctgcttttagtgaaagggcagacaggagaagtgcttgggctgtgcccaccgcccacacccgaatcggcctccaaaaggaggaagctgctgatagggcaggtgaaggcagtgggaggagctctgttttgaagatgagacccgcttctgcctccgtcagccatgtgccctcagcgagtcaccgtgcctcagtttccctctgtggaaggcggtaatgagcatcatgtctaccagccaaagtcaaggtcgagaatgagggcaaacgagggaggcgctgtgcgtcagtgttacttggacttagtccagttcttgtgttgggtggtcgtccacagcctcgattcatcatcctttgtggaggatgatggccctggagccgcaggggaaaactaaggcaggctgcggctcttcctggcatctgactgagctgcctgccctgcccgcctcctctctgtggcaagggcagcctctctcccctcccagggctttgacactggctggtcccactacccgcccatatcctaggcaccccctttccccaacacgctccaattcacactccaggtctgcgcttccttgggcacctgccggcaccaagttccaggcatgtgcacgcctatgccaacctcaacttcttggaggtcctccgcacccgcttcctgatttattctgcatttttcacccgaatgctgaaagagggctctggctcaagccctgactagttgtcatagaggtcacggaactccctgtgcctcagtttccctaggtgtaaagtggcacccacatggcccccacctccgggggtcgtcctgacgcgtgagagggaggatgcgcggagaccctgggcagccccgcaggggccgggagcgcgctcatcgttctgttgtctggactacaagatcgatgcccaggcaagcttcgcagctccccggctcgcaggcggcccggtccctcaggatctccccgccagcccgggatccccgaggagggatcgcacggccagcgcgcagggcacacccggagtggagcggagcacggcgcggggcacatagtgggtgctgggggcggcggggcccgcggggggccaggccaaggcgcgcccgctctcctcctccctcgcatgctccgcgcaggaacgctcagcctgcccacacggtcttagggtgcatctgctgccagtgacccccattcccacaacaaaaacgctcgtctgcccggggccacctccctcggagcaactgggacgcgcggcgggaggggggggggtccccttccccagggctgcagtccgagaggctggctctagagccgtccctggtaggggcaggtgtgcaaagacccagggcccgggacagctgccgcggtcccgcggggaccgggaccggaatgcggtcgcgtaagggccgcaggggaccctaacgtggcgcccgcggggcgcgggcgacgccgcctcagccgcgatttaaagggcagcgagggcggagggatcccagccgcctaccggccggccgcgaatccctccgccacgaggggaggcgacggctcgctctgaatcgccctttgtccctccgccgtcgggagcgcccggcacagaactcgctccccgcgcgtgcccgcgtcccgcacagagccccgtggaagcgccgcggcggctgggcctggcgggaggcgcgcgcacactgtggcagctgcgccgcacggtgtccctccgccgtcgaggccgcggccttcttttcgtatccttccaccgtgcccgggcggggtccaggcggctcaccgggggcggcgacgcggcggcggtgcgggcggcagggcagcggggcgatgaggtgaggacgcccgggaaccggaggcggcaccgcgcggcgcacggacctgggacgcggagtcctgaagccggcggacggttttcgtacgggcggccgtgcgcgaggcgaggtgaggccccgggtggcggggcgcgggggcgggcgccgggggcgcagcgagccgaggccgggggcgcggggggcgcgacggcggcggcggcggccggttgggggcggggggctcggacgctgcggggactcatttttcccgtcagcggagggagcgagcggtgctgcggcccgcgccgccatcttggattttactctccatttttctctggaattatttttggtgattaattttctgggggggactgggacgcggggcccggcggcgcggccccgcatcgcagcggccgggcagcggggcctgggacgcgccccgaggaggagcggggcggcgcaggcggtgagtcgggggaggggcgggcgccggcgagggtgtgcggggggcggcctcggtgacggggcgggcagggacgtgggggaccgcgggcccaggccggtcgcagggctccggggccagggcgggtggggccggggccgggcgcaagcggccgggcgcggggggcggggctgcggccgggccggtgcggggccggcgcggggcctgcagtggtggccgcggccggaagggagcggtagcggccgccgggcagcgtcggggccgggcccgcggccgcacgaggggagcagccccgccgctcgcgattgggggactctgttttcccttttctccaatgggcagccgtgaaccgtctcgcccaatctgctcccactgccgcgctgaactttttgtttttgttttggcccgagcgcatttcggagccctcccgagctcgtcctgcagcccaccctcctccccgacggcgcccctggccgtggcccggcgaccccgcggccgctgcgtcccctttgtgctttatccgctctccctgcgtcccctggtgtgtgtctgtccttccacgtattcgcggatgatgtgcaccgttgtcacctccgccttggaaggaggaacaatgacaactcgatgcaacttgctggattaagatagaaacaagttgggtgctgagaaattcagtctatttgggtttattggacccgggtctggaacagtaacttaacgatttattaagtggtggaactttcggaatactggggaggtgaacatgtgttctttgaagttaatttttaagaatttgccaaatgaaatttacctggagtggggggagttttccttagaatagagggcaggtgaattaatttgattgattgtggttctttgtgatgtggacctttttcgatttaaaccagtttgatataaagtgtagttgaggatggccatacaggtctgaactttgctgtgtaggatctttagaggaagcagttgccagctataacttttttcctttagtcttt

SEQ ID NO: 5602 - DNA, 6000 bp, Homo sapiens
ctgtaggcagagtgaagggggtgcctgagtaggaagggggaggcccgctgggagagggtcagtgggcagtgattgtaacatgattaggccttccttgcagatggcggctgtgctgaacggggagtggggttggaaggagccacaagccccctcactctgcctttgtactacactgaagacaggttgctcacatactctaaagcacattcttgatacaggaagaagggcttgtggggaaagcggcgatttggtattgggcaagagccacgttaagccttcatgagggcagccaccacagccttggcattgaggctgcgtaggtcacagtaggtctggccggtgcccacaaagacgatgggtttgcttgtgatgtacgtcatagaaatagcagctcccacctaagtggagaaagaggacagcccatcaacacaagcccacttttcactcaccctctcaggaacaggaagcgctggagccaagatttccttgcagcctcagctcctttgtgcaggacgcccattccagcctccagtctcacgtttaccttgtcatcaatggtatcaaatttggtaagaacaatgccatcaatgagccgaggtgtctgagccatagaatggtcagccaaggctctgttgaacttgacctggaaagaaaaagtgatagaagtgtaagaaccatctaaattgaccaaagctcaagttgtaaagggaactgggcccacgctctcaccagctggtccacggcttcattgcctactaaggcttctcctacaaacagcaccaaatcaggtgtattgacagtaatgagtttggccagggcagtcatcagaggggcattgtcttgcatgcggcctgccgtgtccaccagcaccacgtcaaagccttggttacgtgctagagaaagaaagtagtcaactctgaacacctggactaccactcatgctcgttcccagcttcctctcaaaaagtcctagtttgactacctgttcactgtcttgggctctggatttggttccaaggtaatgtgagaaaaacttgattatatgcttggccatcaccaaacatattcaggaaaaggaggacaacaggatgaaggtgaccaaattcaggtttctctggttaaggtatattagctttgcctgcaactacatctgttatccaaaagcagagcatggcaagtaactgatctgactttttactgtaattgaccaacgagtctgtagtagcacaagcctgatcttctgcaaattccaagagaacccaaggagaaaaagggaccccaaataagcccccacacttcccatgcactgtaccaaaagcaatggcttccatggcaatgccagcagcatccttgccatagcccttttcaaacaactgcaccatggtgcggccaccatgcttctctggagggtgtagggcactcaaacgccgggtgtgtgtacgcagctgctccacggccccagcacgaaatgtatcacaggcagcaatgaggacactgaagccattctctaacaaccagaaggaaatctgtgaaaaagacgtaagaaaagtcacctaaagccaggattttgagacacaagaagtacagaaatatcagcgataggctggggaactgcactgaccttggcaagattagtagatttccccactccattaacgccgcagaaggtgacgacataagggcgctggcgacgctgggcatccatgatgtcccggagcatgtctacacgacgctgtggctgcagaatctgcaccagggactcctgtagggcttgctttactgtggaagtcaccgctgaaaggggaggtggaggaggttgcagctgtgaaactcaaggaatgctctcaaaaatgcctaacacctttctgagctaaggggactaaaacagtaaattagactcttgtcccagaaatccagaacagacgcacattacaaggactaactcactgaatcctctcaataacccttaaaatctaggttacagaggtttagaggttaaggaatttgccgaaagtcacatacctagtaagaactgaggtctatgcacttaacctacacataagcactttctcacttaggtaagtacttactgctgaacgtccccatcaccttcccttccaacttgttggcaacagattcacagagctggacggcaatgtctgcagccacgttcttagctgaggagagggggacaggtatgtcagttccatgtcagcaatgaccaatctttatggtacaggtgagaaacgctaggtgattctgctctcaactacccctatcccgcgagtatgagtcagcccggtcctcagaacttaccaatgagatgatcacgcatcttgtccagcacagattccatgtcttcacgactcaagctctttgaacccacaaggcccttcagcataccaaacatgccacccagtgttcccttggtcgcactgcagggacaggagattacacatacacataaaaccagtaggcaggagttgtatcttaccagttttgcagatgcatataccaacccccacctgaaattcccctacctaggtttggtagagttttgagcagccccttcgtcatcagagctgctgcagtccagatcctgaagctgccccccagacccagtccctcgaatctggaagatacggggaaaggatgtggggtcaggaacactaaggtctctgaggaaaacgtccacattgctctatctctttcattttgggaagctccaagtataacttacccctcattcaaatcccagtatcacgttcccacactctacttcctcccaatttgttgttaaagatcactttgacccctgttacctcttaccaggttgatgtcctcagacaaggcagcctcaggggttccattggtggtgggagtactgtaatccaacacttctttgttagcacagccacccagttcccacacccggggtgcttttttgcccttctcctttggagcatctgacttcgtggacttgctgcaacaggttatgatacaaagagttatggtggagaagtaggaaaggaaacatgagccagagaccagaactcccttgcacccattgtgtctagataacagtattttgagagtactggagaaagagtgctcacttggacttctccatacccctcccatgcttctgaatgaactcctcgcgcttcctgcggatcagctcctctttggaaagttctactccgttctcaggacccactggaagacctgacttttctgcagggactggtttgctggtagccaaaggaccatcagaacctgttggggaaaaaactcactgaagaaaaaagaagaccaatcccaaccactagacaatggctaaaagtcttccaaattgttcaaaggaaatttggaccaaacatcttggagttcataaggcctggggattataggatggtgaccatttgagtgagaagcaggtaagcaatgacaaaaggaaggaccacctcagtccttagcaccgtgttaacacctttcatgtcccagtatatccaaagaactcaaacttgccttccttcttggcccccttttttttgctattctttgctttttccttgggcttttccccccgtgtctcaatcatggacctcacaggtttcttggccttttcagaatcttcaaatttcttcatggtagtgggagcacggatcttactgctctcctctgcttcactaaacaaaaaggagaatggtttatctttctaccccatgcagaaggaaaaataacggtccagagaaaggactctcacacccaagaggacaatgagaactgggtagcaaattaggaatgtctttgaacacatcaatttaccacctttgaaccaccttcagagaggtcatcaaatcatggaaataaattgattttagagaaggcaggtctctcaccgaaggagccgcaggaagtcattttggaaatcaaaagtgccatttaataaacttaaagcactttgctgttggatctctgtgcggtacttgtcccgaaacagccgatgcacgtcatctatcaatttgtctacatatgtcagtgtcaggatcttctgaaaaccaacctgtttaggggaagaaacagccaacagatctgcttacatactagcctagaatggagggacgccaactcaaccctggctttcagagataggttcagctacctggccggtttccctgtcctgagaggcagccaagctccctgcctgggcccagtagctgctgttttcccccatctacctttctagttttttcagttacgtcatcatatacactggctgcaattaatcagagttctcttaaaaatcagggctatgttaacaatgcaatcgtccctctacaacaccccacttaccacaaacaccagctcaaactggttgtccagtttatacttgagtgtgagtgcctcatgggtgaaggagttgttacctccccgttcctggagaaagagtatgtctcagtgttcagactatccccagaaaacccaggtttgggccctgggtttggataacctttgggaaagagccaaacatttcccccaaactcaaatctgtccccaggacaagaggatgttggggcacttctctctggcattccaccagaaataagataaccaagttgggggaaaaagatgagagagagagcaagacacatgggagccaaaagggaagtagtcatgtaaacaatcagattactagcagctatacaccatttagttttgtaaaggtgttttcccatctgttatttcacctaggctcgaaacaacaaaaccaagctgctggggataaatagagggagcggaggagaatcccaaaggcgccggaattcggctagagttgagacaccagaggcgggggccgtcattaagttgcggggtagtctgaaggggacgagaaaacgaagcggagtccgggttacgcgtgagtggtcagtgtgaggtgggcggggagggtgggaggaggcgcggaatagagtcgaaggggaccatggatcgggtcaggaaagaagagcctggagttctgatcccacggggacggtacctgcagcagcacggaacgaatcaacgcgttaacgggtccggtgcatgagtcgctaacgccctggaagcaccagagcacaagcccgcccttggagaaaatggtgaagaagtcgagcatggcggcagcggcagaggagctggggccggcgccgggaattcaggccgcgttcgccgccgcttcctgctgcgccaagcgcgggacacgtcacaccagtggccccggaaatcggctcaaccgtacttccgctcagaacgccgggtgccctccccatctccgcccgggggcgcgcaggactgacgtatcgcaaggccagccaatggcgggtgggagcgggcctgggtggggctccaggagaggtcacggggagacggccacctagagcattgggcggggcagagccctgagggccgctggccaattggcgcgctcgtctgaatggcgtttggcgcggagcagtgacggctgcgataatagcgaggcagcagtgcagctttcagagggtccgggctcagaggggttatgattcggagggttctgccgcacggcatgggccggggcctcttgacccggaggccaggcacgcgcagaggaggcttttctctgggtaaagttgaggacgacagagggtattgtggttctgggttgtccccaacctccgactgtgtgtccttcaggacccgaaaccatggcccacactggcaggacagtgggtcggcttggggaagggggttagcttacctaccagagcttgtaggggctgtgcaggtgtatggctcccaaggcggcccttttcaggtggcaggtctcacatcattctccatttaagcttacagtcagactgattgataatcggtggcacagatgtgcattaagtcctgcccgtgttcaggatgctgtacttagtgctgttgcggtaaaggagtgaagagaagacgggattcagtgaatgttctggaaaa

SEQ ID NO: 5603 - DNA, 6000 bp, Homo sapiens
gtcccagctgcttgggaggctgaggcaggagaatcacttgaacccagaaggcagaggctgcagtgagccgagatcataccgctacactccagcctgggcaacagagtgagatttcctcaaaagaaagaaaagaaaagaaaataagaaaagaaaagagagaaagaaagaaaaatgaaacaaaatctccaagaaaagaaagggaaggaaggaaggaaggaaggaaggaatgaaggaaataaagaaaaaggaaagcaaacctccatgtattaaatctttttcagggcaccagaggagatgacagttggcaaatcagggataaatgcttttataaatgaagaatcattttataaaaagtcaaatttcagtgatagcatatgacagttttgtctcttctcttctcttttcttttcttttttgagacggagtcttgctctgtcaaccaggctggagtgcagtggtgtgatctcagctcactgcaacctccaactcctgggttcaagcgattcccctgcctcagcctcccgagtagctgggattacaggcgtgcatcaccatgcccagctacctttttgtattttagtaaagacgaggtttcactgtgttggccaggctggtctcgatctcctgacctcatgttccgcccatcgtggcctccagaagtgctgggattacaggcgtgagccactgcgcttagctgacagtttctccagggcatcagaacacagcgttaggaaagctgtctgtggtgactcaatgtgacctgatgaccacaggaccccctgagtgagccagggctggtgggcgaagcagacatcactgcagagagctagcagcttgctgtggggagagaatagggacgtggtctcgggtccagatgtcctcagccacagtagcagcatgaaggaaggtgcattgaggggggacccaaatgctcctctgctccctgcctccctcacaggaacttcccataacacaaacaggaataacagtgcccctcgtcaggcggttatggcaatccagagtggaaaaagggtgcttcgggcagggcgagggggcttatgcctgtaatcccagtgctttgggaggctgaggtgggaggatcgcttgaggccaagagtgcactatgattgcgccacggcactccagcctggacaacagagcaagaccttgtcactaaagaaaaaaaaagaaaggatgtctcaaatgttctgtcattccttcaacacatatctgaatgtctgctctgggccactgaaataatgaggaaggtgaatgtaagggtgagttaggaagaagtagcagcacttagccccggctgcatgtgggggcttagggaacaggaagaatgcaggctggctctccggctcctgggctgggtaccacaaaccacccgcatcaggagtatgaagccttcctttcttaacataaaggacttggtgtccaatgcctaacctatatccctcaggaagcagagcggtacccaccctactgcccaaccctccaaggtgacggtgaccctcctgcacaccctggagagggcacgcctcactcagcagcatgatttctttcactgttaacttccaaagacgttcctggaccgaagaacaatcctcaccaaaaaaaaggcaaaggcagacacttctgaggccgtcaagatacccaaatagggtagctggcctcagcccagggcctgctggagatccaaccttcacctgacatttggatggggtaaaagttgaaatttacacaaggtaacaaatatttgaagctagcaagcagaaaaaagtccttacttgtgttaagcaatcaatttgtttaaaaaacatatcctgtacatgtcgtcaaagaaactggtaatagtggtggcatctggagaggggaaccaagtgagaaggactctactctgtatctgcacctttttaaaaaaaaaaaaaaaaaaacagagacagggtctggctgtcaccgaggctggagcgcagtggtgcaatcatagctcactgcagtctccacctcctgggctgaagccatcctcccacctcagcctcctgagtagctgggaccacagatgcactccaccaggccctactaattgtttgtagagacaggggtctggctctgttgcccaggttggtctcgaattcctggcctcaaagcaatcctcccaccttggcctcccaaagcattgagattacaggcgtgagccacggggccgggcccatctgtgcctctttaactttgcatcgtatgcttatatcgcttatttgtaaaaacaaaacaaaacaaaagtcttcacaagaaaagctcaagactggcagaagacaagtgaggcctctttaaagtgtgttggagagattctcgagagattctctccaacacactttaaacaaacaatctcgaacagccattttaattcttaaagcaccaattcttccggaattcaagttcaggcttccaccagcaacagaattctggcctgccaataataaccatgcagagtgactaaacattttttccaacaaaggaaaaaatgcaaacgatcaaagtgcagaagcagcccttggcccgcgcaggctccggtttccgcctcccgccgccgctgccaccgcccctgcgcctttagatttcgggcagcaagtttaattgctcgcttggaaagcgtcctcggaagggcaccgccagcaactgcggcttcgcgccccgccccttcccccaagccccgggcggcgtcacgtgacggctgagaaaagtaggggaaaggtcagcagcagccccgcccccaggctggcgcgtcccaggcgctcggatcctgttccacccgccgtgcccacagagaccttccggagcgagttggcgcgcgtccctgtggccaccccagcgacagcgggagaaatgcaacgcacctctccgtgggaaggtcgagccctgcggtgcccagctgtggggacagctcggtgctcagtgcttctgatgacagatgctgcatccaacgagccagaaacgcaggcaccgcgctcaagagcccagggcgcgtctaaaaggggctcactgtgaagcctcagtgaaaactgacggtgtttttatgaatgagcactcggggccagggttgggtaagggcaggccctcgttccagggctccccggaggcccaacttgaccgctcggtgaccactggtccggggccggggccaaacgcagcagccgcagcagtatcggaagggacccagtttaattctcttcccctccagggtaggcggcttgtttttagtaccaactcgaaacgttattttggcctgtgcatgatgccaacttctgccactttgaaacaaagtgtgtgcactcccaaacctggccctttttattgtttgattccaactgttaagatagggttcaagtgcaaggtctaggctagcaatgcttcacaggaaggaaaccagtaatttacatgcgaaaagcagtccacaggctcttggtattgaggcaaaaccaatccaaagaaccagctgcgaatgctgatagtccccagaccaactgacagctggatgttcgctggcctcagcggtgtgcattctcagcgacacttatgtcctcaatttattgctacgttcactcggtcagagtcgccttaaagaatttggaaaggcccgggggtgggggtgcttcctggcataaatagaagaccagtgctcagccattttttattcacttggtttgtggcttagaatgaaataaacatgcttgcatatctggaatgaccagaaaccggacacctgtggaagaaaatggtgtaacaaaatacaacgttgcaaaaggtaaaaccgattttcattttattcggtaacttacaaagttaccagcttcctactaaaatctgcccttaaatattttataacacacggagccgagaggaaccgaaagcctgtgccgagttgggaatattaactttgttatgtatttaacctggtaggtagttgggatttttaactctctgagttgttttctttttttaaagtaagatcggccctcatctttgagttctgcggctttaacgaaagccaagggcggatttacattataaagacgctgacccatggcctctcctgacaaaccgaaagaagccggctgttggctggccgcggcggtggctccgagaaggggctgccccgcgtggccctgaccgcaccgtcgggctcgcaggccaagttcgccagggcacggccacgtgacacccccaccctcccgcggccccgccgctcccagcccggcacgaccttgggcacatgctccgcgcccacccgcccttgacccagcgctgcacgggagaggctgcggggcgctcccaagcaggcactgggcccggcaccctcatcctgctcacggcagcgctcggaccgcgcctggagtccctgcgccaagggcgtgtcccgacggctgcaccgcgagggcgggcatggggagggggaccggggagacggacgctgggatggggtcagcggcgccctgccgaatcccgagggccgagcacccctccctcagccgcactgcacctgcccgtaggtgaccaacccacgggcggacccccagacccaatcctctccagagccagggtgggatgggcagggacaggagccggaggccctactggccccgggcgaaggcatcctggaaagcatccagagcgtccagcatccctcccgcggccacccgcaggctgaccgacccctgggcagaccctcagactcaatccagtccagggcggattaaggagtgggagacaagggagccggtggccccgctggccccgggccggaggcgtccagccaagtccggagggccgagcatccctcccgcggccgcacgggacccgcctgcggatggaccgacccccggtggaccctcagacccaatcccctggggaacatggggagccccggcctctttctgggttcaggatctccacaaccccgccgtccggggggaataccggggttcctctcggcgccccggttccggcggcgtcccccacccggtccggttcccggcagccccgcgccccgcccgtccccggcccccgcagcccgcagggccgccccgccaccctccccaccgcgggcgaccgggcctcaccgagtcagctacggaggtgcggcagcggcagcggcagcggcggcggcggcggcggcggtggagtgaacgagcggcgagcgggagccggggaaggagggccgcgggcgaggccgagcgcacccgacgccggcagcagcggattggctgaggcgggtccggctgcggcgcctgcaggcgggtgactcccggcgcgcggagggcgggcccggggcctcggcggggcggggcgtccgcggggctaggaggggagggaaactgaggctcgagcgggtgctcgcgtcctcgacctctgccggaatggggtctaggacgagattcctcaccctccgagcctcagtttcctcatccgtaaaacgagccatctcgtggaggccgtgcgcataaaatcgcttagctccgtgcctggctgatcctcgcgacttatctatcggcattgccccgtgtaatgctccaggcaccccctgatggtattcacccctgactctttcatgcagacaagggtcgcgggccaggaaataagttaccccacatcaccgagctgagaagcaaccgatccacagggagtggtggggcgcgcctgtaatcccagctactcgggaggcgggaagtcgcttgaagccaggagttcgaggccagcctgggcaacgtagcgagaccccgtctctaaaaaaaaaagcgcggggaagtgatagatcggacattgggtccagatctgattccacagcccatgccccaaatcagaccttataccacgagtggcagtcatcgcgatccagaggcagcgtggctcctcctcatctagctaggataaaaatgcctcacttggggggctttggtgagatttactaaaataattcttccagcgtcaagaacataa

SEQ ID NO: 5604 - DNA, 6000 bp, Homo sapiens
ccacccagatgcccacctggtcacaccctgggctgccctcagtcctcaggggcaaaaggcaggaacttgggattggaagcgtgatgctgggacatcccttccctgagttctgactgctgtgggcaaggcctcacctgtacaggtaatagaagaaggagagcaggtagaaggcaagtttgcaccaggactccttctggcagtagttgagaatgtcagcattcatgatggagaccgcatcatacatgacctcagagccatctgcaggacggtggaagtacctggggcagacaggggcctgagtgtctgccatcaggactcccacccccatcctgcccctgttccccatctcagcctccccaaggcagctgctaccctcacctccagaggtggtagaagaggagggggatgttgaggcccagggtcacccactctgctgcacacagaaacatcagacagaagaggccgtggatggagtattctgggaccaccagctgggggagtgagggtgagaggtcagcggcctggtgctatgacagaccagccttcaaggggacagagaggagctggggtttgggaggtgcccacccaccgtgacctctggggattaaaaggcctctggcttcccactccctcccaagtagagtggatcaaacaggcccaaagcaggggaaggcctggttctgggccacagacagtgggggcagcgctgggctaggagcctcctgcccccagccctgacactgaccttcctcaggaggcagcagatgcgttcgatgttttttaaacgctcgcgctgttgggggaaggaaaaggccgcgatggggtggcggagaagcaggtactggagcagctcccaccgctccacatgtggccgccagggggcgccagagcgatctctgcggcactgtcggcacggccgggaagcagccgcgccgtccccatggcgaccgtcaccatggaagggccttcacccgcgtctccatggcaacggcccagagcctggcaaccaccgccccgccaagaggaactcagccctgagcccgcgccaggtgtttgctgggggcggagacagagaggaagggggcatggccgtaggccccccaccccacccccgtcttcccgtctcccacccccagcccacgacagatggaaagacagacggacggacacacctcggcacagcacatgtatcacttactgcccgcgcagggttcccctggtcgatggggttcttgaagtcggtccgcagctcatcaaaggctatgatctgggggaggggcgtgtgcccgtcagggttggggcagcagcttatggccttcccccaagtccttctgtgggatagtttactgaagaggaccagccaggtggagcttgttgcaaaggtggagaaaccgaggtccagggaggagcagggcctggtccaaggtcattacaacagtccagaagggaaccctagcgtctggatgcccagttcaggcccatgtccactacacccccttccaaaacatcccaagacatggcttcgtgtctgccctgccaagtctcaggccctgtgctgagcactggggctccagaggcctgggatgcagcccctgcccaggaggaacccaggcccagagggatgatcactctgccttccaggtgatcagggtttggggtacagggaggacctggagtgggcgcttaaccctgtgtggggggtgagggagttcaggctggactcggagtaggtgttggtgagcaaatgggggaaatgcagtccaagcagtagaaggtgcaatggcagaggggtgaaaggtcaggagacattcaggaggctgcgggtttcatggggctggcgtgacagcgcagcgagcaggaagaaaagagagagtggtggaagaggagctggagaattcagcagagccagacatgggcgccctgtgaggccagagcaggagtttggacttactttaacacaaaaattttggggggaggcattgaagagtacacagcagcagagtggggtggtcaggtccatgtcttaggattggtccatgtctcaggattggtggggcaggaaatccgagctcactgacagtcacagctgagatctaagtggtgcttctcctggccggtatgtggattcactcatttaattcttaacaaccttatgacttaggtactagttttattttcatgtctgttttgcagatgaggaagctgaggcaggttaagtgacttgtccagggccacacggctggttagtggattctaacccagtgtgactccagagttaaaattcctaaccactgtgtcatactcaggccagaccagcaaggggacggtttggagggttaggggcagggctgatggtggtctgagtgaggagagttgtagtggagacggaaggcgtgcatgggattctacagctctttaggagccagactccagagggttcaaatggctgagaagtgaaggcagaaatctaaggtggcttcaggtgttggggtgtctggcagacggcagtgtcctcacgggtggaaactctccaggggagcaagtgtttgaggggatgatgggatgggaaggagctgacaggtgacttgggggaaatgggctggcagaggagcctgctggggtcccctcctgtcggctccagccctaggatgaggcagcaggcccaccacccccaggcatcccaggccccagacggctcagagagaaagaacatgggcttcctggagggagctgaggccatctggatcatcccccctccccgcccagctccccattgactctgggcagcgccacttggcacgcacagcaacagggtccacagggagcagaagggtgccgtctgtaccccagagctggcaccaccagcaggcggcgggcgtcacccctcccaccccccaggctgcctggcgctgactcagccccccggaacaaacaatcccccatggtgacagctgacacgcgtcactcaccgccagggttgcctaggaaccactggggcctgggctgagggtctggagtgggatctggggtcccgccctgttaagagtctagttcttagcagctgtggactgaggaccacgcctcctatcccctaccacccagcaggccgcactaggcactctgatgtgcacaggtccactttgccggcgaggaaccagacttgggacaaatgacttgctaagattgtccagctaaatggctgagtggacagagtacctcacacaggtgctcaatcaatatctgttgaatgaacaaagacatttcttcaaagcttgggcctttcctcccagcctgggcactccacaagggcaaagtctgggttttattcatccttgaccccctcaaagccacccagagcctgatctttgggaagcatcaatgcaggcgtggtggataaactgctgaggatcccctgaggacagggaccccacaggggctgtgggaaggccctgggtggggaaggccccaaaaagaggcttcttgaattccaggagcccttctcccaggagctggtcagctctgcattccctagcctgtggcccccagctccctccagtccttagaaccctagccctcctgcccctaccccacagaaagaaaaatagagtaactcggggtgcgggggagagggggaaagacaaagcaaccaagacccagagagagagcagagccaggccaaggagtgacagggctggagctggggtgtgtgctgaggtgcctttgggggctcactcttcacacagtaggggttcagtctatggattcccgatgtcaaagagcaaggtggcaggggatggcaaagggagcgcagggggaaccatggagcaggcggcaggtcccaggaagagaaaggagagaggaagtggagagcccgggaaagaagcaggtgaggcaccgggaggaaggagggaagggctatgggaaatgggattgagggagggataagaggacccctgaaagggaatgacaatcagggaggtgtgcgcgggaggtgtgagcagaggatgctgagctgagccagccagggccgagctgggcaggctgttacagaaacaggcacggggtttgggtgggggtggggacggagggcagtaaagtggggccaggggcccccaacaaccagctggaggctgattgatagttctgtagtgaggggacgggagccaggcagaggaggccctggaggagaggagcgggaggggaggaggagggagcctgggggaagcgatgggtcggatgcaggatgaggaatggacattttgaagaaccaggtgtgaggctaggccagggcgagggacagaccaaggggtatgtgagagacaaaggggaagggggacaggaagaggagggaagctggaaaatggagaggaaacctggggggctgggaagcccccaacaggaggggtagggaaacccaaggtgagccggtggtgggggctaggtctctgggggctgatgagagccaactgctgcttggtcagggagggggctgggaaggcaaagggttaatggactctgagatctgtgggtcctgtaaacagatgcagttgccatagcaaccagctccatcactctggctggaaaaacccacaaaggcgggggggggggggcagcagacagacaaactgcccgacggactaatggaggcggctggatggtggtggggggggacatagaagataaagcaacaaaaatgccagaattccaccccccacctcacgggctgcatgggagcagaggacgagggcagaggagggggtcagagaccgactgacatacacacagacaggcgggggcggcggaggaaggggggccccgggaagaaagccgaccacggggggtgttaatgggggcgaagccgacaagccgacggctgggggatagcaagtttcccctgggctctgagaccacccgccctgggtccctccagctccgcgtggcccctgccccccaccccgcccccagccccagccccagcccggccttacgtgccagatgacaaagaagatgagggaggcgcacagcaccagggtgagcatgtagcagaacgcggcgaaggtgaacgccatggcccccgcgccgggcggcggcccggggggcgccagcgcggggcccgggcgcaaggggacgccccccggcccgcgcttagggccggccgggcatggcccgtggggctcgggggacgtgggtgatgcggccgggaccgggaccgcggggccgtggggggcgcggggcgcgggccggtgggctcggggggcgcgtccgctgccggctgcccgggccccgatcgctcatcctgcgatccctcgcccgcggctccctcgctctccagcccgcgaagccggcggggcggagccgggggcggggccgccgcgcgagcggcctcgggcggggctgggtctccgcgggcccctcgtctgcccgcccggctcgggcgccacccccagccccgacaagcccgcggccgttcaccctccggacagcgtagacgcggccgcccccggcaccccgcacccctcggcactccagccaccggcacagccgcactcggccccctcgggcgggcgctcagggcaaaggctgaagtgcgaggcacttgtcactgtcggagacggcagaagcacctggctgggacacacaatgacgccaggacaggggctgaatgggagcagtggggttttggggggcgctgaaggaggttgggccaggtgcagtgggggccctctcagcggctgcgcgaccccacacctctgccgtgtgccccgcgggagttggcggcggcacgccaggtatgagctgatggccgcctgcctctttccctgacagaacggtgctgggcccttggggacagaccacagaagcacaagcagctttcctggcctcaggaaacggggtcaagggcttttgccagcagccttaggacacagaaaccaagccaggacccccgtgcaccccaccaagcccagggttccagttccatccccccaccccaaggctggg

SEQ ID NO: 5605 - DNA, 6000 bp, Homo sapiens
actacgatataaaaccaatactgtgatgggtccactgagactctgctgtgtctcagaacaaggaaatgtctagattaggggtcaccaactcgaatgcctacaggggccaggaagctaatgtcaacaagtggaggaagagaggggaggtgctgcaggtaactggaaaatgcaattttaaaaacatacctgcttctggctgggcatggtggctcatgcctgttaattccagcactttgggaggccgaggcgggtggatcacctgaggccaggagttcaagaccagcctggccaacatggtgaaactctgtctctactaaaaatacaaaaattagctgggcatggtggtggatgcctgtaatcccagctacttgagaggctgaggcaggagaattgcttgaacccagggcgatagagtgagactccgacacacacacacacacaaaacaacaacaaaaccgtacctgcttccaatcatcaggcagatggcccaatgtttccagatctctctaattttcatgagaagccagaaaaccaaatttttacatgacaatttcccattttttaaatgttggcaattactaaacttaaccagatacatacacacatacataaaatcctgtaagcctaagagaacacatctgcaggccagcaccatgagggccagtttgtatcccccaagtccagcacaggaagcaacagtttcctgtactctgtgctggtctgtccacaccaagactgctgtgctcagctgtgagcgctgcacctaatgggacacacatgagccggggctggtccacagacagatgggcaggatgggaggagactttaaatagttcaattccccttaatcgatattttcaaatagcgttgtgtatgtcaagcccagtgctacatgctggagatgcagaaggaaacaaggcagaagcagctctactcttgcggagcctattgccttgaggggaactcaaaggatctggggataatttccctggagaaggctcatggaggacagacggtaataataatgataagatttactgagcttttactctgggccaacattaccctcaatgctttacctataattatgtcatctaattcttaccactatccttgtttcatgtaatgaaactgaggttcaggaaggtcaagcaaatcagccactacaattgtgtacagattctctatggtccagaagaatggaacaggctgtcaaatgagagcacgtacttaagaggctaacacagtatgaccgtatgtggcaataaatgagtgctgagtacatgtctatttcttttccagtctctggaagcattcaagaacaagttgtatggtcatttgttagggttgctagagagggaggctgagtatcagataggtagaaacactgtgcacagccttccatctatgagaatctaactccacttttcctggaataattattttcctttttggcaataataacaaagtaattatcaatgactcctcacttccacacccctacaacagcagcagtagccctgtggatgggagactaaggcccaggaagaatatggaccaaattacaggtgataaaccatcaatcaagtaatactgatggaatgtccatgacacgtaaaccatattgttccaagctctaaatcagtgtgcacagcaggaaaagagcatgagaaaggggcttatacctaagactcagtactggctttggcattaatttactttgactttgagaaggtttttcctaagccttgctttcatctctttacaatgagggggtaggaatatacctctaaagtccttttcagcttgaataattgatataaattatttgcattaaaaaaaatcagacctcagatgtaggaggattcacctttcttcctagaagccagtgagaccacagaaccctgggaactcaaaaggactttagatgtgagaatggtcagtcctcatgggaccaatgagcacttttaaaatgtagctagtccaaaatgaggtgtgctataagtgtaaaatacacactatattttgaagactcagcatgagaaaaagaatatgaaatatctcaagaaaacatttatattgctttatattgatatttttatatattgggttaattaaaatattaaaattaacatcatagaccaggcatggtggctcacacctgtaattccagcactttgtgaggctgaggcagaaggatcccttgagcccaggagtctgagaccagcttgggcaacatagcaaagcctcatttcttaaaaaaaataaaaataaaataaaataaaaataacatcacccatttcttttacctttttaacatggatcctagaaaatgtcaaattacaatgtggcttgcattgtatttctattgaacagcactggtttaaggagaaactgaagaccagagagtaaatgacttttccacagagccagaactggaaccagggtcccctgacttctcattcgaggctctttccactcttaataggctgtggtggccattcttcaagatggcccctaataatcctcaccttctgttgccctagtgcagtcccttccacactgaacagggctcatctgttagaagactacagaaatgcctgtgtgacttctgaggctgggtcataaaaaacattgtggcttccagcttgtctctctttggcatgacttgctctaggggaagccagttgccctgtcatgagaacaattaagcaaccctatagggaggtccacacggtaaggaactgaggcctcttgtcagcaaccataaccaaccacgcaagtgaatgcaccatatggagcgctgatcctccagcccagccaagcctttgaataagtgcagttccagctgacatcttaactgcaagttcgtgtgagaccctaacctagaaacacccagctaagcttcccccaaattcctgacccacaaacgagataattaatgtttactgttaagtcactaagttttgatgatttgttacacagcaacagataatacgcagccttacaaatttagaggtctcatataagaaaaactcacttctatctttggcatttgtacagtgtgagaaattattcttatccttcctccagtctttggcctagctcagggtaacccaactaaaaactgctaaattatcaaacttggggaatcaaacccaggaaggtaagatcccattttattcttagaaggttcttcccttttccctttattgcagaaagaacccaggtctcttgagaatgaaaaagcactacatcacatcaccttcacctgggccattcagagatttgattcccacaaaatcaaaggaactagagcccagaattgctcagttagacacagtattgaggaagcaacaattgagaaatgacaatctatgacatcaacaatcgagaaataacaatctatgacatctgaatttctctgagacactgctgtcaatagcagtgctaatgttttatatagcatgtgttgcttttcacagtattgtcacatctagtatctctgaggtaggtggggaagatataaataaaacaggatacatatgaaaatagtggctcagagctcatggtatgtccttagtttcatgatcagtgaatgacaggccaggtctaaaatctgggtttcagtaggtgactcaagtcagacttcatgcttcccaaggcaggagcatcctggctgttatgagtactcttcagttggggctgtcctctgagatcagtgtgcacttgtagatctccttaaaggccacaaggaaaggtggcattacttcttccacggtgacgtgcctctggagctccttactcaaggaagtgacgcctgtcccaaccagtccacagggcacgatgtgctcaaaccacgtgaggtcggtagagcagttgagagccaggccgtgggatgtgatgtgccttccacagcggactcctgcaaggcaagccaaagggtcttagagtagataccctccactctccgggctttggtgtccctctcagggcgatgagaaaactggattagatcaccggttttcaaattttgtttctggagaaacaagggattgtactcagatgggaaaaggaaacaaatgaaaggaaggggtgcgtggcttcaagcagctgcactcatcatgaggattccaggaaatgtcttttaacagattccaatacttaaaaaaaaaaaagcttggggacaggcgcagtggctcacgcctgtaatcccagcattttgggaggccgaggcgggcggatcacgaggtcaggagatcgtgaccatcctggctaacacggtgaaaccccatctctactaaaaatacaaaaaattagccgggctggtggtgggcgcctgtagccccagctactctggaggctgaggcaggagaatggcgtgaacccgggaggcggagcttgcagtgggccgagattgcgccactgcactccagcctgggtgacaaagcgagactctgtctcaaaaaaaaaaaaaaaaaaaagtttgaaaattagcacccttatttgccatgacattgtcattcgcaggacgtaacctggcaattcacttctcttgtctctcccttaacagaaatgcgtgttggactagatgtgaggagccttctgcttctgaatatacgatatctgaaaaggggcttaaaaactcaaacgcagcgggtagctgtgattcaaaacccgcgctagatacgcctcctcccggccctcacctccgttggtccagccccgtcagaccccgcccccaggcctcaagctccgacctcggctctcaggtaccgccctgctccgcggcgctcaccgatcgcgcagatcttgcgatcgtctagccagacgccagtgtagggcgggggccgcgcgcgggcgtcctgcaggccctggagctcgcacaggcgcacggcgcacgcctccagcgacgctacgtgcatgcgcaagcgcaggccgagacgccgcaggtcgagtaccgggtggcaaagcagctggcccgggccgtggaaggtggccaggccaccgcggcctgtgacgcgcacctcggcgcccaaggcccgtagccgcgcagtttcctcgggcgtcaggccgccgcgcagcccggccgtatacacgggccccgcgggctcgcagagcaggagcgcgcccgcctcagtccccgacggggcctcaatgcctggctcggcctgcagccgccgcagccagcggtcctgcagccccagtagctcggcgtacggcacccgacccaggcgcaccaaccgaacggcgggttgccgcatcgtgcccaccgttgcgtccgcggggccccgccctctccgtgggcctgggggcgtggcctgaggggcggggactcgggggcacaccccgagccgcagctcccaggtgcgtgttaaaagctggaggggggatatgtgatcccaggaccaaaagcgcggggccagactcatcggttcattcaacaaccagtatttagtgcctgctgtgttctgcaggccctgccataggcgcttgatacagcggtgcatagcgtatgagaaagatctgtcctggtaagcttacattcttacagcagacgataagtattttaagtgttaagtaaataaggttatttcacgtataaggtgttaaatgctatgaaaagaaaaataaaacagggtaacgtggtgtgtcctgtgttgagcccctgggggacgcaagagggagattagcttgcctacaaggttattggtggaggtagggagaacttaaagatcagcacctgtaagaaagtgaaggaagcaggaatttgtaggcagaggaagaagttggcctgcaaaacagttgcagcagaggccttgaccaatcccaaggcatgcttggagcctaggatgacccttcagagtagttccacattaaagcaagggggccagaaactcttatccttgcattgaccagtcatggatacaggctacacctggggaggagctgtgattttttttttttttttttttttggcaagactgcttccctcggtgg

SEQ ID NO: 5606 - DNA, 6000 bp, Homo sapiens
atttctttttccctgtcattgtggtttggtagaattctatagtggtatcatctgattcttttttcttcctctttggtgtgtttaatttaccaatgagttttatactttgtgttttcttgatggtgaatgttgttccatcacttccaagtttgggacttcattgaacatttcttttagggtttgtatagtggtgatgaattctgtcatcatttccttgtctgggaaagactttatttctccttcatttatgaacattaatcttgctagatatagaattatgggcttccagttgttttctttcagcactttgaatatgtcattccattctcttctggcccataaggctttgctgggaatactcttgtttatttaaaggggtttcctttataggtaacttgatacctttctcttgctgattttagaattcagtctctcagtttgaatttagacagtgtattggtccgttttcacactgctgatgaagacatgcctgagactgggaagaaaaagaggtttaattggacttaattggacttacagtttcatatggctggggaggcctcagaatcatggcaggaggtaaaagacactttttgttgtggttgttgttgttgtttttttttttttagacgcagtctccctgtgtcacctaggctggagtgcagtggtgcgatctcggctcactgcaacctctgcctcttgggttcaagcgattctccttccttagcctcctgaatagctgggactataggtgcctcacactacacccagctaatttttgtatttttagtagagatggggtttcaccacattcaccagactggtcttaaactcctgacctcgtgatccgcccacttcagcctcccaaagtgttgggatcacaggcgtgagccactgcacccagccaaaaggcacttcttacatgtcagtgtcaagagaaaaatgaggaagatgcaaaagcaaaaatccctaataaaaccatcagatctcatgagacttattcactaccacaagagcagtatggggaaaccaccctcatgattctaattatctcccactgggtccctcccacagcacatgggaattatgggagtacagtccaagatgagatttgggtggggacacagagccaaaccatattagacagtctgattataatgtgccatggcaaaatcttctttgcattgttttcctggggatcactgagcctcctgtatctgtatgtctaaatgtcttgctagacttgggaaattttcatctattattttttctaagtcttttgatctctcttcacccttggaactaccaataatttgtaaattttgtcattttatgtactgccaaacatcttaaaggcttttttctttcttatttttttaaaaatttttgtctgactggattatttcaaaatacctgtcttcaagttatgaaattgtttcttctgcttgctctagtctatttttaaaacttttgagtttattttgtattttctccaattaatttttcagttccataagttctatttggttctttttagaaatacctatctttttggtaaaattttcatcatatcctgaggtttttttttttttttaattttttggtattattttgtagagttttcttgtatctcactgagcatctttaaaatcagtattttgaattcttgatctgggattttgtgaatttatttttgattgtgatttatttcagggaattgttgtgttcctttgatggtatcatatttccttgctttttgctgttttctgtgctcttacattcatgtctacatatctggtgtaatagtcacttcttccaatttttctgaagttgctttcatgggggaggatttttcctgaagacatacaagatatatatatatcttgtatatacattgttggctgaataggaagtttttggctttgattttggggcctgcagcaagtagtgtgatctctgtttttttttttttaatcagcacacagggtcagtggtatcttgaacttctcggtggtttagggtatgattattagtggagatgttggtgaagttatgcatgggactaggacactagttggaccattgtttaggtcttggtggtggcagtggtggtgtctcttttaaggccccagagcagattactctcgcacctgttagtggtcctggagcgccaattcttggatccccaggtggcttgcttggatgctggtagtagcagggggggccaggcttgtgggcaggcactcaggccctgggcagcaggtgtgataagggtgatggcagtagcagtggtaaagcaacctactggaatccaagtgatccatactggtgttggtggtgactgctatgggtgggcattccagtcccctggcctgctggtaccatgtgtgtgtgggtgtcagctgtggtggtatcagtaggttgggtcagcctgacctcaaatcttggcaggactaatcaggtgccaatggtggtagactgggctaaaaaatttccaggcttctggatggcatgctcaagtacttgggggataggattaggcaagtagacttgttcacaggctccctggtagtgtgtttaggcactggctgaaataggcagaggcagggtgatttccagtgtactggtggaatgttccctgtgggctttggtggctgtgctgtgggcctaccaccaggaaggatgaggcccctctcagttagagcattgtgggcaagaagctttggggaatgcatactgctcttgctctggtctcacagcagcccacacagggcagtgggaacttttctaggggtcatgggagtgcctggtctcctctttccctttttggactggcagctgctgcagcagcaacaaccctagcccagctcaagggtagggtgcagacctccagtgactaaactgtcaaaatgtcagctgtgggcctaccaccagggaaggctgggcccctctcagatggcgcactgtgggcaagtagacatgaggagtgaagtctactcattctttggtttcacagtagcctctagcatgatgatgtggactatcctagttgtctgtgggagtgcccagtctcccctttcccgtcccagcctagtggtggcagctgcactggctgtgtcagtcctgcctcaggacaggatgcagattctaagcagcaaagttctcaggatggcaccaagaagcagctgctcagggctcagatacctgtgggactccatgtgggttccccgtctggagcgacatcttggtacagtctctagtctgttcctcatgtcaggccaaaggtctgtgggccaagaggttctctcatagccaagaatgcaaaagcctgcggtgagagtgtagaaccctgggggtttctcttttaccctttccctgcatccaggagctttttctggctcccagctgatccccagccaagagagctgcccccttccctctccttactcacattcagtacttctcatcacttctttgttgaatctaagtctctcttagatgatctattcaaagtgtttatttactattctggttccttttcatggaggaggtgtgtactagctgcttctaatgagtgatcctgacccatccttccacattttaaatttttgatgtcacaatttgcatcttttttttttctatttgtttatttatttattgttattatactttaagttttagggtacatgtgcacaatgtgcaggttagttacatatgtatacatgtgccatgctggtgcgctgcacccactaactcgtcatctagcattaggtatatctcccaatgctatccctcccccctctccccaccccacaacagtccccagagtgtgacattccccttcctgtgtccatgtgttctcattgttcaattcccacctatgagtgagaacatgcagtgtttggttttttgtccttgcgatagtttgctgagaatgatggtttccagcttcatccatgtccctacaaaggacatgaactcatcattttttatggctgcatagtattccatggtgtatgtgtgccacattttcttaatccagtctatgattgtcggacatttgggttggttccaagtctttgctattgtgaatagtgccacaataaacatatgtgtgcatgtgtctttatagcagcatgatttataatcctttgggtatatacccagtaatgggatggctgggtcaaatggtatttctagttctagatccctgaggaatcgccacactgacttccacaatggttgaactagtttacagtcccaccaacagtgtaaaagtgttcctatttctccacatcctctccagcacctattgtttcctgactttttaatgatagccattctaactggcgtgaggtggtatctcattgtggttttgatttgcatttctctgatggccagtgatggtgagcattttttcatgtgttttttggctgcataaatgtcttcttttgagaagtgtctgttgatgtccttcgcccactttttgatggggttgtttgtttttttcttgtaaatttgtttgagttcattgtagattctggatattagccctttgtcagatgagtaggttgcgaatattttctcccattttgtaggttgcctgttcactctgatggtagtttcttttgctgtgcagaagctctttagtttaattagatcccatttgtcaattttggcttttgttgccattgcttttggtgttttagacatgaagtctttgcccatgcctatgtcctgaatggtaatgcctagggaggaggaggaggggcggtgggagagggagggcgggtggaggggtcgggaggaacggggggcgggaaagatccgccaccgggttgaatcctccgggcggactgcgcggacctgacccatttacctcttaacggtttcacgccctcttgtactctctcttcaaagttcttttcaactttcccttacggtacttgttgactatcggtctcgtgccggtatttagccttaaatggagtttaccacccgctttgggctgcattcccaagcaacccgactcctggaagacccgggccaatttgcatctttttatattgtatataccttaataaagtattgtagctattattattcttttttttttttttttggctcactgcaacctctgcatcctgggttcaagtgattctcctgcctcagcctcctgagtagctgggattacaggtgccctccaccatgcctggctaatttttgtatttttagtagagacagggtttcaccatgttggccaggctggtcttgaactcctgacctcaagtgatctacctgccttggcatcccaaagttctgggattataggtgtgagccaccacgcctggcctattattcttaatagattgtcttttaaccttcatactaaagttataagtgatttacatatcaccattgcagttagagtattctggatttgattgtctgctttcttttaccattgagttttatgcttttagttgtttttgcgttacttattaattagcatccttttcttttaggttgaatactccctctagcatctcttgtaagatagggctgttggtgataaactcccttagcttttgtttgtctgtgaaagtctttatttctctttcatttctgaaaaacagctttgctagatacagtattcttagttggcacattttttaaaaaaaattttttacacttcagcactttgaatacatcatctcactctctcttggcctgtaacgtccctgctgagaaatttgttgctagccttattggaacttattcatatatggtttgcttattttctctcactaataaggatcctcgtgctaattttctcttgctaataggatcctctctttgtccttgatttttgacatattgtcattttgtagtcttgtttgggttgaatctgactggaggcctgtatctgttcctctacttggatatttatatctttctccaaatttgaaaagttttctgctacgctttgtctttctcttt

SEQ ID NO: 5607 - DNA, 6000 bp, Homo sapiens; identical to SEQ ID NO: 1690

SEQ ID NO: 5608 - DNA, 6000 bp, Homo sapiens
accctgggcacctcctcctcatgctggggtccagccttggcccttggcccctctcctctctagccccatccactcctggtcatctcatccagggtgggagctctaaacaggacatgagtgtcaatgacaccctcacgtccagctcagaccacatgccgcaaactgcacactgcacactctgccctctctgctggcccacaggcccctcccgtggatggacctgcagggttgcctcccctcatgtcgcccccagccgcacctgaaggccccctcagttggccctctcagcccaggccccaaccagcaggaagcctgtcaggcctccttccagggaggttccaaacctgcccctcaaatccccccatgccccatccaagtccacaccacctctcatctggaccacagcagagacctcctgcactgcccctcccctcaacccctcatcagcacatcagccagaggctccttggagaacagaaggggctcagaaccctgcagcggcgtccactgcacacacaggaagaactcaagtgctcataggcagtgagtcatttccttaggcattgtggtgacccgggatcatgtgcctccccgaagcctgcacatgcactctaatgatgcaagctaccaccaggcggtcagctttgccagctgacgtcccaaacagctggcatggggcatgcacacagtaggtgcttaataaatgtgtgtcgggttaagataggcccaaagccatttcaaatgtccaggcagtggtgtaggcaggggtcagctctgaagctggcctcctctcattcgggagacccctcagaggtcccagcctccaggatgcagtgttcagagcaatacttctcagtgcacgtctggctgtgtccctgcccagcgctcccagggtcacccctctctctagactcactttctgccccgtcaccccactgtacacccttggtcccagccccttccagtggctcagcttcctgaacactccaagcctgggctcacctctaagccgttatctatgctattctctcagccaggatgcccttcccatacccaaacaatccgtgctcacctttaagactggctgaggcatcacctcctctgagaagccacctctcccaaacctgagcccagatgagccaaagcccttccttcctccagtcagcctggatcctctcatccggcagaactgtcgccttgcttctctgaagcggtgaatgccctggggctggggacgcacaggctcgctggcccacaaccaaagccgcttcctctggaggaggaagtccaggggtgccagggttccacttgctttcttcttcacccagcctaaagggcaattttcccacattccctcagaaccaggaagttcccccattcacactgagcctgttcatgacaaaaaaaaaggtctctccgatttcctctgctcaaccagttccctggctacctgaggccctgcttcacctggaggaagacagtggtaagtttccagcatctccaccacacctcagcgccagaggaccctcagcctccctcgcacacctctgggcagtttggtaactcatcccatctcctcctgccgcttcatcctctaagccctccccagggaacccaggaggcgtctggaacctgttggggacagtccctcacacctgccccattgagtaagggttcatgtggatgcccatcctcccccaggagtcccaaatctaagacactctgagactcctgtcacccacccccaccttacacagccggcctttctgtgcagtccttccaggaaactctggctggacctgggctctcggcttgactgcactctccccaagtccccagggcggccagtggtgactattcttgaaaacgagcttggcagaggatctggggacacgcactccagatgcaaacacgtttgcactctttgggctggaatcccctcgagcggtacactgcacccgtgggcttgctaagaaaccacctcacagagggcagattgattggacaaaaggcatttggtccccaaattgattgacgtgtgtgaatgggagttttcagaacaaagacccaaagatatgggggaaacaggctgggcgcggtggctcacgcctgtaatcccagcactttgggaggccgagggggggcggatcacgaggtcaggagatcgagaccatcctggctaacacggtgaaactccgtctctactaaaaatacaaaaaaattagcgggggctgtggcgggcgcctgtagtcccagctactcgggaggctgaggcaggagaatggcgtgaacccgggaggcggagcttgcagcgagccgagatcgcgccactgcacttcagcctgggtgacagagcaagactccgtctcaaaaaaaaaaaaaaaaaaaaaaaaagatatgggggaaattgccatttctgatgcttaggctcaacaaagtatggacatccatgcgggaacacagatgaaccaagggacctgcactaatgctcctggaccgcaaggggaagcgcagcgagggctgttggtctagatttcttgaactttctgagcagcattccttccttctgggcatggagcaggaccctcctggaatggggtcttatgccctacagtcaaacaagagaggtcagataatttatggccagcttctaaacacaaaggtggagggaaagttagagcaatatttttaggtttgatgtctggctgtgtggaaaggcggggttctgatttctatgacctgccctggggaaaatggattccagtttctaaggccagcttcggggaaaatggcactgagagacaggagagcaagagaaggtcagagaaacactttttcttccgaagctgcttctgaggccttcattttggggtattgttttctgatgcccaacatatctgagctgctgaacgaagggtagctgctgaaccactcccacggtgacttggaatggcttagccagccggccttgggccacctggctctggcccccctgcccaccaggactttggccggctctcgctcgcctctgcgatgtccgtcccaccctgtctcacccctgcagttttctgctctgtggagcgatgattgacacatggcagggggacactggttttgacatttgagcctgtgcccagcccttgcctggggaggaggtggggcaggagtcctgaatgagcatctccctacttagtgacagtcaggggcacggagaatggtgcccaggccaagggcagggcttgggccaagtgtgcgcagcgtggggtgtgtgtgctccagcggctcctgctgcggagggcggcatgaggcttgtttacctgtgtgctggcatctctggtggcccctgcaagggtggggaagtggcaggcagggtgaaatggggaaaagtgggctctcaactgctcctagcagcctccgggtctggggagggaagtgaggaggggcccagagctgtctcctggtcactcttctggggctctgtgcagacctttggcagggccaggctacaccacaccctctacaacctcccctgacttcttcccctaacccctcaccaccattcctccgcttttctctccccgcccctgcctcccctccattctctccttccctccacctcccggtcccatcccctgcccacactgcccctcctcaggcccaaagtggacaccggtgctgcctgagggtcagagtgtccacctccagcagcccgggcaccgggcaggattcaagctggagggggctggggcgggcgaagccgggcacggggcgagcccgctggtgggcggggcaggggcgggtccttcgaggggaggggcgggctcggccagtgagagcgcagaaaccgtggcacgggcgctcccggaactggcgattgcaaagcgcgagggctggaactcagacccagaggggcggtccctgttgcaagtcatctcccgaaagggcggggccggggctcatcccggaaggaccggtgtctaggtcaccctggagcgctcaccccaccggcacccgtgcccaagcccgcccctgcaaaggcaggtactcgagcacactccggagagggcggcctctgagccccgaaccccgaactccggcgcagcgtcgcacctctgcccaatgaggtgcccctgacgtgcctgctgcggctgccctgctccccccagcctccctgcatcccgggatgggggagggcgccaggcgcagctcccggaccctcaggggtctccccgccctaccccaccagcctgggttcggtacctcggggctcagatgtgcagtcagctgttaatgtggcaaaatttggggaagtcctctgcagccgcaaaatccagttcccaccagttggaggccgggcggggaagggtggggacagacagcactccgctgtgggaggtaaggcagagctactggggagcctggaaggctgagctatgtctcccctacgcaagaccattccagaagccccttggagctctggctgctggccacaggggaaggtagaccttccctgagagctgcactgtgttggggacagggccactgtgggcctacggagggcctccaggcacagggacccacatcagccctctggccacagaaggcgctgatgatttgaggtggactcagccaccactccgagcctctgcctccctctaaaagtggggcatggcacattcctgtgtcaggcaaccaggcactgagcctggcccacctgcaggggtcggggggagcagcttgtccctgtctcccctccccgggaggctgtgtgcctggagaccagagctgtcaaaagtggaggagggggaccccctgatgtgtcctctaaggtccaggtagcaggagagctccactggggagggggtcctgcagtgctgtcctctcttgcaggcaaggccaggcgggtgctgcctgggacccagtgactcagcacccctgcccggatcaactggacttttgccccctgctccgccagcctcctgcttggatctctcctgggtctccctgctgcgcctgtccaggatgcagggagctcgggctcccagggaccagggccggtcccccggcaggatgagcgctctaggccggtcctcggtcatcttgcttacctacgtgctggccgccacagaacttacctgcctcttcatgcagttctccatcgtgccagtgagtaacacaccccagcccctgcagccccagccagggctgaaccgctgttcctcctgccctccatctgggccgtcgcagagagtgggggtgggggtttcatgctgccagggcccctcccagttgggactcatgccacgcttaagctgagtaagttaaggactctgcctctggacccccgtcagcacatcctgtgctccagcttcagtgccagccccgggagaagccatggggagccaccccacttccctcctgggggcagcacctcctcaaaccttcctagcgctgttcctcctgcctctcacccggcagcctttgccctctggagtccctgccccaagggctgttcaatccggtgtggctctgggcggatcacccctcagagaggctctccttgcacctgcccgcagcttctatctctcccctccatcttcttgggtccttgttgtccactaaatgatctgtggcggcaaattgatctcaagctttttcttgcaagagatagaatgctgtcttattttattatctctgttgccaaatgcggaaacatttcattggcaaattcatgttagtttagtgtatcattcagtagtctataccacagtgtgtggctctggaagctgtaatagtaatgattaaattatattcaccaagtctggagaggcttgggaacaaagtctcacatcaccaagaagctcaggcagagtcagggccaacctcggcccttcctgtgtttgcttctgggaagcccggcgtgcgtgggctcagacagctgccctcctcctctcagccctcagagcctggacctgggcatctaggcgggagtggggatgg

SEQ ID NO: 5609 - DNA, 6000 bp, Homo sapiens
caaagttcttctgcacccccatcggcctgtgacacaggagtgccgtcatcccaggggggtccggtgtggggtcagggaacctggcccgtctgagcccatggcgtctgagagggggcctgggtcactgtggggagagcccctgtacacacacacactgtacctgccaaataccggcccgcccagcagctgcagcaccccgaaggtggtttgcaggtagccgaaggcaatggaatccaggcccagtttccgagacaggtactgaaacacaggagggagcccgggggaggggctgggaaagactgcagggcctagaatctggggtccctggatgggcagggggtgggaggggaccgagggcctgggttctgttgactgcacagtatgaccatcgaggggcccttcccagggggaccctgctcctcttctcctaggcggaagcctgttgtggtctctaaggtccttgcaactcctctcctaggcgggagcccagggtggcctctagggtccttcccctctgggggcacgccccagagaggcacctgacccccaccattttgtcttcattcattcaaaactttgtgggggacgccagcagcagtgtcctggccagcaacagattgtcccaaggcccccaagtgacctccaagaggtggcccattgcccagcaggacacagtctgctctgtgaggccccagcccttcagcccctccggaggagtaggtccatgacagcatccctcccagggacacccttatatcctgccctaattctctgtgatttggtccccctgcagccgctcctccccctgcccctgcctctgagttcccgactctccttccagtgatgtaacttattatgggcttcattgtgtaccccccaaattcatatgtcttaacctccagaacctcagaatgtgacattcttaggaaatggggttaatcaggttacagtgaggacatgagggagggccctgatctaatgtgacccgtgtcctcattaggaggagaatttgggacacagacacactcggatggatgacgttgtaaaaatccatgggaagacagagtgatgtggccacaagccaagggatgtctgggctcccaggggctggaagaggtgggaaggatcctcccccgtgggtttcagagggagccttgatctcagacttctggcctcccaaactgtgagacaataggcttctgttgctctaagcccccagggttttggatactttgttatggcagccccagatgctaatacaccgcccccgccccctcccctggacctttccctaagctcagtcttggggtcccactccccttctttccactgtcccccttggtccacacgaattctccccagagcacttcagtcccaagggcagtcggtaacccccccatccccaaccccagactccttcttccttcagctccatccctgctccctcgaggatgggaaagccctctgtctgccagatctctcctttgtttgtgagcttgacctgacaatcaccccacattcccctagtaaacctctgcctcctccatccctcccctccccagcgccgctagtgtgaggatgctgagcttctctttttttttttcttttctctctttttgtttttttattatactttaagttctagggtacatgtacacaacgtgcaggtttgttacatatgtatacatgtgccatgttggtttgctgcacccattaactcgtcgtttacattaggtatttctcttaatgctatccctctcccctccccccaccccacgacaggccccagtgtgtgatattccccgccctgtgtccaggtgttctcattgttcaattcccacctatgagtgagaacatgtggtgtctggttttctgtccttgcgatagtttgctcagaatgatggtttccagcttcatccatgtacaaaggacatgaactcatccttttttatggctgcatagtattccatggtttatatgtgccacattttcttaatccagtctatcactgatggacatttgggttggttccaagtctttgctattgtaggtagtgccgcgataaacatacgtgtgcatgtgtctttatagtagcatgatttataatcctttgggtatatacccagtaatgggatcgctgggtcaaatggtatttctagttctagatccttgaagaatcgccacatgtcttccacaatggttgaactagtttacagtcccaccaacagtgtaaaagtgttcctatttctccacgtcctctccagcatctgttgtttcctgactttttcatgatcgccattctaactggtgtgagatggtatctcattgtggttttgacttgcatttctctgatgaccagtgatgatgagcattttctcatgtgtctgttggctgcataaaggtcttcttttgagaagtgtctgttcatagaggatgctgagtttctcatccccaagcctgcccacctgtcctcgcctacccaagtcatcctccctgcctgcgtcacatcccaaccttttgcctcctcaagggcagggctcccaatgttcctctctccgtttctctgcacagtccccttctgtgggggcacccactggaccaagctcccagtgctcctctctccccgtttctctgcacaatccccttttgagggggtggcaatggagcatgctcacatcctgttacttctcttgcgttctcttgaccctcccctacagctactcccacatatttgagggcggagctctgagcagctgcctcaccttgcagcctcctctctttccatctctttccttctctcccagccctcggagcaggccccaggggactatactataaagacacatgcacacgtatttttatcgcggcactgtttacaatagcaaagacttggaaccaacccaaatgtccatcaatgacagactggattaagaaaatgtggcacatataaaccatggaatactatgcagccataaaaaaggatgagttcatgtgctttgtacatggatgaagctggaaaccttcattctgagcaaactattgcaaggacaaaaaacctcctgctgtctcccctctccctgaggtccccattgaccccacactgctgcctccagtggtccgctttggcaggcctcccactggagtgacagttgccttcgtggcttcttccctcctccacgatggtctgctgctctgggctgtgctgggtcctttgcccctcctccatcaccactgccagttcccccagctcatccgacctccagcctccctgccctctgggggagcccagcccatgaccgtctccatgctgcagggccccagagcctctgtgctgaactgccttgtgtccagctcccttcggctctccactggggtcgaaaatcgtctcaaactcaacccgtccccaactgggctcccatctttccctctcctcctgtccatgcctccttccttatgggctcaggcccagatcttcagtgctccctgagccctgctttctctcacacccactacagtccattgacaacacatgcaaaatccagccacctctcacctcctccacagccatcaccagcccggagttctttgagcagcaggtggggtgtggtcccattctggcctcaaccggtccactctagccactctgctctctccactgccccggggcctctcctgcttccttccagccctgctccaaggttgccttctctatgaggaagacctcgcccccttcccactgcagcccctgtgcgtgtggacccccagctccgagggagtgggctgttgaggatttttacactctgcaatatttcaggttctgacatcagggtcagctcctgggcactcagcacggagttactccccatgagagtcgatgggtggctgaagccactccacctgtgctctgtgcccagctgtgggaagggttctgacttctcattcactcttccccgcaccaatcctacagggagggactgttattacccattttatgatgagaaaagcaaggctcctgcccagccttccccacgggtagggaggagattcagggcttggccccagccatttagcaggagtgggcggggcgcctgaggcacggcggggagggatccttaggctcaccctcgggctgggagcctctgccaggcccggaatggtgccaaaggcccatccccactcccgcctagatgcccaggtccaggctctgagggctgagaggaggagggcagctgtctgagcccacgcacgccgggcttcccagaagcaaacacaggaagggccgaggttggccctgactctgcctgagcttcttggtgatgtgagactttgttcccaagcctctccagacttggtgaatataatttaatcattactattacagcttccagagccacacactgtggtatagactactgaatgatacactaaactaacatgaatttgccaatgaaatgtttccgcatttggcaacagagataataaaataagacagcattctatctcttgcaagaaaaagcttgagatcaatttgccgccacagatcatttagtggacaacaaggacccaagaagatggaggggagagatagaagctgcgggcaggtgcaaggagagcctctctgaggggtgatccgcccagagccacaccggattgaacagcccttggggcagggactccagagggcaaaggctgccgggtgagaggcaggaggaacagcgctaggaaggtttgaggaggtgctgcccccaggagggaagtggggtggctccccatggcttctcccggggctggcactgaagctggagcacaggatgtgctgacgggggtccagaggcagagtccttaacttactcagcttaagcgtggcatgagtcccaactgggaggggccctggcagcatgaaacccccacccccactctctgcgacggcccagatggagggcaggaggaacagcggttcagccctggctggggctgcaggggctggggtgtgttactcactggcacgatggagaactgcatgaagaggcaggtaagttctgtggcggccagcacgtaggtaagcaagatgaccgaggaccggcctagagcgctcatcctgccgggggaccggccctggtccctgggagcccgagctccctgcatcctggacaggcgcagcagggagacccaggagagatccaagcaggaggctggcggagcagggggcaaaagtccagttgatccgggcaggggtgctgagtcactgggtcccaggcagcacccgcctggccttgcctgcaagagaggacagcactgcaggaccccctccccagtggagctctcctgctacctggaccttagaggacacatcagggggtccccctcctccacttttgacagctctggtctccaggcacacagcctcccggggaggggagacagggacaagctgctccccccgacccctgcaggtgggccaggctcagtgcctggttgcctgacacaggaatgtgccatgccccacttttagagggaggcagaggctcggagtggtggctgagtccacctcaaatcatcagcgccttctgtggccagagggctgatgtgggtccctgtgcctggaggccctccgtaggcccacagtggccctgtccccaacacagtgcagctctcagggaaggtctaccttcccctgtggccagcagccagagctccaaggggcttctggaatggtcttgcgtaggggagacatagctcagccttccaggctccccagtagctctgccttacctcccacagcggagtgctgtctgtccccacccttccccgcccggcctccaactggtgggaactggattttgcggctgcagaggacttccccaaattttgccacattaacagctgactgcacatctgagccccgaggtaccgaacccaggctggtggggtagggcggggagacccctgagggtccgggagctgcgcctggcgccctcccccatcccgggatgcagggag

SEQ ID NO: 5610 - DNA, 6000 bp, Homo sapiens
ggtttctgcagagagatccgctgttagtctgttgggcttccctgtgtggacagacacttctctctggctgcccttaacattttttccttcatttcaaccttggtgaatctgactattgtgtcttaagattgctcttcttgatgagtatctttgtggtgttctctgtatttcccaaatttgaatgttggcctgtcttgctaggttggggaagttctcctggacagtatcatgaagactgttttccaacttggttccattctccctgtcactttcaggtacaccaatcaaatggaggtttggtcttttcacatagtccatatttcttggaggttttgcttgttccttttcattcttttttctctaatcttgtcttgatgctttatttcattaagttgatcttcaatctctgatatcctttcttcctcttgatcaattcggctattgattcttgtgtatgcttcatgaagttctcatgctatgtttttcaactccatcaggtcatttatcttcttctctaaactgatgattctagttagcaattcctctaaccttttttcaagtttcttagcttccttgcattgggttagaacatgctcctttagcacagaggagtttcttattacccaccttctgaagcctacttctgtcaattcatcaaactcattttccatccagttttgttcccttgctggcaaggagttgtgattctttgcaggagaagaggtgtgctgttttttggaattttcagcctttttgcactggtttttcctcatcttcatggatttatctacctttggtctttgatattggtgacctctggatggggtttttgtgtggacattctttttgttgaggttgacgctattgctttctgtttgttagttttccttctaacaggtccctctgctacaggtctgctggaggtccactccagaccctgtttgcctgggtatcaccagcagaggctgcagaacagcaaagattgctgcctgttccttcctctggaagctttgtcccagaggggcacccgccagatgccaaccagagctctcctgtatgaggtgtctgttgacccctcctgggaagtgtctcccagtctggaggcacaggggtcagggacccacttgaggaggcagtctgtgccttatcagagctcaagcactgtcctgggagatccactgctctcttcagagctggcaagcaagaatgtttaaggctgttgaagctgtgctcaccgccaccccttcccccagatgctctgtcccagggagatgggagttttagctataagcccctgactggggctgctgcctttctttcaagatgtcatgcccagagaggaggaatctagagaggcagtctggctacagcaggtttgcgaagctttggtgggctccacccaattcgaacttcccagcagttttgtttacactgtgaggggaaaaccgcctactcaagcctcagtaatggtggatgcccctcactccaccaagctcaagcatctcaggtcaatttcagattgctgcactggcagcaagaatttcaaacccgtggatcttagcttgctgggctccatgggggtgggatccactgagctagaccacttggctccctggcttcagccccctttccaagggagtgaacagttctgtcttgctggtgttccagacgccactggggcatgaaaaatcctgccgctagctcagtgtctgcccaaacagccacccagttttgtgcttcaaacccagggtcctggtggtgtaggcatccaagggaatctcctggtccgtgggttgcatagaccatgggaaaagcatagtatctgggctggatagcaccattccatcaggtcctttaaggacttctctgcattggttattctgacctaaaaccacaaaaaccctagaagaaaacctaggcaataccattcaggacataggcatgggcaaggactacatgtcttaaacaccaaaagcaatggcaacaaaagacaaaattgacaaatgggatctaattaaagagcttctgcacagcaaaagaaactaccatcagagtgaatgggcaacctatagaataggagaaaaattttgcaatttactcatctgacaaagggctaatatccagaatctacaaagatctcaaacaaatttacaagaaaaaaacaaccccatcaaaaagtgggcaaaggatatgaacagacacttctcaaaagaagatatttatgcagccaacagacacatggaaaaatgctcatcatcactggccatcagagaaatgcaaatcaaaaccacaatgagatactatctcacagcagttagaatggcgatcattaaaaagtcaggaaacaatgggtgatagacaggatatggagaaacaggagcacttttacactgttggtgggactgtcaacgagttcatccattgtggaagacagtatggtgattcctcaaggatctagaactagaaataccatttgacccagccatcccattactgggtatatatccaaaagattataaatcatactgatataaagacacatgcacacatatgtttattgtggcactattcacaatagcaaagacttggaaccaacccaaatgtccaacaatgatagactggatgaagaaaatgtggcacatatacaccatggaatgctatgcagccataaaaaaggatgagctcatgtcctttgtagggacatggatgaaagtggaaaccatcattctcagaaaactattgcaaggacaagaaaaccaaacaccgcatgttctcactcataggtgggaattgaacaatgagaacacatggacacaggaaggggaacatcacacactgaggcctgtcctggggtggggggaggggggagggatagcatcaggagatatatccaatgtaaatgagttaatgggtgcagcacaccaacatggcacgtgtatacatatgtaacaaacctgcatgttgtgcacatgtaccctagaacttaaagtataatttaaaaaaaaatctaaggcctcaaactatgaaactactacaagaaaatattggggaaactctccaggacattggactgggcaaaaatttctttcaaatattccataagcacaggcaaccaaagcaaaactggacaaatgagatcacatcaagttaaaaagcttctgcacagcaaaggaaacaatgaagtagagagataacccacagaattggagtaaatatttgcaaactatccatctgacaagggattaataaccagaatatacaaagaactcaaacaactctataggaaaaaaatataataatctgattcaaaaatggacaaacgatctgaatagacattcctcagaagaagacatacaagtggcaaatggatatatgaaaatgtgttcaacaccactgatcatcagagaaatgcaaatcaaaactacgagatattatctcacctcagttaaaatgtcttttaaccaaaagaaaggcaataacaaatgctggcaaggatatgtagaaaagggaaccctcatacactgtcaatgggaatggaaattagtacaaacactatggcaaacaatttgaaggttcctcaaaaaaaaaaaaaaacctgaaaatagagctaccatgtaatctagcaatcctactggatactgctaggtatatacccagaagaaatactgttaggtatatatccaagagaaaggaaatcagtatatcaaagagatatctgcactcccatgtttatcgcagcactattcacaatagccaagatttggaagcaacgtaagtgtccatcaacagataaatggataaggaaagtgtggtacacatacacaatggagcactattcagccataaaaagaaggagaacctttcatttgctacaagatggatggaattggggattattatgttaagtaaaataaaccaaacacaggcaaacaaacaaattgttatgttctcacttatttgtgggagttaaaaattaaaacaatccaactcatgaagatagagaggatgatggttaccaaaggctgggaagggtagtggggaatgattaatgggttcaaaaatacatgagagagaatgaataagatctagtattttatagcataacaaggtgaatacagtcaatgataatttatcattttaaaataactaaaagcatataactggattgtatataacacaaatgataagtgcttgaggtgatggatagataccccacttaccctgatatgattattacggattgtatgctctacctgtatcaaaatatttcatgtaccccacaaatatatacacctactatagacacacaagattgaaaattaaaaaaattactttggtaaattttatgttctatatttttacgattaaaaataaaaataatataacctgagaatgtccctagctcagtgacaagaacacagttggttgtcaaatgtcaatttccttctcaccactcactggtgggacactcaccttggggtcatgcgaaataaatcactcacctgcaggcgttaaaaaatattagtcacatcagtcacatgaaaataattagcttctggaagtaagcagatggtggcacgcgaggaagagcaccggccactcttctctgcatcaaaacttccttaaaagcatcttccagacatggacatagcgtctaggtgtggagtgatgaccagtgtcaaagaaagcagcccggactcccccgtcttgtagatattttaccaaatcagataatgaagacatgggagggagcgcgcaaccaggaccacgggctactgagtttccactccttcccagtctcagagaagcctcctgggcatgcagagcctctgaagcctcccccagctcaactctgacttctcttctcagccgcatttctccacacaccctttcaaggctctgctcctcccactgctcctccctcactcctcccacggctcctcctcctccctcccctttcctctcagacttgcttctgagcggaaactgaaagtgaaatagggagctggctaccagcgttgagtcccctgtaaaggtgagtgaaccccactagatcaagggacccctgccctcctaggggacctctctcccctgccccagggttgcagagccccttccagtctccatccttgagccggtcccatttgccccttctcccaccagggatccctcaacccaagaccagctgcgcttccggtgctggccccctgcttgggaggaggctggggtgtggacctgactgccgagttacccagaaggggaaggggcccggctgccccctacctgggaggaggctgggttgtggacgtgactgtggagttacccagaaggggaaggggcccggctgcccccatgctggcacctgacctaggatgacggctgggtgtggctgggatagccaggactacagcctagccaggagggtagggagcccagtgtcggggaggtctgcaattctggagactcccaggtccaaaagtcctccagaggtgagaggggcaggctgtttaggatgttcaaccagaaatgtataggccttcagaattattctttgtcctagaataagtgttgtcaggaactaaactaagtttggagcagctgagaaaagagcccagggagtgctggccacggttcctgttactctgtgtgtatacatacatatacacctacatacatatatgcaactgacttccgccgttataggagggattaatgaagatatattcaaagcatgaagtatctctggcacatggaaggtacatggtaaaaagtagctataatttctcagcaacatggaggcctgttggtacccgacaggagatggatgagcactgagggtttaagcaggaatggacatgatgagagtagaactgtcaacagctttatgaggttcttgccaattttcattccctcttttagggactcagtttctccttctgtctcactggatcaatggaccaaacaatggaggagttcttgttattcagaacaggaataaac

SEQ ID NO: 5611 - DNA, 6000 bp, Homo sapiens
gacacagcgagactctgtatcaaaaaaaaaaaaaaaaaaaaaaaaaaaattgtaggcatggggtcttgctatgttgctcagtctggtctcaaactcctggcctcaaacaatcctcccaccttggcctcccaaagtgttgggatttcaggcataagctaccgcatccagccaaagcttttttttttttttcccccaaagtaacttttgaaggttggatatgatccatccttattatgatactgatggaaaagcaggcccagagagcctgggggctagagagtggagtgcaggtgtctgtactcatattttaataggggtgcagggcctcccatcatccctggcctttgccgtcactatagctgataaagttctaggccggaactagcttgacctctacactttcttatgatttccaggtgactcctgggattttcttctggcagttttgcctggggaaaaagggagcctgcacccccaaagccaggcagtcattccctgggcacacagtgactgaacaccttctgcttcaagcaacgtcctaggcttttgaaggcagaggggaggaagacttgtttctgcactctgacatcctggggctccttggggttcagagaccctgggagagactgaggggttggtgattttgagtgtggggtctccaaggctgcaaattgcacttgcttagtggtggttttgtgtgtgttgtgtcacgctcctgaggttgccgtgtgcgtgaatgtgtgtatgtatctgtgattttgggtagtggcgtgagccaggtgctcaccaaatgcagtgctgctcagccaggtgtgcacgcatgggactgacaggccccgagtgtggcgctggcatcccagctgccctggtgttcctcctccagaggggggagcacacaggtgcggggtggaagatccacactcccagtgtgctgctcctcgcttttgggccccaccgtgagtgtccccggcccctcctggcgctgcgtcggtgctgcgtcggtgcgtgctggctgtcctccgcgtgtgtgtgagcgccgggccccgtgcgtgtgtaggctgggtgtgatgtaatactcagtgacacagcggctgctgttccattcgttcacaccacctccgcgtttctcggcccttctcacccctcccccgtgcggcgtttcacgattactttctcctcccgagtttcttagacccacgtggggtggaggagcaatgtctctcacccctcatctgaaccaggcagaggtggagtgtggaagcacagtggggaccctgagtgggtttcatgagggttgaggtttggggcttagaactggagatttcaaagccgcaaaggtcccctcgattcctctggttcaagcatcagttctactgaggtgatgactggagctcagagagagcaagcgacttacccaaggtcacacagcaaagtgttggcagggaaagggccagaaaagtctcttgatgcccagccagggcacttcccttcctatcagagtcaccctctgatctccacttccctaaggacttgacaccaaaagaagccaaatccttctctgatcccttaatcctaccccttatccacaagctcaccagagtgtgagccctgatggccgctagcccctggaggattacagagctttcccccagcctccggactgaccgctgccccaggagagacagagggaaggatgtgcaatctcagaggcaaggcccattcccctggcatcagggttccttccggccttgagggtaaactctgcaggagctggcaagggtgcctactcctctttctctccctagactctcctgctccccacctgcccacattagactacttctcttctctttccccactctccttccatcttgttcccatgtctcccccaaccagggctcacctcccccagcccatgatagtggtccctgcaggctctctgaagagcgaccccgtgctgggggctcctccataacagctgctgcataacagtgactctgttgccatttctggcccttgccactgccgtgcaaagcagctgtaacccaaggagctcatccataattcacgcagcggctctcactggaggcaaggaggaggggaggggagggggctctgggcttcactgccccaggcctgctggggctggagcgagcactccagggcagaggtggtgggactggggggttgggggactagagagctgtgcctttccctctctcccccgccctcagtccctgccctgcccagtgtgtgcccttttctttcttgccacgtcccttccccaccccctgttctcactcctcctcagcaccaccactccttccctccaggcccaggcctcctgtctctcccgaggaccacggctccactcctggccttcattttgtgaattcccggtggagactggggcaagatgcacagagtatcagagctggaaagggggatacctcggtggccacctagagccgacccctcacatcataggtaacaccattgagggctggggaggggaagtgtgagtttctgagcaccccaggcctcctgaccaggtctctacagctcgccttcattgtctttctcagaagccttcatttcatccctccactacttcatggacagaggaaagccctttgtagcagcctcccccaccctctctgctcaccccctcctctaaagtcagcaggggatggctagagctgcaggggagagtacagcagggtaggaggaaaccaagaagcacctattttgtcctaggcactgcatttgtacaggttaacttctttatacattgaacacaacacacataatcccctggaggtcaatattgtggcccccaatttgcagatgaaggaagggagccccagaaacatgacacagtggcctcaggtcatgcagctagtacaaggtggaacccagattggaaaagagggacatcaagcccatgtcagagagacactctgatctttctttaagaggtggccacatcctccgcagaaaccacgcctgaatgtgtgagacactgcccttgaggtaaagacaggagagaaattgcacccaggtgcctagggctgggccagccacaatgctgagtctgtttggctattcagggtcaaggcaaggaagggactccagctctctctgcaactttcacctcctaggcttccagttgcggttgttctagagtagtgattacatgtgggagtcaagaagagatgacccctgtccagaatatatggccagaactgaccaggggagggagccaagagaggccagaacatggtattgatcccggaaggctgaagtgtccagagccaaaagtatctgttcactgagggaccactgtccaggactctggctatcaaaccttggagtaccaaggctcagaaacaaagttctcagcccacaggccactctttgggccggaggcccctgtagaagaaggaacttgaggagaagaaaactggacccaaagtagggggcaggatccaggctacccacccacagggcagagtcgctggtgcagagtggtcccaggaaaggatgctccctggaaaggcagcagaggcctctcgctctggaaggaggggcacagggtcccagacgagaagcaagggctccacacccaacgggctgcttcagggaagggctggggcctgcgggcagatgctgagggggcaggggctgaggaggtgggagctgaggagtgggatggaggtggtggtgatgccagtgacgcaggggcctggggaggcactgacgcgggtgacggaggtttagagctgctgcaaacagcttctcactctgccagaatgtaacaccccaaaataagcagccaccgtggtggcggcagcggctgcagaatccaacgtccaggccggataaataaatggcagcacaggagccagcctgtttgcccaccctcggaggctgtcactccccttccaaagtcctcaccctctgtccctcacagccacccccagggccctgagctcaaagcaccccccatctggcccaccagccactccctgagagaagaaatgtggcaggcaggcgctttgggaatggagggcttcccacgtggaagtggttaccagaagcctctttgtctcatccctgggcagcacccccaatccccagtccctctctctcagcctttctcttcctcctcctcttccctcctctccagcccctctcccatccatggttccctgtctccaaccctcttcgccggttcctgataccccttctctagtcaccatccccatccttctctggtttctgatctttccattctccttttccattccagtccccagggtcccagtcctgattctctttcccgctacctccatcccaggattctgggtccctgtccatagtcttcttcccatccctcccctgatctggtctttcctctccttccctcttccttggtcttcacctgggtcccacttccctccacgcttttcccatctaacctttattccttctccccctcccccgctccatctccctcctcctttgagcttccctcaccactttctccatctttgagttctccttcctatccctctccccctgacccctccccaccccacccccagtctctggcccacacccttatctgtcactcaatcagtagaactatcctctttctagcgccctccatctctcctaccagagagggccacttggatttccctctgcgcctcctacctccccagacagccccctacccacatctcctgtcttcccaggtggccagaaagtgctgaggcaccgggcaggaggagttgctgagtcggcgcttccccagccggcccgagtcctcagcgtcccccggagcaggtggagcggggacagcggaacctgagcctccctccccgctccgggccgggtccacctgccccctgcgtcccacctcggtcacgagctcctcgcacgcgcccgcgggctcccagccaagtgccctcctgctgagaacagccctggcggcgggggcgcggccccagcgctgagcttttccccttccccaggttaccccacctccccaactgccccaccctcaatccctgaaagaggggacgccctgcttctctccccaggatgccctccgctctcccgccgctggcgttcttaccttgcagcaggcgcctgagcccgggcagcatcttgtctcgatgctcgggggagggggcagcggggggagggcgctcccactcgctccctgagcccgccggatgcacggcggggaccccgcggggctccgggagggcccgggagtccccgggctgcgtggccgggccgcggcgctctaccctgcgccgcccgggctgcgggcctcgggaggagccatcggccccgacgggacggggcggggcgcgacggggcggggaaggctggggctggccgtcgacgcccagcgcccgcgccccgctagctgcgctgtccgctcgagagtccgtcagtccgtctgtccgtgtgcccaggctgctagccgagggagagtggggacagcgaggaagctcttcccaaccacccccactccttcccgcactcgctggctcctccctcgtttgctggcttgccgacttaaccctttctcgaccactaggaggcgggagcggctttctaaccccctccaccccgcccccctcccccccgcttaagcgacccggaggactgtgttcgatcgtcctcgcggcgccactcttctagagaaatcccttcttgggggaatgcggtagtttagaggaacgccgtggacttgtcctgttcccccctcccaactttccaggagaagatgagcttctgggtcaccccctcccccgcccccagccgcgtccctcgcgccagtgtcccagcctccagcatttctgtcccctgggacagctccaagattccacttttccttccactcccagacctcaagcccagtgtgcgactataagaatagtatatgcaagagtttgtgcgtgcaagatcgagtgcatatga

SEQ ID NO: 5612 - DNA, 6000 bp, Homo sapiens
ttgaaggtcacgtcatgcaatcatgcttatattctacacaaagctgtcgcccagccatttcctaaacctctccccccatcaatgaaatgtgcagcacttctagaggcatctgagagtagatgtgttagaaatgaagggcctcaaggcactgtctcccagcagcttgcacaaggtgacacccatagggtacccaagccacacagatcacactcatccttcttccacagtacaccattctgcactctgaacacagattcttcctcatcacaaaaataacataaaaaagaatctgaggcacacgcaatataacctgagcttataaatcaagtgggacaacttacctatcatgacgatgtgcatcctttactgctatcatcagaggcaggtgtctgggaggtggccaggacaggcctgacccaggacagcacttgtatcattaaatggcactcagagggcgcacttccaagcaactgggacccttatccagaacactccgtccattccctcagcacagccactctgggagagttccctagtgtgctctggcacttccttcactaaattcctatggagcacttgttgagggcaagacatggtagaagacaagaggaaggaaaaatgagggctggtgaaaccactgattctcccttctctggctcccaccacacagcctttctagcccaaactcacaattaaactgtcttttgctgtgtgtcacttattttccccctacccagctgaatctcagaggaggcacacctgcagtattttagaaaggctgactagaagtatcaggcctaaccagacaggtgcacattttagttcttacattcaatccttagtatctcactgtccaaaagccttcaaaatgctcccaggcacaactcagaagagtctccttgccactccctcaggagggtttctgcttgtaattctcactatcacagggcacatctggaccaatgagtggctgccgcaaagactaccaaagttgcctccaccttgaccatggcaccagccttgccatgcccctccagaccacatcacttctgcagtgaccctcaacctgtgattgtgggcagccagaccaagatctggtgaatgagcaaggcagagtcccttctgctctctgtccccaacacagtccccaccagcccaggtagccccacaccagtgcctaccatgcaggacctgcgtgaactgctgtgggagggaaggggccagaacctctgaggagtggacgcttcacctgcagccaccatgctggcacccagcagggcttgataaagatcagcctgctgctatgcccatgggtctctgtggcccaggcaggctcagtccctcttttctgagaggagcccagtgggctgaactactaagagaaaaggccaaagaccaaacggaagcctttaatatgaagccaagtattttatcatatgaggacattccctctctctaacctacaacactcccacccccacagagaacctgctcttaaatctaaagcacaatccatgcacatttcttgatttaatagattttctttaaagtaaaaaatcatttatttaaaggaaaaatcgccacaaagtttcaacttgaaccctattttatcaaacaacagttgacagaaaatttaatttttggaaagtaactggaaaatataatttattttacgcttgaggggattttatatcaaaagagatgaattcttatatatactagtttatcatacaggtggaaaaaggaaaaacatgtaattacagctgattttctcgtttctaattttatacacacacacaccacccccccaacacaaacaggaaaacaatgggatttgctatgccttctttcatgtggagcccctggacccttactttggctcccacctctccatgtgacggtgccactaaagctccagcagccacatgttgtctcacacgtctcagcttcagccaacactgctccacacacttggaatcctgcctcaggggccaactctgccctgaaactctcactgttcatgagtcagaagaaacccctccttctgcctttccacagcatcaggctttagtacacacttctgacactgcccaggttccatgaatcctgcattaggagggttatgcgttcaacttctctactagaccgtgcttccagaggaaagattcttatgtcctacgtgtgtctgacaccccattgccaaggtacagcatcatgcacataacaatcaattagcaaggtctgatgatgccaaaagctatcacctttaattcacaacaaatgtttatagagtagtttcaatctccatgcaaaacatgcatagacaggttataaagctctgtgttaagttcaacaaaagagtattccaagcaccagagagggaagcagtaattatcaacagaggaaggatgaagccatgttttaagtctgcaggccttatctcagtgtcttcccggggcctgagttcactggccaatatggtgggcaaagtgccagctccatttcaattacttcattctccctttattgctgttcttttttttggtttgtttttggctgagtgcatactactaactacacaaaattaaatgctgcatgacatgatccctcccactgtaccaactccatgtattaatctatgtacctctcccctcttctcaaaagcccttcttctggttttatctaaatgtatacctaatctaataggtcttccctggtcctgttagcttcatcccacatgtctgtcctcccctggaactcctgaaaacacttcagaaaacatgggagtctgcttgacagctcctcacccaagtgcctgccaaccttcaccagcctggagctcatagctcaacacctggctgggtgctgaattacacacagctgaatgacttacctgctaacagataccttctagtgcccaactgcatagtaaactgccacagggcagggagagggcagggcaagaacaaggtctcaaaatcctttcccatctccctcagcacacaacagtgctatgcacacagcatgagctcaaactcttgctagttaaaaccactcccaataccccaaaaatacctctcagacagcccaccaatttagacgtatctaaggcattacaggtacaggtgccttaggagtccctctagtacatgtgctagaggtggagattggtcacagagggtgactaactccttcctcctgcctttctgtcccaaccaggtacccaagacttgcacctccaagacagggatcatgcctcttttactcccgggtccttggaggtcagcaccgagttcagcacacagccagtactgaaggaggaattgaccaaagggagagattatctccaggactcatgctacttggtggttttgctttcagctggaagcctcaatccactgtcaaatggaaacttaaagaacatcccgatgactatgcctgcgcaaagagcaggaaaactaaaaactattttccacaatgaatttggcaacttcctgccaagctgaacaacttagtgctgcagattgcaaaatcacactcatagtcattctttcctaatcaactattccctcaacttcacaattcccatcaccaccaacaccacactccactcacccagacatacaacctccgcagcacgtttgaccagtactgccgttcatggcctattaaatactaggtactcaagtgctgcttatttactccttgatcgcacagcaatcacccacccattttcttccactcttcacaccctctgtgcacaagacctcagccgatgccttgctctctggcacccagccctccaggccccatcctctcaccttcttcccagaccctaaatgccaccatcattcaaccagtctgtcctctgctcaaacaataacttcacagttctgaaaccatcagcctacactcttctgttccaggctgacccaggcccatattcactctcagactccaggaactctgacttatcctcctgccttggctaggagagtcactgtgtctctctttccaggaacatataacattctctgccatctcaaaaccttaacaaaggtcttactccttcttgtccaaatcccacccaccctctgacaaaagttttcccaaagtccagccgcactgggtcctctctcttcccctgccacagaactgtatttaaccctcctgcgctaccttcctgttggttcataaacactctctcctgtgtggagagtcagaacagctgatgaggaaggtaaggcacgtagccacgtgatcctgcccaaaccaccagactttccaatctcacacaactgttatgaagctcaaatgataatttacaggaaggggacttgttcatctcacatttgtaagaccgtccaagttgaggatccctctaatgcctgccaagtgcagatatttcctatcattcacaaccctagagagctaagatctcagcaaataccaattatatgtaagacactgaaagaacacacttctcatggagcaccggtcttcacatcctccatgtagccactcaggaacttctctggtgtaaaattttaggcggctggacaaatatgtaggagacaggggtgaaaaacggggacacagctattcttggcaaatctggtggcaaggtgccagttctaagggtggaacataaactataagccacagtccgatcagaggggcatgaggaacaaaagaactgaggagtagggatgcgagcagagtagaccagggtaccaatgaaacacctgggcaaagaacgctttggaccataaaactggggccactgcccttcctgacgctcacgaccatcacagctgggcgtacccagactcgggcctgtgagccgtaaaatcgcagctcaccgggccagaccggggcggccactcccctccgtcctgggcgaggcttaccaatcgagatctcctgcgcgaaggccagcgagatgagcagcaggggcagccccaccgcaatgcacgtgaccatcttgtccacagccagctccagtcgcagccccttgaacttgggctccgtgggctccttcagcaagaaatccgagaacacgtactccgtggccagttgagcgatggccatggctgcggcgcgccaggctcgaccaggaggtccgggtacagccggcgtcgggaaagctgcgcggcgccttcacccagtcaccggccgggcgcgcggctttcgctttccctttgcctgctcccgcatcccgcctgcctttgtgtctcggtgcctcaggctcccagcgactccgctgggctctcgcgctcgctgcctccgccgccggcggggcggggcggggcgggaacccgagagctccgcttcctgcggttccaccccgcacgcccgtgcaagtccccgggccgcgcgcggcactcggattcgcgcctctcccgcgcacccccaggcgcgggaaccacgcgcggaacaaagcgcttccctctggccctgcccctccgcgccgccctggctgccgaagcggccgccgggatagccctgcgctcacagccagctgcgccgcgctcttccggaaccatgcggggaaaccaagtacccaggggcgtggagcttccggaagacgcggtgacgcggggcggggtgggcgcggctgcattccgcgcccctcgggccactctctgacaaagggattttcccactgagcggcacctttggaaattctcccgtccctccctgccggattctcctcacgtcctggcacccgggagttttaaaatcatttctgcaagcgactctttctgtggatgggatggccccctttacgccccacccccaacatttccaacacggtgaaatcgggttagaaggagctgcaaaagcttcaaagaacagtcagtgccataaaaggccaatcgagcggtgtagaccgacggtgccttgcagagggagcgctggacccttccaggagctccgcgtgagagggtggcgcggaaacggtagtgagtgtggagtttcgaggcctgagtagcgctg

SEQ ID NO: 5613 - DNA, 6000 bp, Homo sapiens
tgggttcaagtaattctcctgcctcagcctcccaagtagctgggattacaggtgcccgccaccaagcctggctgatttttttgtatttttagtaagagtcgaggtttcaccatgttagccaggctggtctcgaactcctgacctcaggtgatctgcccaccttggcctcccaaactgctgggataacaggcgtgagccaccatacctggcctgttttgagagtgtcgctctgttgcccaggctggagtgcaatggtgccaactcggctcactgcaaccttcgcttcccaggttcaagcaattctcctgcctcagcctcccatgtagctgggattacaggcacccaccaccactcccagctaactgttgtattttaatagagacggggtttcaccatgttggccaggtggtcttgaactcctcacctcaaatgatctgcccatcttggcctcccaaggtactggtattacaggcgtgagccactgtgcctggcctttttgtatttttagtagaggtttcaccacgttggccaggctggtcttgaactgagatcaagtgatccggccaccttggcctcccaaagtgctaggattacagacatgagtcaccacacctggcctgaagctcatgacttatgatggactgacatctagaatacagaaaggactgaaacatgagcagaaggcttgccaaatgggtcctgacagtcaagaattagcgctcaatcattattaacatattgggcaatgtcagtggtggggagggagccaagctttgctaagaaaccagaaacttggctcctggcacaggtgggctgtggcagagaacaaaccgcataggaagaagagaacccttggagaagcagctaaaaaggcagtgagagaaatgaagatgtccatgtggctaaagagcagacaggtcaagacagcagaatgcatgttcctgcactcactcctgcataccttcagatctgccctgcttggagggcaggcactcttggccttcctcaaacacccaaggagctttccccagggatgctgagcattgctgtgcacttgacaagccaaaggctctcacctgaactgcactgagcagcaccgcacagaggaggaagggcaaaaaggacgtcccaaagacccaaagggtgagccaggctgcaccatccagcagcaagatgtgcagcaggtacagcaggaagaagacatggttggccttcatgagccccatccgctccactgtggcccgcagctcccggaactcatctgtcagctctttctgcagaagaggaagaggagctgttattcttctcatctgcaccccaatgctactggagacaagggccctctcaggctcaaggacctcccactgaggtagctgtgggaagtccacagtcctaggcaaagataccacgacaatgaggatgacaggaggaggtgccatgggatagtgcctaagagttcaggggactaagtccttgctctgccatttactaactgtgtgatccttggctgtgttgcttaacctccctgagcctgttatctcatctgtaaatgtgtaagagttatgagtttatgcttggtgcatagtaagtgctcatatgataacaatgatgataacaatgatggcagccatggtagtggcagccttgggggagccataggttgcaaagccatgctcccttgggcctgtgacctcatgactatgcaagagaagcagggacctcaagactccccagagctactactgactgtgattactatgactgtgatcccatctagactctccttccaccccctctctgtccccctcaacaaccaatagttgcgacatagcaaacacagggtcttacattcttggtgggctcaaagctgggctgctctggagacagttctccaatcaggagagagttcatatacttcttcacaaggcccttgttgatgtggaaggccacaaagggatcctgcaagtgccgggagaagatgaaaggtgagggagccagccccctggactccggcagtgttcgcaccaaaggccatcctcctgcccgccagaaggctgtacccaagttgaagtgagaggtgaagccagatggacttcctgggtcgagtgcagacttggagaacttttctgtagctagaggtttgtaaaatgcaccaatccgtgctctttagctagctagaggtaaaatggaccaatcagcaccctgtaaaatggaccaatcagtgctctataaaatggacaaatcagcaggacatgggcagggacaaataagggaataaaagctgctcccggccgggcgcggtggctcacgcctgtaatcccagcactttgggaggccaaggcgggtggatcacgaggtcaggagatcgagaccatcctggctaacacagtgaaaccccgtctctactaaaaatacaaaaaattagccgggcgaggtagcgggcgcctgtagtcccagctactcgggaggctgaggcaggagaatggcgtgaaccccgggggagggcggagcctgcagtgagccgagatcgcgccactgcactccagcctgggcgacagggagactccgtctcaaaaaaaaaaaaaaaaaaaaaggctgctccccctcacaccccccaacgtccagcagcggcaacctgctcgggtacccttccacgctgtggaagctttgttctttgctcttcacaataaatcttgctgctgctcactctttgggtccacgccacctgtaagagctgtaacactcaccgcgaaggttcatggcttcattcttgacgtcagcgagaccacgagcccacctgaaggaaccaactcctgacacagaagcacaggccatctccctaggcccagctgccttttgagggtgctcccaggtgtccacagtttaagatcaccgagtatctgctctagttagaaggatgcatcaaggaatgggaagcattggctgaggggaaccactaagaaacacctgcctgggctggcctttcccctgggtgtgtccacagacagcttttgcccaagaatttcagtataggtgagaaacaggagagatgggtggggctgtgtcgggcgttggttccttccggcgggtatggtctcactgacttcaagaatggagccgtggaccttcccgctgttatagctcttaaaggaataacactctttgcagacccaaagaatgagcagcagcaaggtttagtgtgacgagcaaaagaacaatgcttccacagcctgtaagggaactggagcgggttgcagcagctggctggggtggccagcttttattgtcttagttgtccctgcccacgtcctgctgattggctcattttacaaacctctagctagctacagagcgccaattggtgcgtttttacagagcactgattggtgcattttacaaacctctagatacagaaaagttctctaggtccccattcgacccatcaactccagctggcttcacctctcagggctatgagacttccgtcccttcttgcgggtctttcaataagtccctttcctctcttagctagggttctccaaaaaccacgaagaggaagacttccctacgtccgaactggggcacttctgcgtttcttccctttccctccaccgttgttctgggtagggctccacatttccctaagcactctggccaccccctgccccaaggcagctactttgggttgtgcaaggtaaggtccatggcgataagattcacgttggcaggtccggcagccccgggccctgtaagtgatgcggcgtgtggggcgggggccggggcggagccggcggccggtggcaccacacatacggaccaatcgccgtccccgccgcggcattcccggccccaaatcacactgcgggaagctccagcgttggtgcctgtttcgtctgcgcatgcgccgggacacgcctgcgcccttggccgcagtcagggctcccgagtggtcactctggttgacccgcgcaagctctggcctcgcccactaggctggtcgcgtcagagggtggggcgggtcttcgccccgcagcgtctaagctctgctgcgacgttatgggaacctggtgacccgcggcacactctgggacgccagggtagtggatagggacagtggagggcatcacgctgcagggcacgggatcagagggggatgcaaggggaggggacgccattctggccgccaagggggaaacgcggtgaagggaacgccccgactttcgagtccctaggactgagtccccaggactccaacccagcagagaggcgccggggccttagctctgagggctgtggtctagaaagggaagcagcaggcctggggctggggcgcgcgccgaccccgcagtgagaccaagggaagaagggacaggaccccgcgaagggcctaccgccccagagcgtaaacagcggtccgctccgcggaatagctgaagacctcgctggcctgcggctcagtggcctccccggcgattcgagaacagctctgggggtcctcgctaagtgtatgccattcccaatcccttatgtacgccagcggccgcttgccctccccggccagcgctgtcccttccgcgtcctccagtcttcacacgacgcaggggtccccaaggcagcggtctccccaagcttcccgtttcagccccatcctcgagaatgggctcctttcctgctccctctccgctcctgctggcgagtggagaccggcacctaggtccagacgcggctgcgctgcctctcctagccatcgagacaggatgtgactccctcccctggccactgaccccctccctccccaggcggcctgcatccttgctctcctccctcctagcctacccagctcggggttctgtccccgcccagagacctgaggctcggggctgcagatggaatgcacggcagggaggcgggaccctttgtttgtgtgtgcgtgttgttggcctccatccccactccccagactccacttctccaggcctctctcccgccttttcatcccgcatccgcaggacacccaatcaccgggcaacaggtatgatcaggcgcctccgggctttcctccgaattagtcggtgtttggctcggagtgcgtaactctgtctcccctgcactcagcctccggtcccgccctctcctgtgcccccgcctggctgcgctcaccgtggcatcctgcccggcgtagtggctgatgacccgggagccccctggatgccggcgggtgaactcgctgatgttgtacaccttacggtcgatcactagccaccgctcctcgcaccctgagcgctgggccacctcgtcccaggtgaagtagcgcggggtaggtccctgagccgcggtctcggcggccaccgggtcgggggccatagctggcctggcgacgccgcgcgccgggccagcaggggctgtcaggcgcgtgctcggggtccgcgggctccaggagtggatttgctggcgcgcgcccagagccagccgcctgcgcgccgggttttcagcaccgcagggcagaccggcgggcctcgcagcgcgcgttcccattggccgagcctcgtggcgcggggagcgagatcccgtcccccggtgggtcttgggcaactcacagctgggctgccaacacgcgccccctcgcgggctccctaaaggcgtcgccgccggattcgacttcctgacgtcaggcgggcatcgcggcgttggctcccagggggcgccgcggtaggaacagcggttctagtgcaggccctgggtgcggggccgcgctgcaggagtgaatggactgaggggccagggctgcggggtggccgcaggaagggtgggcggggccggggttgaggtttttccgtgcacgaggctgcccgggcggtcgcggacatcatctttaggctgtggatgccttggccggggtctccagacgctgaccctccagggttggaaactactgcctgcttgccacgtcgtgccgccaattgtgctgcccgaagtagcagcctgagagcccttgaaagt

SEQ ID NO: 5614 - DNA, 6000 bp, Homo sapiens
agatgacttttcttaaaacaaagactgattctgtcaactttattagtgcctactgtgttgtagtcactgcacccccataagttatccaatttcacagaaatccagatttttcaaaaatggttttggtctttaatggcctgaagggctgctactgaggggaggctgcagcagaggctgagcacaaccggtattgcttctcctatatgtgttgactttgtaaaggatccaggctattggccaactattatgtttaggatcttttgttaaaatggatcaaaatttgaactcacaattcaggttattccaacagccactggcagttaggttattcaattatggcttcattacaatcggcattaaggtctttttttttcttttctttagagagaaaatggtgggacagttaggaaggggtctcactatgttgtctaggctggtctccaactcctgagctcaagtaatcctcccacctcagcctcccaaagcactgggattataggcacgagtcactgtgcctggcctggcattagggtcttaagctcatttcgttctgttccttgaggattaatttggccagaacagttagtattcacaagtggcaacctaaaattaagtatgtgattcatatccaggatgaggcaagttcccttaggatcaacagggcctgcaaggcaaaggtttcctttagttgacctggatatgggtttattgcagtctgtgtgaccacctgtgtaggtgggtaaggagatgagagggcaacacgacatttgcctagtggcctataggcttactcacctgtattttttcaggttgaaatcatcagttgattcagcaaattttttatttatttatttatttagagacagagtctggctctgtcacccaggctggagtgcagtggtgcaatctcggctcactgcaacctttgcctcctgggttcaagcgattctcctgcctcacccccacaaagtagctgggattacaggcaccccccaccacacccggctaatttttgtattttagtagagacagggtttcaccgtgttggccaagtgggtctggagctcctgacctcaggtgatccgccctcctcaccctcccaaagtgcagggattacaggcatgagctgccacgcccggccaattcagcaaatttatgtgggattccacctagaactccaaaccaaggtgctctgaatatgtattggtagtataaacagaatccacagccctatcctggattataagctcgttagggaggtagcaaaatacatgacactgacctaagaacacatgaaaagcaaagaaacatgaatgcaaagtcatgtcatataagctgtttaaatcctgagtaagatgaatttaatttgcatctatcctactgacctataatccgtgactcacttgtctctctcctccagtagacatgactaggcatgacccatatagtactgaactttgtattcccagcaccttaccaaagtaggtgctgggaatacaaagaggagacaccccacaaatgttaaataaaacacttaatgaatggttctaggtaggtggggttgatcaaggaattatcttacaagtggtatgggttttttggttttttctgaggtgcagtctcaccatgttgcccaggtgattctcctgactcagcctcccaagtagctgggattacaggcactaatttttgtattttagtagagacagagtttcaccatgttggccaggtgggtctcgagctcctggcctcaggtggtccacctgcctctgcctcccaaagtgctgggattacaggtgtgagccaccgcgcccaacctagtctttttatagaacagttatctctgtagccaaacttacatcatattatttaattttccttgattcgggggaggggggagggatagcattaggagatatacctaatgctaaatgacgagttaatgggtgcagcacaccaacatggcacatgtatacatatgtaacaaacctccatgttgtgcatatgtaccttaaaacttaaagtataataaaataaaagatttacataaaacatttttccttgattctgtattaaaggaaagatgacattattttcaatgtctgcaaaatatttcactgatgggcatttagagtgtttccatttcccgctatcatagatactgctttaatgaatattttttgtttataaatagttttctttttttgtgtgtggatatagaatcttgctttgttgcccaggctggagtgcagtggcacaatctcggctcactgcaacctctgcctcccggattcaagcaattctcctgcctcagcctcccgagtagctgggactacaggcgcacgccgccacgcccagccgatttcttttgttcaggctggtcttgaactcctgagctcaggcaatccgcctgcctcgacctcccaaagtgctaggattataggcgtgaggcaccccgcctgacctataaatatttttctaagaacatttccttaggctatattcctaaacatggaattattgggaacatttttatttttctattttttttcatctcttcagtattcaaaacattcctaaattctggccgggtgcggtggctcacgcctgtaatcccagcactttgggaggccgaggcgggcagatcacgaggtcaggagatcaaagccatcctggctaacatggtgaaaccccaactctactaaaaatacaaaaacaaaattagctgggcgtggtggcgggcacctgtagtcccagctacttgggaggctaaggcaggagaatgccatgaacctgggaggtggagcttgcagcaagctgagatcaggccactgcactccagcctgggcgacagagcgagactccatctcaaaaaaaaaaaaaatcttaaatttctatataagttgtcaaactattttttccagtttaatcaacttacacttctaccagcagtatgagagcttttatcccactgcacagtcacataggaaaaatggtttatgtaaaggacctctcttctgttatttaatacccatgaatttcttatatagttgtaatcagcgaacccatactactttgggttctgcttatttcacggggaaggattctatatctatcaatatagttcacattctagccatttaaaatcattctttaattcttcattgtgttaacagatcccaataagcttggcgattttcttattgtcaggactcgggtttatttccagtttttgctattaaattggctatttctgcatctttgcacagtctcccctactttaccaagagtgaaactgcttgatcaaagaatagaaaatgttttgtagctcgcattagacactgccaagttgttgggcaaggtttttaaaaaaggaatattggctgtacagaggtgcagctgtgtggaccatcattcctgagcagggtccaatagcctggcatcttacctggaagtcaggacatctaaacttccctatgggaacttggtaagccccttccccatttcgaacctcaattttcttatctataaaatgaagaatttggatggaatgaattaatccttttctaccagaaatctagccatatttcacctagtctattctgtatcaccctctcctgactcctacgtgctcagaatctagctcagtgcttgggacagttatgtttcctttccctttgaagtgcccaaataccagtgtaatgagaaatatggcagagcctgagagttcagagcacaggccagggtcaaatctcagccctccacttacaagctgtgtgacaaaataacctcccccgggctcagtttcttcactgtaaattaggttaattgttccaacctcatagggttgttaggagaattaaatgagttaaggtttgcaaaacgctaagaacagtgcctggcacacagtaagtgctttataaagtgtttgttgaataaataaaattttggacctaaactctgggtctcttcaggactgcaacagctttgtaactggcaaccccacttttaggtgcgttcccactcctctaaaacccagagatctaaatgccaaatctctctgcttaaaaagtctcccagggctcctaggcgcctccaggctagaacagaaatgcctcagcttgaagacccaggcttttcaggtgaaacacctaagggtcaggagacgctaggatcatcactcaaggatcccagtgaatttttccaaaatacaataaaaataaaaacaaaaagaggcaaacagggttataaaaattgtggggcattttaaatgtttcattgaacaaattaaagcattaacagccctcccccaaccaccaccaagcccaagagaccgtaaatatgctgttcacaagataactgcaactttcaagggctctcaggctgctacttcgggcagcacaattggcggcacgacgtggcaagcaggcagtagtttccaaccctggagggtcagcgtctggagaccccggccaaggcatccacagcctaaagatgatgtccgcgaccgcccgggcagcctcgtgcacggaaaaacctcaaccccggccccgcccacccttcctgcggccaccccgcagccctggcccctcagtccattcactcctgcagcgcggccccgcacccagggcctgcactagaaccgctgttcctaccgcggcgccccctgggagccaacgccgcgatgcccgcctgacgtcaggaagtcgaatccggcggcgacgcctttagggagcccgcgagggggcgcgtgttggcagcccagctgtgagttgcccaagacccaccgggggacgggatctcgctccccgcgccacgaggctcggccaatgggaacgcgcgctgcgaggcccgccggtctgccctgcggtgctgaaaacccggcgcgcaggcggctggctctgggcgcgcgccagcaaatccactcctggagcccgcggaccccgagcacgcgcctgacagcccctgctggcccggcgcgcggcgtcgccaggccagctatggcccccgacccggtggccgccgagaccgcggctcagggacctaccccgcgctacttcacctgggacgaggtggcccagcgctcagggtgcgaggagcggtggctagtgatcgaccgtaaggtgtacaacatcagcgagttcacccgccggcatccagggggctcccgggtcatcagccactacgccgggcaggatgccacggtgagcgcagccaggcgggggcacaggagagggcgggaccggaggctgagtgcaggggagacagagttacgcactccgagccaaacaccgactaattcggaggaaagcccggaggcgcctgatcatacctgttgcccggtgattgggtgtcctgcggatgcgggatgaaaaggcgggagagaggcctggagaagtggagtctggggagtggggatggaggccaacaacacgcacacacaaacaaagggtcccgcctccctgccgtgcattccatctgcagccccgagcctcaggtctctgggcggggacagaaccccgagctgggtaggctaggagggaggagagcaaggatgcaggccgcctggggagggagggggtcagtggccaggggagggagtcacatcctgtctcgatggctaggagaggcagcgcagccgcgtctggacctaggtgccggtctccactcgccagcaggagcggagagggagcaggaaaggagcccattctcgaggatggggctgaaacgggaagcttggggagaccgctgccttggggacccctgcgtcgtgtgaagactggaggacgcggaagggacagcgctggccggggagggcaagcggccgctggcgtacataagggattgggaatggcatacacttagcgaggacccccagagctgttctcgaatcgccggggaggccactgagccgcaggccagcgaggtcttcagctattccgcggagcggaccgctgtttacgctctggggcggtaggcccttcgcggggtcctgtccct

SEQ ID NO: 5615 - DNA, 6000 bp, Homo sapiens
ggccaggctggtctcgaactcctgacctcagatgatccgcttgcctcggcctcccaaagtgctgggattacaggcatgagccaccgcgcccagcctacaataagatattttggaagactacatttatataacttttactacagtgtattttgtaattgtactctttcattattgttgttgttaatctctcactgtgcctaatttataaattaagctttatcataggtaggtatgtataggaaaaacatagtatatgtacacggttcagtactattgggggttttcaggcatccactgggtgtcttgaacatatcccctagaataatggaggattactgtatttacagtggccctgaaacctccctttacagaaaaagtttgccaacctctgttctatttcataatggaatttaaagtctcttactaaattgagccaggcgcggtggctcatgcctgttatcccacctcagcactttgggaggctgaggtgggcagatcaattgaggccaggagttcgagagcagcctggccaacatggtgaaaatccgtctctagtaaaaaaaaaaaaaaaaaaaaaaaaattgaaaaattagccaggtgtggtggcgcatgcctataatcccagctacttggtggctgaggcacgaaaatcatttgaacctgggaggtagaggaaacaatgagccgagatcatgccactgcattccagcctgggtgacagagcaaataaataaataaataaagtctcttactaaattaaacactttgatacttttaaatttacatttaaagcaatttatttgtttttgaaacagggtgtcactctgttgcccaggctggagtgcagtggctgactcaacagctcattgcagcctctatctcccaagctcaagtgatcctcccaagcagctcgagcttagaggaaggcaccaccacgcctggctaatatgtgtattttttgtagagacagggtttcgtcatgttgcccaggctggtctggaattcctgggctgaagctgggatcaaatgatctgcctacctcatcctcccaaagtgttgggattacaggtgtgagcccagcatacatttaaggccaatttaggtgactttttctcttttctctccacttcccactcctctcctccctgcctaattgtcttttggcttacaagccacttcacatacaagtatttatgcacatgtttattacaatatcctggggtggcaaaaagaaaaccagtggctctgtctaacttttgtttaataacaagcattctagcacaaacatttttccaacagttaagtttaagttccataatggattagtaaatcgggcctatgttaaccagaacccatgacttatgccaactttttccatctgtatatatccaatattgggggaaggaaagagactaacagctcccagtgctaattcaataaactgattaagagttggctggaataatattcatccagcttcaacaacaaagataaagcaggtatgagatggtgacttagaactaaatgtgtgtcatttaaaagaattaaacagacttttttttttttttgagacggagtctcactctgtcgctcaggctagagtgcagtggtgcgatcttggctcactgcaacctctgccccaggttcaagggattctcctgtcccagtctcccaagtagctgggattacaggcgtctgccaccacacccagctaatttttgtattttttagtagaggcagcatttcaccatgttggcagagctggtctggagctcctgacctcaagtgagccgcccacctcggcctcccaaagtgctgggattacaagcgtgagccacggggcccggcccagaaattttgttaaaaagaattaaatgtgtgggacatctgtggatttgacagtaggttcttcaccacttatagcacatgaagtcaaggtgtggtgacacatttaagactttcaacaataaaaataaagtgaaaaaagaggacaccttatgctcaaaacatcaagggtaaaagagatggtgcaatctagtaacatcacagaggtattcagaaaatctggaaagcagtataaacgtatcagactaacacattagaaagtactacgttttcagagcaactagaaatacgtgataagaggggaacagacagtattaaaatcaacttccgaggcaagtaatacaaaaataaaacatccctctccctacactggaagggaaaagctagaagcctactttccgtgaaactatcaaacctgaaaagcaatttgagtctaaactttgagtcctctttattcttcccaaataattaaacattctgcagaataaatcaaaattcaatacacatactttaaatagatgaaggagtaagacttaagggaggattttatttgggctaccttgtagaataggactatctacaacttactctgtatttatagaaacactttaataagaatacagaatactcttattctttaagaatacagggccaggcccagtggctcacacctgtaatcccagcactttgggaggccgtggcgcatggatcacctgaggtcaggagttcgagacgagcctggtcaacatgatgaaaccccgtctctactaaaaatacaaaaaattagctgggcgtggtggcgcgcacctgtaatcccagctactcgggaggctgaggcacgagaatgtcttgaacccaggaggcggaggttgcagtgagtcgagatcgcaccatgcactccagcctgggtaacaagagcgaaaaactccgtctcaaaaaaaaaaaaagaatacagaatacagaaactctttagtaaacagattattcttaagcagaggccactaatcaacacaattttgattgtactgcacccacatgtctgatacgagacactcattagaaaagtattttttctatgccagagtaaaatttgtagtccttaacgataaatccctaaaaagcaaactaacaaactttagcatttgaatatcttcgatgtgttttttttaaaggagtcgacacatttaaagtttcctttacacacctaaactttctgtaaggattttattataatttctaacaataaaattagtactacaccaccaatataatcaacacacgaatacttgtgtcattaattacaataccaattatttaacatgagaaaagccagccctaaaaaggtggctatgaaaccactggcatgcactactggagtgttaattcacacacaggacttattaagcatttaaattgcacattacattggctaagtgcttcataatcattttattagcggtttctagtccaaagcaacccatgaagaactttacagaagaggaaccgaggcccagggaggaaccaaagaaaaccaaattttaccctggaggaaataacaccattctcttaaaacgtgccagatacttctaatcacttttcatacgcaatatgaattttgtcaaagtaattaattaaagaatatgaaaaataccaagaaaacgtattgaattctgacaaagcgtccgactgcttaaacagttaaatacttgagactgactacatttcatcatatagacacaactataaggaagtaaaattctcccaaatgacaaacttagtggctaaatataaaggagttatttttgttcgcacttgcaaaaagcaaacaaacaaaaaagcgtaatcaaagaagctcaacgaacaagtttaaagtcaggacctgtaataaggagtcagaaccgttaccagaaaaaaagaacccagctcaagcgatgtagtagggaggaagttattaagaagtcagaatctgctgctgcttaacaggctcagccagtccatctttcagaagataatagttctaaccagaacttgtggtttaatcagtgcatatctcagcaccagcaatggatcacatccagtgtttctgagggtaacaaaaaacttgagccggcgctagatggggaggaaagttctttccttgcctcacttaaacatcaatatgtcttttatcttcgtgttacatcttaatgagaaaggactatactctcacccagagcacagcttccctgagagctgtcctgaccccagccaggttcctcagtcagagcccatgaacctaattccctagtcagatctcacccagccaagagccccagccggtacatcactcttcctcaccccctccctgctaacctcccaggccaattccgtgacctacatccctacaccctgcacagagccccaaactccgcacccctcattgtacttccgccccactgacttcccagttaaccttcgccccagcccccactccatctttgtctggctaccccaaacgcggcaccccagcgttccccgactcccaacggcagcccctcccccacgccgccccccaccctcccggcctcgtccctgcccccacgcccccggccggtcaccccggctccgcgcctccccggcttcaccagacccgtcccctcccccgcttcctccgtccgctcgttcccctccccgcggccctccgcccacgcccaccctgcaacagcgggcgctcagccggcctttcaccttgtccatgagcttccagcacttctccaccatcttcttgtccaccgtccccggcgggtgggggctgaggtggtggtggtggtggtggtgcggctggaaggcgtccttcatgagcccaatcaggccacccgaacccgagcccccggagccgctgccgcccccggccccagagctcttcttcacgttgccggccatggcctgggcagggtcggagcccaggcgggtccgccggctcggctcgactgcgagcgagggagagaagcagggcgtgaaggaggggcctctcccggccgccgccgccgccgccgccgccgccgccgccggctatccgggcggagggaggagcggccgtggggaggggagtgggcggcgccgggagtgcgcgggacgcgccccttcagagcgcgcgagcccggggcgggcggggcgcgtcccggaggcggaccggcttactggtaagctcggggaagcggccggccgcggccggactgggcagcgacgatccccgggccaccggcttcgagcagctcgcgtgcccacagctcccggaaagccgcggccaggtttctgtgcccgtcttccccgcccctacgccggggcggggcggggccaggctggggcggggtcggcggaacctttgggcctgcgccctctgctggagaaacggggaaaggagcggcggggggttggggagtaggtccaaggtggagtctgcgcagtagccagaaaccaagacttccatgctccttgtgggcgggaggttggcgcttctggggtgggtcatgggaatgtttaaattaagacaggtggcgatggaatggaagagtcctgatgtcaagtctttccccacccctgacaaatgaggaaatcgagcttagagttatttgtttatttacactgtgggaggatggtgggagaaaaaggaaagttatttctccaccccttattattttcaattcttcattaagacacgaccaaggacaggaatatgaatgctgcggcccattccagccggattaggccccagaaagccttgagacactcaagccaggacctcttcttccaggccctttgacctcttgaaaagaaatcacttcctttttttattttttatttttatttttttggcttgtgaagactagttacgtttctgggaattgaatctcaaacatgtatttaagattctcctactcagagcattgcaccacaggtcggcgccgccagcatgagggccccctcagaagctgacctgctgctggctccgcccgagggggttctctctcccgcccagggaacagaaatgctgttcctggtcacttccacttctcagtcaattacacttctctaatgtaaaagttccgttggaagaactttgaaaataggaacttcccttccaaagagggaagtgccctgccctaatttactaat

SEQ ID NO: 5616 - DNA, 6000 bp, Homo sapiens
taccatgtatttctttctttcttttcttttctttttttttttggagaaggagtctccctctgccgcccaggctaaagtgcagtggcacaatctcagttcactgcaacctctgcctccaggttcaagcgattctcttgcctcagcctccccagtagctgggactacaggcgtgcaccaccacacctggctaatttttgtatttttagtagagactgggtttcaccctgttggctaggctggtttcgaactccttacctccagtgatccacccaccttggactcccaaagtgctaggattacaggcatgagccaccgtgcccagccactgccatgtacttctccacttatttatctggctccctcactaaactatgagctcctgagggcacagagcctagcacagtacccactgtccaaagaataaaggaatgaataaatgaatggtggctaccatagcaaacatctgccaggtaccaggcattaccattaaaaacatgccctcatttaatactaaccacccttcaagaaatgcagtaacacaagggatgaccaaaattcagaaaggtaaaataatttgcccaaagccacatagccactcagctactgactaagaatcaaacgcgttttcaccccaaggctcacgtctatgtgccgccatccccagaatcatcattgtaagatggataaacaacctccctgtgacagaaagacagcaagcagtacctgtccaggaagggcagctgcatccaggccaatctcatccccgtagctgaaaacaggggtccctggcagggtgaagagcatcagctggtagagtcggagaagttgagccggcaagaaggaagtcaggagccttgcctgagacaactacagggagagacactccagtgagccccataacccacctctgcctctgtctcccaacaaccctttcttctcccatctgccccctttcccaccagcatggtactcacactccagctgcaccagcgattgccagtggcattcaaatactgtgtgactagggattttgtatgctccccagtagaaccagaatcagacaggtatgagctagtcaacagcaagtctttgttggattcgagtaggctcaggatctgctgaaggtcggaggagttagtccccgcaatcaagagcctgcagaggggagggaggagttcaaggttagcacaagaaagaatggggccaggcgcagtggctcacgcctgtaatcccaacactttgggaggctgaggcgggtggatcacttgaggtcaggagttcgagactggcttgaccaacatggagaaaccccgtctctactaaaaatacaaaattagccaggtgtggtggcccgcgtctgtaatcccagctacttgggatgctgaggcaggagaatcgcttgaacccaggaggcagaggttgcagtgagccaagatcacgccatcgcaccccagcctgggcaaaaagagcggaactccatctcaaaaaaaaaaaaaaaaaaaaaaaaaaaaaaaaaaagctaaagaaagaataaaggtaaagaaaatgctctagactaggaatccccccttcttaggcctagcactccactgaggggttcccacattggagctgagtcagcagaatggctcctgcacccacctgtcttcactgaagcccttggtgatattttgccactcagccaagaatgaggatgcatcctagaaagaaaaaagcagaatcaaggaccagagaatattatgaggctctagctgagtccctctgttctcgcccaagctttgtccctaatgtggaaagggaactcaccttcagattctctatgtcccgaacctggaacccatccacgccagcttgcagccaaaactccagagcatcctatagggggcagaagaataaaggacagacatcagttctcaggaaaaggctcagaaaattccagcccacactaaacctcacccaccacacacttccccgggagctggggagagtcctgtgccttgcctgggtcttccccacctgcactacaaaggcttagcctttggacccctccagctctacccttccactcattttcttagtgctacagcattttacttctcattcttgcctctggcaaatcacacagcttcaactttgaaagccacagaaaaggccccagagaaaaggtatgtccataaacataacttcgtttaacacttagcattggaatgttagcatacctattttagagatgaagaaacagacccagagaagcagggagacgcgtccacagtcataatcagtgagcagcagacaggatctaaaatgtcagtcaagatcccccctctcccagtttcctgaggcctggggaaggtgtgagtacaataactgctcagagcaaggccaaggatgaaagattgaaattcaaagcatagccccagggcagtttagatttgaaaagaggccagtgctgctgaatggaatcctggcagtcctgcacacactgtggaacttcacccccattctccttttcttccctttctctgggccatgtactctctcctctggtctccatttccatctgagggtaccgcccctcatgccaaaccatccaaaaacattccctcatcagcaacttttaaagggtcccctagtaactggcaaggcctaaactggatgatcccggggtcctacccaaatgctgggagtccagaattctatcttagaatcacagctaccagcagtgtcagtatctgcttccatttttgttctacccattctgaacaggtcagtgtcctaggacccagacatcaggagctaggtgacattcaaagccctactcctagcctgctgggtacacatttgaacctatggcaaattatataccttgtatggttatacagagaattagaaaacatctataaaatacttggcatagagtcccagacacataggagtaccccagtgcttataatttcagactgggctctattccaaacacatcaaacaagaactgggaaaccagtcaggacaggattctcacagagaaagggcttcctctcccaaaagaaagaaaaatcaaacttccagactgacttctgagaaggtcccttcctggcactgtctcatcctcagagtcaaggaaataagaaaaataagaggtcagaaaaggaacaagaaaaacaggtgtgctattggcctatcctttggctataggaggaggcattcctccttggtcctaaggagcaaagggaccctcagctggagtcaggctgggtctacagggcttgctgtgaaaggactgtcccagccccagcatctgacttccaccagccatcagctccaacactcaccttcaccttggtggccacagtgtcaacctgagtggagaaccacgagttctcaccccggtagttgggagtaaggtccagaatgacacggatgcctaaaacaacggaggaagacgcaatcatgagacagtctatgagttaagggaaaataaggaaatcacaaatgcaagtcactgagtgtttcctatgtattacttggtacaaaagcttgaatttgaacccgggcaaaattcattccattgaaacagatgtgagcaaggaagggccttaagatatgggaaggcaggccaggcgagttcaaaaccagaccggtcaacatgttgaaaattgtctctactaaaaataaaaaaattatctgggtgtggtggcacacggctgtagtaccagctactcaggaggctgaggcacgagaatcgcttgaaccctgggggaggaggctgcagtaagctgagatcgttccactgcactgcagcctgggtgacaagagtgagactccatctcaaaaaaaaaaaaagatattggaaggcagaaagtttatagtgcagagaagtggcccctgtgttccccactcccaaagtgaacctttttaaacatgtgtctatatcgagtcgtaaaacaatatttgggattccccccccccaaaaaaacctactgttttacaagtttaaaaccactggtttagtaaatatctatattttgcaaataagggcactgaagcccagaagttaaatgacctgctcaagattccacagccaagtagaaagcccccagacgactggacaaatccattttaggctgaagactaacaaatctcccctctacctgccctaggaaaactcagagccagttagcaggaaaccagacaaaagttctagcctacttttcctctggccaagtcctttctagctgtttccttgggaaccccaggatacccactcttttttttagccgattgcaagagactgtcaaaatcttccttggagccaaaattggggtcgatctgcagcaagtcagtctgagcgacatcatccttctggttcttgtgaattggacccagcacaaggcccttcaccttcagagagctcaggtaatcgagacgccccttcagacctgaaatgggggctgggttaacaagtgaggcccctctgagaggcccctgacctccccaccctcccttctcccagcgcctaagggtgggacggggagggggcaaagggggagagagggaggcaaggctgaatcacgagactcagaggagctgatgtaaggagtcctgcacattacttcagaaaccggttgcaactggcttctggcgccgcggggaaggaggacgctgagtcacccaccctcgtgacggagtgaggggcgggtcggctttcttcaaagaaaggagggaaggacaatgtgccggggagggggtgggggaagggggaacagtcgtcggtacgggatggagggaagaaccatctagatccgtctggggacaggggagggggtcggtgcaagccaccagattcaaccggaggtacccgggacgggggcgcgctgcactcacccgccaggttgcccgcgccgtggccctggaaggcctgaaggtcgccgatgcggtagagggcgcccgtgtgccaccacttctgcgccggtagctcgcgacaacgcggcgctcgcacgattatgaccacggcaccagcaagcatgccgagccagccgagccagaagagcagcagcagtgcccagcgggtgcgtacccagccggggctgcctgccaccttcagcagctcctccttggacaggcccgtgaacttagccgcggctgccgcctccgcctcgtcttccgccaccttgatcttcaccagaccattcttctcggctcccgccagggacatggccgccccagacgccgcgttcatcggctgcttctcgggctctaactcattcagctccacctccttcatatccacctcggtgtcctggctcatggtgcctgcagaaccggcgacacgacgcagcttgcggtcagatggtggctcaacccctacctggaccctcggacccagaacgctctccccggcctctgtgcctccgcgcagtttcggctactgcatctgctcagcagcaggcgcggcctctgggaaggggcagcggagccccgccccggcccgccccttaaggtggaacctcggggactgccccagccgtgggcggctcagggtagtaaagtcaggaacacgcctccgacagtacttcctgcatggtccaatttctcatctccaacctgtctaaccctaaagttcttttcaacctgattctgggaaggcctggcacggagccacctttaagtggactaggcctgtgatcctgccccaaatcccgaggcccctccagtgtcctttaggccttaccgcccccaaacgcccctcttcttccattccggcaggctagtgactaccccaacaccatcctccatttgcccctggttcacggctccggccgccgtctggttttcccaactttgcatggctacttgcactctcagaggcagccagtcacaacttctgccttttcccccaccaaggcttgccctctcaggcctctgggacttggcgctagacctctgctagacctctgcttccgtgcacggcttactcccactcgtttttcaagactcatc

SEQ ID NO: 5617 - DNA, 6000 bp, Homo sapiens
ccagtgccccgaggaccaagccccttccaggaccagctgttcccgaggcagggaagccaggaagtccctagccctactctaagcctctaagccctactctaagcccctcggaaacccctggggtcccactcgggaaggagctccaggatcaggactgttctgggcccccatcggcctgggtccttcgcctgtcctggggtgagtctcatgccctgtcatctgttttacctacactgttacctgggtttgagctttgagattagttctgcaccgcagcggatatcatgctcctggcagggctgtgagggacctggcctggctggggagagaagtgaggaccccaggctgcccacctgccctgatcctggagctccatgtaacagcacagggcgccctgcggggtcccccatcacccagccctctccctcccatcctttaccttctctgaatcacgccacttccataactgggagcccgaggggctgaggaagagggaagcagtaactttccaaacgtggtgggagagcacatgaccagagagaagggcaaggcgtggtgggggcgtgatccaccaggctctggccaagctggtggctccctcctctcaggcccctagcatttggaatctcacacctggactctcaaagctcccctgctgggccacccacatcctggagagaggcgcttacaagctctgtgcccctggtcccccagccctaccgccaactccttgagcccgcagccctcaaagaccttgtgcggggggtgggggtggggggcagatgccttatcctggccatcccacggccatggcattggcggccagtgcaggaagcctacagccccaaaagtgagatccggctgccagctgaccttccacacccttgggcgtggccccctgcctgaggggactcctccagcactgggggcctacctggaggaccctcaagggtctctcatgattcagcacttgctctgcagcccaggttggggggcttagtttgggcccagaaacacaaagaatggtgtgtagggctgggggacactgagtaagtccagaggttcctggaaggctgcccagcataccaggtaccactgtgtcctacaaggcaggtggggacgacttggaagtggagatcactgaagcccatttctgggagagcctggttcttcttgcccagaggggtgctgggaacaaggcggacacctgcagggctggaatatcacccagcacccatagcacgcccagcctggatcacagggacacggggcccaagcaaggggcagggcacctggctcctctccagccccagccccaccccaacctcagggtcctgtctaaaaccacggtgggtacaagggtgatgacctgctccctcgcacaggcgcctggactctaagccttattgactctatgagcaaagctcttcccgtggtgcgatttcaggtgcggaaataggggtagggatcttttggggtctgtctccttgtctgggcttggaagcagttatgagaaagggattgggggtgaaccagatttctgaaagttgagctgaactgggcgctggggtgggtgcaggagaaggaccctcaaacccaggaaagaatggagggctttcgggcatgcaccctggtgaccgcagggagggcgagtgacttgtcagcacccggcagagccacagccagccacaggggcgaccggggaagtaggcccatacctccctgcttttgctctgtgccctgcactgctggacagcctcactggggccagtctgtagcagagacaaaccacagacttcctcttctcggcccgcttgacccagtggccgtttccccaaagctgtgcagccagacagcctgggggagccagggaaagtccacacacccacttggtgaaaccaggcacaggatgtcctagccccctcccccacagcgcctgccagggttgcagcccctctcccggaaggacggcgaaagacgtgccaaatgacagtcatgtgctgtctggaagcgagaaatacccgtgagcgaggcttctaatcagtctctttcccggccgggtttggctgccctgccactgggaggtggctaccagctgcattagcttgggggagcagccagtcccaggcgggggacaccgctcttctccctgcggggactggtgacacctcttctggactccctggccagcccccgaggagaagactcttatatccattacacagatgaggaaggcaaggctcccacaggccagttccctgtcccgggacacaaactctcctgccctgctcctggcagcaggtgggtctcaggtgccagccgcctctgatggaggctccgagacccacccaagggacaggatttccacgctgcttggccagggcatctgcaatgtcctccctgcttgggcccgccgcgcacccagggagcccagttctcactggcccccaaagcggtcagggcgcaggtgcatgctgcccagaccttccccctcgcaccttggcttgggaagggagacagcaagagtgtgagtgtgtgtgaaggtgggagtgtgtgtgtgtgcacattcgtgtgtgtgagtgcctgtgcgtgtgtgtgtgggctccttcctgggaaagaggtcaggctaccccagctgccttctcccacaggcaaggcctctttcctctctaaaatggaacttctaacaagtgccccacccagatatccattgtcaacctcctccccaccagcctccccagagcccacaggactgcactgtgtccttctggaccctgcagggttcccgcagccccttccccactgcacatcctgcctgtctgggctgggctctctgaggcagaggtccctttggacccctggccaacacccacgccctgagcccttcctgcaccaagccccctgtcaacactcaggcatgtcagcaaatccaccaacaccaccaggaggtaggctcactgtgggcccccactgcagacggggaaggccgaggcccaggaccagagcagtgtgttggggactccaccaaggaggcccaagcccatggcactgtgctctcagccacacaccctgcgacaccagggtggaggggggtccaccagggtggtgcccaccaaccccacctcacccagcctggcattgctggctaccactgagccccagtggatgggtgggtccacagtgactgtggacggactcagttctcaatgctttgcagggagcaggccctggggagaggagcggtgaggcctcagagacatttccttgagccttaataacaagcacccttgggatgtgtcaggtctccaccccagctgcctgggaaacttccaggcccgccctggcgacactcccagggggctgccagggagacctctcagcctgggcaggcaggaggggctcacccagtgctgacacaccgtccagagagcaaaaatccacctccggagaagtcccctcccgtgactccccttcagcctctgcccctaggtccacactctccctcagcccctgcccccaggtccacaccctccctcaacccccacccccaggtccacactctccctcagcccctacccccaggtccacactctccctcagcccccacccccaggcctacaccctccctcagcccctactcccaggtccacactctccctcagcccctactacccccaggcctacaccctccctcggcccctgcccccaggtccacaccctccctcagcccccacccccaggtccacagtctccctcagcccccacccccaggtccacactcgcctcgtcaggggacggggcttcaggggctggcagagggacatcctgtgtctggtgcctctcccacatgcctgggctgaagcaggccaccactaagcaacggctgaggtcccagggccgggcctggggaaggcgagcccctcccaaatggcctagctgcccccactgccagggcagtgccgaaggccacagtgactcccaccagcgtcccaagcaggctgtgcagaacagcccggcttggggaaggtgggatgtgactgccccactcatctcccagctgagagttcagttcagcctccgtccttccccctccaaataatcatccgcactgggatcctcagccgtccagatgggaaacagatgtctctggtcccacacactggctccaggggccatttaaaaagtttgccctccctgcctcaacttgagaaacactcggtccactgggacatcagccgagtcttccacgagaagggggtgacagcctggggggcacggggaggggcttgcagtctatgcccaggggcgtggccacggggaggccgcggccatggacacccactccagtccttccaggccaagaagggatttccaccccctccccaattctaacaccgacaggaaatggaaacaaaaggcgaaagcccatcagtcacttcccagcagcaaagactgcggtcaggagaaagccattctcagcaaaagaccctcctccacccacgctggcacccaaagatgcccagcgtgggggcccctcttgcaaagcagcggccccactcccggaccctgccatccactccaggcccctggtgccactctcttccttgtgccaactcagaaccgcgggatccccactcctgcgaggcctccagagcccttctgggaggaggcctccgctggaacgtgtctgggtgaggagagggagatcggctcccaggcagggacggccagggtgcgcgcaccccagcttctgggccatcccggcgggagtctgcgctccttttaggcgcgacccccaggaaggtctcgggtggtgaccgcagattggagagtgagctgggctggggaaagagtgaggcggatcgcccccaacctccggcaaagtgtgcgcccccgccccaccatccaggggcggcggctcttgatgagctcatgggggcggggcgccaggagtcccgcccgcgagcccccccctcgtccccgcgaagcagcagtccggaatccgcggccagggacccgcgcaggcccctccttagctgaggggcggccgggtactcgggtcccgacccgcgaccaccgcacccatcaccaccacagcgggaactgcccggcggcccccagaagccccggcccggccgcagaggtgggcccccgagcacagaggccccgaaactcggctcgcagccctcagccccaatgtcggggggcgcggtggccccgggcgaccccccaccccgctcctggagcccacaggtggccccacaacttcgcggcccgcgctgcgcccgcggggcctagcacgctgccgcgggacctgcccaacgtggagtgtgtgcctgccccctcccgccccggcccccggcgcagcccttacccagaagacgaaattgaagacgaagagcaggtacttgatgcacttggtgcagccctccactcccatggcggcgcgggcggcgggcggcctgcggggcgcgggccggtcctgggcggcgggcgggccggcgcggggcctggcgggtggccggcaagggggcctggcgggccgaggggcgggggcgcgaagaaaggggcgcgggggcgcgggggcgcgggggcgcgtggggcgctgggcgccggaggcctggcaggatgcgcggtggggtcgccgccgtcgccgccgttgcgcgctcgctctctggccgggcgcgcgcctcgctccgcagtacttatagggcgccgcggtcccgcccctccataggccccgccccggccagctcacgccccgcccccggccccgcctcctgccgccagggcgcgcagccgaggggtatggggtcgctgcacctacccccaacttggcgcgtttcggccaggacctcagggcccaggtgcaccgtgctgggcgcgggaggcgtccccaagctgctgtcgcgctccgagcccccaagggggtggcagcagggccgcgcctgaggacaggcatgcagcgtctgcccaggagtgcagccccggtgccgggag

SEQ ID NO: 5618 - DNA, 6000 bp, Homo sapiens
cccagctgactgctcgggtaccggatcatgaggatctgtgctcaggagaagaacaggggggacagtgagggagagagagaaaggggatgctctaagactgaagggagaaaagctcacccaacagccgggaggctggccaccagccctccccccaaccctgtctcctgtgcatcagtctccaggctgccccagccccagagccagccagcatccaccctgcccgctgccccacctgcccagtacctgcatcccctgcccgttgccccacctgcccagtacctgcatccggacttggtgctgcccagtgggcacacactccaggccatcgtcagggcagcagccaccacagcgctgcacagtcacgcagctgggcaccagctgtttggccacggtgcccatgagctccacagtcaagggcaccaccacctcccggggctggcaggtagcgcgagtatacacatctatccatgacaccactgggagcagaccggtaggggttaagtcctcactggttttcctgcagctgctcccagcatctgtcctccccagtccccaagtcacagccaccctccactagccctccccactctgccctcacaacctgtcttcccctgccctgtttatccagatcccagtaaccccactgcctcaatttcctcctctgtgaaatgggtagaataatagtttgaatcttctaggggagttacacaagatgatggacacctggaatcagggcccatgacaaaccctcttagtgctggctagtgccgagtttttgtaagtattacctttcctctggtggccaggggcatcaggctgggagacaggggcctgtgggagagaaaagacctgtacccaaggtacactttaggagggtgtggccctgtcaccgtccctggggctttgcccttgcatcagtaggcttcaccacctctctgacatctttccagattgctctgttcctgcggccactgctctagctttacctgtcctctcctggccacccgggacctgccctggcccaaaacgcaacaggtgctctggtggccgcgccaaatctccaggccgcggagccgagcatgtttgggggctgcatgcagatcaggagcgcgcacagtgcccaccgaagcaggtcctgcaggcaccgagggagccccgcccccggcggtgcccaggggacggggtggggcggaggagtggccccagactggggctggcgggccagcggggaggggcacctcccaggggatgcacgcgccgggcccccgagacgcccgcgtccaaggccggaccccgcagatcccctcggccgaggccgcgggtcgcctcctcacttccgccaaccttgagagagggcacggcgggcgggcgggcgcgctgtcgggccgcacgtacctgggcgggggccagctgcaggagtgcggcgagcagcaggcggcggagcagagggctcatggtgcccgccggggccgcccgccgggggcgcccgcatcgccctagcccggcggcgcggggggcggcgacagccagagccccatggcgcgggcccgggcgcggcgggcgggggccgggcgcggggggcgactcctccgcggccccctcccgagccctgggtgcaggcagcgcagcgcagcgcagcggaggcggccggaggagccgggcgggcgggcggccggtggcggcgggcagcggcggcggggacggcgggggcggcggggggctgggcccgggctggcgggcaggcggctcatgtgacccagacacgcgctccccaccggcccgtggggcgggggcggggcggcggggtgggggggcgaggccgtcggcggggcccgcctcctccacacaccccctcccgcctcccgccgcggcaggggaaaggggacgcaccgcccaggaggctgggctccccagtcgccgccgccactacccggagggcggggcgctgccccttggcgaggccggggccgggggcgtcgggccttaaggagggagccggacacgagctctgcgaatcactttattgcgcgcgtttcggggagcgggccgtccagggaaggaagcaaagcgggaacgcactgcaggccccatccaggtgagcccctcaggggccggcgccccggggcacgatctcggggccttgggttggctcggatggtggcggctgccgctgccctagccgttgtcgctcctgctgaaggatgcctctgttggccctggaggagagggcacctgggtggttgggatagggatcccgaagtgtggttcctggacagggagcagggagcagaatagagcagggacagacctggcccgtgcccgggcttcgttgtagaaggctgtgatgatccgatccttttcatccatgaagttaaggtgcatctgcttcaccttcctgcaatgggtcacaattaaccctgggaatccaattcctgctgtccctgaagtcctgcccccttccaccccactctaggggcctcacagctttttacccttacacagggttaggaacctcagtctaacccttcctgtgatagatagggagggctcagagtggccctggcttgtctagggtccaatggcatccgaagtccctggtcactttgaggtgtgacagcagctgtggacatgggggtgctcctcccagaagactagaaagggtatgcgtctaactccatcactgaactaggcaggctgctagcagtgggcactggcctttaggtatctgctatagaaaatcggctttgtggccaggcgcggtagctctcacctgtaatcccagtactttgggaggctgaggcgggtggatcacctgaggtcaggagtttgagaccagcctggccaatatggtgaaaccccatctctactaaaaatacaaaacaactagccgggtgtggtggtggacgcctgtagtcccagctactcgggaggctgagacagaagaattgcttgaacctgggaggcagaggtggggttgcagtgagccgagattgcgccactgcactgcagcctgggcaacagagtgagactccatctcaaagaaaaaaaaaagaaaaaaagagaataaagagaatcagctccgtggcacgcgtgagagtggcagggagatgcctactgccaaatgaatgagctgtgctgcatttgctgcttgtgcttgattttgtttggctcaatcccttcctggcagccagcatgaaagatttacattcgaaatatgaaaaactgtaaatgacaacgttagctcttggtgcagcgctgcctttaataagtaaggagaggctccagagaccaacttcaagcagctcttagcttgagagacacaagagtacgggccacgaggtgctgtggaggactggctgaccacactggaattcacccaccctcctgccctctgcccatcaccccggggagaacaggcatcacctgaaggcaatgtagtgcaggcccatgcccgccagcatgaggaggaggcagtaccccagcacttgtttgttttgtttgtgttgctgctgcctcaactggggcccctgtggcctcacgctgtgaaactgggaccagtactgtgcgttggggggtgtccaggagctgctgggaggcagaggaagggacattgtggaaatgagactacccaagagacctgggggtggggcaagctgagggcaggattactgtacctgtgtgtttggtgggcagacttgtcatggactgtggttcgtggagactttgggggactacctgagcggagctggtcatcatagctgcggcggctctgctcacggctgagcacacggtatgcctcgctcagctccacaaagcggctgtgcaggcttgggttcccagggtcccggtctgggtgcagctggggtggggcaggactccccttatctccctttgcctgtccctccccaggacccatgctgatgacatccacccaccagggctccagtcatacccagaggccctgcctggtcagtgaccctcactcaggcctgcccactcctcagaaggccagagagcatggactcctgcttcctcctgtgttcaagccctccccacctgccagccccctgcattcaccatatgccctggtccaggtttctcaagagcaggcaggcaggtcaagaaaaccaagcccagcccatcagacaggacccctggctcctgcccacagcctttcccctaccattgagcacctgccactccctatgagggctgaaaaaatgtggcacccgccagagatgctggtctactcctgggaatttgaagcacacccccactggctcaaagttcctgctccccctccccacctcaggggtacgggtacctctttggacttggagaagaaagctcgtttaacttcctcagtgctggcaccaggatgcacccccaacagttcataataagtactgggtctggacctgtggacagagtcccaaaccttgcaggggctgaaggaacccagaagctagctctgccctgccttctgggccacacccttcaactcagccaccaggagctgacagggctgaaacaggtcccaggacagatctgtctccagatcagcaccccctttggagtgtttcaggcatagtgcaggtcaggatttctcaaagtggagtccaaaaacttgttggaaaaaactgattcctggacaggcgcggtggctcacgcctgtaatccagcattttgggaggccgaggagggcggatcacctgaggtcgggagttcaagaccagcctgactaacatggagaaaccctgtctctcctaaaaatacaaaattagccgggcgtggtggtgcatgcccgtaatcccagctactcgggaggctgaggcaggagaatcgcttgaacccgggaggcggaggttgtggtgagccgagattgctccattgcactccagcctgggcaacgagcgaaactccatctcaaaaaaaaaaaaaaaaaaggaaaaagagaaagaaactgattcctgacccccacccaattgattcctccagttcagaatctccagagcagagcccaggaatctggattttgtacccgacacctccccatctcccaccccccacagagggttatgcacagtgatacagcgatgcttggaaaccactagagctgtggtaagagcgttgggtttgacctggactcaaacttcctcctctgccgcttaaatcggtgtatgaccttgggggtcttctctatctctgatcctcagcagggaaggcgagggttacctgagacaaacctgggagcctcctgacacggagtagagaccacaactaactcagcacgtagggcaaacagaaacccattgaacaaccgggccggccccccgcgcccaactcaccgctgcccggcggccgctccgaggagccgggagggagggttgcggggccacagccggcacaggcgcaggggcagtaagggcggcatggcggcgggcgggcagctgggaaaggaggctaccaagagcgcattggaccaggatggggctagacttcaagcacccgggggcagagggaaggggcctggcccgttgttctgcaaaggaagactgaagcaggcccggagagggggcggttcttgcccaggaccagacccgcgtgtccttggacctgccccttcctctgacccgggcatccgcagcccttcccagcgctggcttcggggtctggccacccagccagggaccccaagaccccgttcccacccagggaacttggggacgggagaaggaggggccacaaccaggccccgcccccgctgctcacagacccgcggccgtcgccatttcctgcgtctattcaggccccgccctcacattctcattggcgtggatgccaagaccacgtccacctgtcaggaaaaaaaaaaaaatcggtggagaccccgcccctacatgtctattggcctttggtgcctccggtcccccagcctgcggactcgctggacaggcgcgggcgcccacctggggagcgggcgggacagagcccgctctc

SEQ ID NO: 5619 - DNA, 6000 bp, Homo sapiens
actatgaagatggctgtcatctctaaggaggaacagaccaaaatctgacaatgaaatgttcctacaacatccaccttttgccttgggatgttcgttgctataaggatctgcctcgtggatcccaagtctcaaagcaatttattaagcataccattaacttcattttacagaacatagagaaaacattctcagacagaacacaaattaaaaccaagatccatgatcactgtattctgatgctcttacaagcctggactccacatctcaagggaactgtgctccagcatctctccaagttacaagggggctacatcaggctgctctcctgctctgcaagaacgcttgaagtgaaaggagaatgaggtttttctcacctggcctggaaaaaaagtaatcatctattttatattatgatacttcaggtaattttctaacaattcaccatcataatatcacaaatataatttagagctaaagttaatctcattattcaggataccagggactacaggtaacaggaagccatttataattcaagtttccaattttatgtacatacatgttgtacatgcatagactgtttctggaaagatatacaaaaatattgataacaacggatgccacccggaaaggagctctgggtgaacagggggcatgagagggaaggaaatttgttaccacatacgcttttgtacaaattttgttttgtaaacgtgcattacctaatcagacagctttttatttcatccctccaaattccgcctccttactcttctcaccaacccctttcctccattccttccccctcgcaaagcctccaccttctgtgcctctaaccatgcaagctatttatgaactaaaagcggccagagactgggcacagagctccctaagaaaagacgccaagtggaaccaggaagagcttttcaaggtcacgtcccttattgagccaacccaaggccccgagcaactcttcagctacataaaagccaacctgaagcagcacattctttgccttctcatcttattctggaagcacacaggtcaaacatcctaacttcagaatcaaccagccaattctttcccaagcaagtgtatcatggaagaatctactcaaaagagatctaaagctgaacggtattccacccccaaaggaggccttttgtcccagggccttgtgctgtaatagacactttattttcagtctcaaatcaggacactgaatactccctggcttctaaaatgtaggaattatgaagagagagcttgttggaaggaaaataaacctgtaaatcctgttaggctttgtgctttattccaaaggatttttccccaaaacaataccattagcataaaccagaatgatagccctaaaagggaggattctgtaaaatagaatccaagctcttcattgaaaataactcccatatagcacaggcaaatcagggctccactatctgtaggccatgccgcttgcatcctcactaccgaatgagccatctcattttcactatccatgtgtgggttcactgtattcctccttacaaatacattttatataatgtgaatgtgcttcctaccctctgggcctctcttcttccaggtgtgtggctggtccacaaatactcattaagggcctcccaagtgccagggaaacacaagagaacttgatccatgccctcaaggagcaaacaggaagatgagacagttgagcaattctaacacaaggcagtaagtgctgcctccaagctcagaagaaactcttcccaccatagcctgagaataccaagaggtattccttggatgttaaagaatggaataagagcttcccaggcaaggacaagagttggggaagatcatttcaggcagaggaaaaagcaggtatgatggcgcagacagacagagcttatgagaaatcaggaggaaattcagtgtggcatgaattagggaatccctcttcttggacctggcctttaagaaggggctcaacttctaaactttgccttttttttttttttttttagatggagtctcactctgtcccccaggctggagtgcaatggcgcgatctcggctcactgcaacctccgcctccggggttcaagcgattctcctgcctcagcctcttgagtagccaggactacaggcatctgccaccacgcccagtgaatttttgtagttttagtagagacggggtttccccatgtggaccaggctggtttcgaactcctgacctcaagtgatccacccgcctcggcctcccacagtgctgggattacaggcgtgagccttgaacatgggcagaaaagtcctgatatctgccagcaaattattttcacccctacaatcacatttcagtatcataaatgtgcctttaagtaatcatggcagaagccggtctccccaccttagagaaactgaggaggaaaatggtcaaaataaccaagcctagtttacccaagacattagcgaagcagaggaaaaaggaccgacattgactccagcacagggctctttctcagatgcaagtattcccctagaaagccttcccttctcttctccctgaaggtggtggccttaacatcgcctctaggcctgcttccttcaggcagcttctgcttccagccctaacctgtgctgccagtgtcctcttaacctcactcaaaggtcagagggcaagaagctggacagtgtctgagcccaccaccccttatctctccatctcccatgcgctgcatgtcacacagcccgttatcacaccattgtagagttgtggctggtttcttgtgaccatgtttcctggttcccatcctggtacattgacatgcctgtatctgcatctgcttgctctcctccttaaattgtaaatttcctaaaagcaggaatgaaattttattccccagctcactgcacctccatagaaccacactcaagtcaagcagtactgttggaaaacatcaccattccttaggtttaaacgttgaaggggaaagtcgtgattacaaagtggaacttggcttaaggctaaaagtaggaccatataatttattgtcacatcttgacacttttgagagtgaagggggtgctattcataaccaccagagacaacttagaaaccaggtctgccccagggaaacacagaggcaatggtcatccttgctagaaagatcattccaaatagatgttagttactccagagttccaagaggggcacctcaaaccccttcagtcaccaacctgtgcttgcattctgaagggtctgcaccagatagaacttgtggcagaaagcccagtacagggaagttcttccttttatctgactcaaatccttacagattcaaattaattccacttcttattaacctcagagcaagaggcaacaatggcataggaaggcagccacagagaagaaaaatctcacccttgtaccctcaccctccggttaggaattcctcattatgagtttgactgctagttctccatccttcagctgaaccaaactcaatctggctggcccagaaactcaaaagcccagggtttgggagtcactcccagtgagaacagagttcatgtccaacctgccccacatcccctggagcttttcataaaccaaacccaagaaagaaatggcacatgtacacatatttttgaaaccagaaaactttttcctcaacctaaactatagcttcaggggacctgagcactgggagggattgtctcccaccagcccccaactcccagttcccagaatgctgattcaagagcacagcagagctgggctgactgcggaggcccaatgaagaagtgggccactcctcctccttctcccaccctccatcagccccatgctggtgtcgctgttaagagcaaggaccttgatgacttctttttgttcatacacatatttgtcatatggggtggggacagggggacaaggatctgggcccaagaggaactgagcatgcaggttcctgcagcctgtggccaccattagttacatgccctggggcacacattcttgcccagggaccaatagtggagggaaatccaacgctcccacccagtcaccaccatcctttccccctttataccagatctattttattttagaaaggaggtatttcagcagcattgcataaagacagggtgactgcagtcaagcaaaggtcactgagacaatgcagacaaaaactagagagcaggccaccttcccggtatgaccttggactagtcacttcaccattccacgcttcagtttcttcaccaacaaaatgacacaatagggtgatatgtttacaaggttcgtcctggatccaagggttgaacatttaactctgtatttcctgaagaaatggctaaagtgaaattagtgagaaaaggcagaactcagggtaatcttttattaataatttctacttcaaaaggaacaatttgactctagaaaacaagtgtatttaccccctcctctggtcctactttttctcccccaccgaccttatacttttgctgatgtcaatcttaactgcaggactgggagtctcatgaggcaataacacggtcaaattaattttgccagtgctgatcctaacctacaaactccatctgcaattcctcgcagtaagtctgaccataaaagtgaaattcacgttacttatgatctaataaacctattgcctgggtagaaataaatcacttatagaataataatgcccaccaaatttcctgcagtcctttcaaatctccaagtgccatgaggggtattcctctccaaaataaagttatcttgacgggggtgggagagtcagcatcttgaagggtggggaagaaggaatggagagcatctcacacgctcgccaaaaattaaaaattaaaaattcagcctttacacacgcacacacatacacacacctcttgtctgactgtacagagatagtcgacaagctttcaggtttgcccacttttattgtgctaataatgctaagtgtggaaacccccacctcgtgctgttctgtgtaagtgtaccgcaactgcagggtgctcgcctccactgccaactgatgatacactaaagaaagcccgttttttatccagatgtaaaatgaagctgcacccctcctatacctgccggaaactacatctctctgcacacaccctggggtaatacgcactgcacccggcgagttacctggaatacgtttactaaatcgacaggaagaaggaaagatcaatgcgattcaagtgctgacggttgtactcgtgaaggaaaaaaacaaatgcaagccgggaagtccccagtggtgcctgcacctaggaggcgactgcaacggatggatgcgggggtgaggaagtgcagggagaggaaaaaactggagggaggcgggttgcaaaactgctcacctgtccgtacaccttgatgggctcgggctgcagggcagcgctccgtttcctccggagcggcttctcgtccgcgcggctcgcccccctggcatccccgcgcgcccacagccgcagctcgcgcgggtcgccctgcaccacgaggaagccccggtcctggggcaagggcgcgctgccgccgtgcagcctctgcgtccagacttcgcagagagctccgggcggcagcagtgcgaccagggtgaataggaacgggagtcgcgactccctcctgctgctccgtgtcgccatgttcgggcgaacgctactgcaggtggcgccgccgccaggagagaatgtgcagcgcgaggccaggagagccgctgggccgggaccgcgcgcgccgctcccggggctccaggccgcccgcgccgctccgggccgccccgctgcgcccgccgccgctgccgccaggtcccgctcggttcggcgcggcgccgtcacgtgtgaggctcgcagcgcgtccctttcgcgcactttctgcgctcggcggcctcggcggcgactccggcccctccctggcgcggggatggggaagttaaggcagcgagcgccggtgggggtgcgtcc

SEQ ID NO: 5620 - DNA, 6000 bp, Homo sapiens
ataatcccagcactttgggagggcgaggcaggcggatcacctgaggttgagagtttgagaccagcctgaccaacatggagaaaccccatctctactaaaaatacaaaattagccgggcgtggtggcgaatgcctgtaatcccagctacttgggaggctgaggcaggagaatcgcttgaacctgggaggcagaggttgcgctgagcctagatcgtgccattgcactccagcctgggcaacaagagcgaaactctgtctcaaaaaaaaaaaaaaaaaaaaaaaaggaccctgaagtctctcctgctgcaggccctaacacaagctgttccagcccttccctgggaaagccaccatgaggccccactgctcagggctggctgcctgttccctgcctgcatccccagcactggccaatgaatgagcaaatgggccaaaaggactgtgccccaggaggagtggggctgtgcaagggtcacagggcagaggtcacgggtgccacccttgctccccactcaccagtgagataggtgttatgcgaggagttgatgaagtaggcactcagtggctgggtcatgtccgtgctcagatccagggcttccaggggcaggatgccattctcctcgcctcccaggtagcggctaaagccctccatggacatctggtctggggtgggagaggatcagcagggtcagctggggtcccacctgcccccacccacctgcaccccagccagctcacctcgctccagaaactgctggttgggctcatacttttcgatgagcagccgggcctgggagggccgcaggggcgggtacagcacttcgttgagtctcgggtcgcgttgcttctggttgatgaagtccatgagctgctccagcgtcaggtatggcttgcccttggcgcctctggaggggacaggaagctgggtcaggatggagcctggcagggctcccaccccgtcgccaagcccttgccctgggcaagggagtcagaaggcctgcccctggatctggcacccagtgagtgggactctgggtgagtcatggccaacctctgggcctcagtttccccctttactctcctgactactcaggattgtcaaggcagcagactagtgggcaccagcaatggccagggcttaggagctgccaagtggtcagcccaccacccctcgcttccagacctcacaacacacctgaggcttggaccccattgcagagtgggctgattaaaccaaccctggcacagggttagcccagagctgcctgtaactgaggggcagaaacggcgggtctgagtacaggaacatcaccgacaggttctccctgggcacccctccgccccctggcgctccaggacccggcccaccagtttcccctctccccattgagctagaggcacgctaagcagaagctaaacacagagcacaggggttgtgaggcaggccgggcccactcacatctccagcaggatcttgtcaatgtccggccgcagacacagcttgttcaggaaccgctcaaagatttccaaggaaaactcatcaggccggatggactcactctggaggtcgaggagtgtggggtgagaagccaggggcgggcagccccgtaagggtgggtgcccaccgtgacaccccaccccgcccctgtccccaccccacacacccggttgaatttgaggccacaggattccagcgcagtctccacccgcttcttgtctgctgagaacatcttcaggatgctgatgcgggcaggaggggttcagggtcagtggaggacaaaggtcaccaaggtcagggcaggaggaaggtgctgggggaaggggtgctcacttcttgacggggatccgaccatcctggttcacctgcagcttcagcttcgtgtatctgggaaggcagatgaagaggtcacaccctgaaaacggccacgtgaaccccccggctccccctcgggtggcctggggctcacgctttgcgcaggaaggtgttccgggaggcgttctgagccaggatgttcatagccagcttgaatagctcctcagaccagacctggggggccagtatacacggggaggcggtgagtgggggacacaggggctgcccagccacaacccaggtccacaactgcctctggtacacagtaggtcacagagcagcctagaacacagcaggtgttcggtaagtgacggccgactcacagaataagacagtgactcccccttcgtccccttggtgccagcccaccttggctgtgtcatcctgcacggccatgaagttcaagaacactgtgttcactgggtctggcccagacaccaccgtcatcagcttctcctccagccgggcatcgggacccccaaagcccagaacttcccggatcttggggtcctgagtaggtgacagcgaagggtgaagagggggctcccgcacagcctcgctgtggtcttcactcccaggctcatcactcaccttgggcaggcgggcgtaccggcctgtccgtgtgtccctgatggaactgatgtccagtgtgtccacctcctggggggaaccagatgccaggctgagtatgagaggctgcagggcaatagccaggagcttccaagctctctacccaggccagggaatggccagcccctggctatagccccagcctcagctcctgccctgagcacttcctgtctgggcagcagtgggagaggtcagcctgcagccgggccccacccccacgggcagggcaggggtctgggacaggggtccttggcctgagcgagctgcaccagcgcccaccctcaccatgttggggcccgtccagtacaagaagaagccattggggtccacacgcagggtcaccaggttccgactggaggtctcctgaggacagcacagggcagcaggggtcaggaagtgagggctgtggtgcaggcctggcccctggggccctcccatcatgcaccccagagttcctgcccatgagctaagacgaaacctcatccagtccacaggtcctgtgtggctgcctgtggccctcagaacaaagccaaggtcctaggtgtgacatttagtgtcacacctacctcaaagcctcttcccagcctcacctccctctggccctaggattctacctgacctttcccagggctttgtctcatgttccctttgccaggacaccctgcccttccttctccacccgtgaaatctgacccaccccctggaagaggtccccagcccccatcctgggctcagtttccccagaagtgctgagagctctgtgacagtggcagccccccaatccaccccactgcagaatgtttaaggcatgaaagtgagaagtctgactcccactgcccttctgcatcccttgggacatcacgatagccctgtggtctgcctcaaagcccattatccaccttaccacatctgccggggtcctcacagcctcaaagctcatccccatctcgtagaagaacagtccccctagaaggggacttgccctactctcaggactgggcagtgagctcttcctccctcaaacagccgtgcagctggcagggggcagggaagtgcatgccagccccattttctaagaagggcccggtccctggcacactaccagggccaccctgtgtgactcaggaccagcagccagaggggctgtcctccagggcttagactcggccagggccagagtgaacaagtggctacaggtagaaccctcctattccaggttcttccagacagaaaaggaccccacctcatgttgggtgccacccccaaaatgcatctcagtgtctggtggacaatactattattatcaatacatctcatatacgcacaccgcccctactgcgcaccaggtacagttctatgcacctagcatcttcgagcacacaaaggcctcctaaccagcctaagaggcatgtgctgttgtcactcccattttacagatgaggacactgagttacagggacacttcgtagcctgcccgagatcactggagccaggacctgcttgcaggcagtgtggttgcagcgtcctgtgacctgggaagcagggagcggagacttctgccaggctcccggctcctggcctcagccacaccccattgtggggcctgggataactctctgctttccagacctcagtttcctcttctggagaatggggattgcaccagccccacccatggcaggctttgcttacaaaagatgggcgttcatctgggaacagaaggcccccaaaatttggggatgcatgggcctccccacttcagtgtgctgacacccagccccagcacttctccggattcccaaccctaccctgggcctgaggcccccgaatggtgtgcagagcggggagtctatgggtactgcccctagtgtttccctcccacctctccccaggggtctggacctcaaaggcagcccaggtcccctgctctcctgccccaagcctccgtcagcaccccccaccccacccccagggccctctccctgttcccacttccttatttgggtttatcacagtggaatgaaaagaagaaacttttcccttcaggccagcctggggggaggggtctcccccggcccctggggcccccaggcaccccacctcgcacacctgccgcttcaggccacgcccccatctcctccccccagctcccacgcctaccccggggccccacccagccggaaaagagcccagagtcttccaggcccgtggcctgactgggaaggagctgcgaggaagctcaggccggccgggtggaggccctagggaaggaagggcccagggggcagaagaggatgcacccaggatggggatgggcagccgaaggtggggacacaggcatttgggaagcaccaggggcaggacagggaaaggggggccaggatgtattggggttcaaggtcccaagcctaaggagtggggagcaaagttcccaggggtggaggaacttggggggcaaagtctccactagggggtgactgggtgctcccatctgaacagggagctgggctgggatccagaagcagggcgaaggggtgccaaccagaacagggggaaaaatgatgaatggacgaggactgttcaggcagggcaccggggagagtaggggcgccctggcacacacccagaatgaggatgcccccagccagcctggaagtcagggtcctgcagccggggagtctagtgctgggcaggggtctgggcaccaggccaggatcggggaacgagaattagtctggcagggagcggtgggaagaacgaatggaaaacggggggacggggtttattggggttcaaagtctctgcgccaaggagtggaggcaaattttccagagctgagggactgggagttggggggacaaagtcttcattacggagacgatcggggacttaagtttccggggcgccgccagactgggatgagggtggcgccacgggcaggcgaggctggggtgggggtccccagcgtctggtcgagcttgactgaaagagtcccgggatttgggcggagcaggggcccgcgcgcttacctcgtcccatttgatgaacttactcccgcgccgcagggtctccaccacggtgggcggctccaactgcagcgcgtggacgccgggctgggcgcccgccatggcccggccaggggcgggtcggggacccacggagccctgacggggaccgacggcgccgctgctcccaccgcgcggcccgctccggccccgcggcgtcagtgcccgcccgcccgccagtctgtcccggaccgaccagagcctcggcggggcccgggcggggcggggacggggcggggcctcccgggccccgccccctcccaccgcgtcggctccccctggcggccggggcggcgactgcagccggagcggggattggggcaggggcacgcggacgggtcgggggctttgctgcggggctcagcagaacctgattcttcaggcctgtggtggaaggagggcgctgggggccgaagtggctgttggggagcag

SEQ ID NO: 5621 - DNA, 6000 bp, Homo sapiens
ctcttgacctcaggtgatccgcccatcttggcctcccaaagtgctgggattagaggcgtgagccaccgcacccagccttgcaatttactttcaaatcattctgggaaaaaaagcctatctgtcaagagatagagagaaagcacttgtggtgaagggttaacgatgactgagctgaggtgaggtattggcgggcattgtactattcttgcaaaatcttgcaatgtttcaacaaacacgaaactatttgaagaaataaaatcacttgtaagttacatttaaaaaaaaacaacgagtggatctcggccttccccggagctggaccctgtcctctagtgggatgggaggtggcttcctgatgagccagggttgcccctggggtttccagattgtgggaaagtccagggggtccctggggtggaggagaggcagcagctatttatcaagctgcagggaagcatttcaatactttaactgttggtgtggctgtaagagtgcatcccagctgagtatcggtcctgccctcagggtctaggcttgtgtataaatgcatgcaggtgggccaggtgcaaggaacaggtgagagggagcacagtggcaaatctgagagcccctctcttgagcgaagcgggcagcctgctgtgctccagctggtgggggccagggattgggtgcactggagtggctgatcgtcctcccccgctccctggagaagcctgaactctagactggaatgtggaacacccgatctttaaatgttaacatttaaacatgctgtgcaggccaaacaacccatctatctacaggctggctcagctctccggcagtcctctccgacctttccccccagaggcaaaggctgcctgcccggagaacagtcactcctcttcccacatccagcatctcccctcaaaggctggtttctgttcccactgctcagggctccctaacaaaaccaaaggcaaggttatgaaggcaggatccattctgccaccttcagatgactcccagctctggcagaaagctgggtcctgagagactgttctctgggttggacaccccgttgcaaagggagggacctcctagcctgctcaggtcaaggggaatctgaaaacaggactgaaggtgttggcaaaactctggggagactctgtgaggtcagggcaagcactgtaagggggccctgctccctccctgccattctctaaatacatttataggctcaacccctgtcggctggtctgttcgccccaaatcccgctccttagcttctctttcctgtgggtgacctggacactcttctgggctggggaactagaccgtaggatctggtgcccaaacaggcccaagaggaccagctcaggtgctgggaaagagctgggcttcaaggggctggatggaggcggtcagcttactcagtgcctcttgtatgcatgcacgctggaaaaagtctgcaatcccctccttggagtcagagggggaggccgggtgagtcactgggcgtgtagctgccgtgaccagccgcatactgccttgtagaatgcctgctctggagcccggccccaccctgggctctgcctttgcgctgggagtttctgcagactgcctcaccccacctaccagtccaacctctgcctcctgcggccgccactccacagcggtcactacggggaagagggagagggcccaaggcccaagggcgtgggggtgagatccccagggctgggctggagttgccactctgctcctgacccaggggctgatcccagtcaagttactacctgggtgtaagcctcagtttcctcaaatgcagaagaggatggataggaattcaagagatccttcgaagttgagagcgaaggaaatcccagaattttcaagggattcagagaagtaggggactaggttggctgagggcaggaggagggtcagcctggaggggttgtcagagtctcagggtgggtgactcatgactaatggaccctggcctggggcaacactctcggggtggcccaggaccccctaggctccatggagcacatgacatcagggccaccttggagtcagcgtcccagggcttcctggcccgcctggctgtagtaagtagctgactgccccacctctgcagggaagagatgaaacaagaccttgcaaggatgctacaaggcgaccacagtgtcagcacagcgagggaccttgaggtccagtcctggtgcttgcctcactgatgaggacaggagggtaggagggtccagggaacttgtgcccggccacatagcccagaggagcccactgcccacggtgggtccagagctggaaagtggggccaggaagggggggatgggggaggagatgctgggctgggtctgcccctcccacccacacccgtctgggcaagaccagggccctccgcctgtggcacttaccttgttcctgttgccgggatgggcctcccaggagcagtttccagccatctccaggcctggcgcgtctgggcccctgctggcagctcaccagtctgcacacccacctggcagaagcccagagagagggtggatgaggacagcagggacccctccccttcctggacccccgtgcctaggcccccaaggcctgtggctctcagccatcaccttagaggaaaggcaatcaccccacaccctcagcagcaggggcattgtgggactgtcctggtgagattctggaggtcacccctggggcacggccccctcctgcctgtggactccgcgtcagccccaccgcagctcactggaaaagaagccctctcctttcccttttcttgtgagagttctggagccaggctgcttttgcagacatacatttacttccccacacacatttttggggcacttcctttgtgccctgcctggtgtggggacaggggtttcccagcaatcggtcccagaaggaggagcaggggaagagggatcattcctggcagggggaacctgctggaggaggagggctttggctgagccgcggtttgtaacatgctaaggcatctggcctttcccctacatgtgcctgggaggcaggacagcccggtcatcagcatcactgtcaccaccacttaccctgccagcccgcctacacccatcatctggtttggtcctcatgaccagctatgggccaggtatcctcatgcccctttgatgggcgctcctgggcttagagggtgaggtcacctgcccaaaggcacacccatagccacaccatgccctgcagccttgcagatttgtgtttcgagcagctgccgtagggagggactgctggcatagagaggggaagctgcacccaccctagggctgccaatgggaggcctggggtagggggtgaccctgctggaggctggtccaccttggccggccagacctcatgggtctgcctgccttgggtcctctggaattgatcccggtcccccaacctgagcttcaccccttggaggaagcttctccccgtgaagccctgtgccccttccccgcagagaagcatctattattattccctgctgtactgggggggtaaactgaggctgtgagcggagaagggccttgctgggcacagcccaggtcgcaggctgccgggcccctcctctcccaaggggagagctgggcatcctgctcagctcaactccccggaaattctttcctctgcgccgcgcgggtccgcccggcctcagccagccacgtgcccccgcccgccgcgcactcctcccgcccgggggcgggccgtactcctggcctccgcgcccaccattggctagaagaggtggccgtctgcgcgtgtggcccgccccctctttaaccctgggcctcccggagctggtggcgcaagtgtggccccaggggccgctcccaggacccttcccacccagtggcctggctcccctcggccccgcgctgccagaccgcgccgctctgcgccttcaaagggcgtttgtgagcacctgtgcctggcctacggctgactcagcctggggtcttcggggtgtcccagggtgggggcaccttgtgtgccggagtgagccagtgcattgtgatgtgtgtgcagtgggcttgcagatggctggtgctgcgacctgtatcttaagtctccctccttggactccagttgggccattgtcccgttgccacagacaggccgtaacttctccacgctctggggcctgtctgagctttcctgccctgcaaccccagacctatcacctgccctcatccttccgggcgcctggtaagagccccccaagctctctccattgcccctactctttttggtggcccttctggacacccaccacccctaggtctgggcccccagccttgtttccagagatgtcctgactcacaggagcctcatccattcaccctggccaggctagaccccagccacaccaactagtgccccaaaggcagtgggctgggctcccccctacgctgcaggtgggcatgcagtgggggcccccagctcccctctctaccatctgcgtccctccattatgtgggtgtccctgtgcatttgtccttgtcctgccagggacaacctgaaaagcgatttcacgcatgcacagaaagatctagaagccagcagaccccagatgggccatattaaaggacatgtgtgtgacacgtggatggggcgtgcgtgtcagtacatgtgtatgtgtgttcctctgggtgggatctgggctgctatgacagaactagtttccactgaagctgacccaaaaagctgccagcacagctcacacctgaccctcccctcggagcaagcccaagggtggcctggccacctgtcagcctcctgcagccttgcccgcaggaagctcctcctctcccttcactccatcccaccatgacccagccccgacgccgctggggctgtcccagcccctctccttagccgcttgtgccgccatcagaggggcctgtctcgctcccccagacacagagcctctgttttcctcactccgggtctggagtcccctgcttaacagcttggattgaagaggcttgtctggggggactgagaccttgcagatcattccaggagccgcctccatccaaggccaacagcttcatcaggccgcaggcctgggagaaggtgggactgcagttgcccaacatcctgtggctgcccacacggacaccccatgtgcaccccagggctgagagcagggggagccatctccctgtgtgtgggacactgcctgctgggtgttccgttccagcccctctagaatgcatgcttgaatggccagtgaggctgggggagggaccgagagggagccctcacccccagcagcacagagcaggagctggacggtggggctgggggtgaggccagctgagaggggtcaggtcctgccacgggagggggacttttaaagttcctccatggccctggaaccctggagcctcaggagtggcaggggagcttctccggtgagtgacagcctctctggggtctcagggctccctgcctggggccttaggatttctgggagctgcctgccccgacagcgtccacctctctgcccctacagtgcccgcgtcattttccttccctgcctggccctcaccctgcagccccggttgttggaacaccctcccctggaccctgggcccctggagctacctgcagctgtcctgatccgccgaggcctccttttgtggagggctcttcctgtgactcccgcctccggccggcggacccgccggggcagcaggccagcgccgagcgcggcccggagccttggaaaataggagctcagagtagagccctctcctgctggaagagatggctttggaagcagaacccgccccaaacccaattcctggcccggcaggagggggagggggaggggagtaggaggaggggctgagcagggctgagcggggatgaggcttcaggaaggaatgccccgctcaggagccccccccagagccccaccgggaactcatctctccgcctggtgacgtcacg

SEQ ID NO: 5622 - DNA, 6000 bp, Homo sapiens
tctgaatgtccccagagaagcagccagaggagcttgtgtccctgggcaactgagcagcctcctgaatgctccttttgcacttgtttttctcttccagctgcagagcccttgctccgtgagcaaagcctgggtgcccaagcagccaccgcagcagcagagtacaacctgcagagaagctgatcaccgggcagagatagagcgagcatgtgtgtgtgtgtgcgcgtgtgcagaggagggagtggtgtgcctgtttgtgtgtgcatgcatctgttgacactcatgattctgaatgttgcctgggctgggggagtacctgtagcacgccagtgctgtttcccggcctccagacacaaggctcgaggttatggcagtgactttcagctgagacctgttcctgcaagccagctgccttgtctgaacagaacgtagtggtaggaccctagctgggattctggcatctgcctccctagacctccttccctccctcctcacgtcaggctgtggagcaggagcacagcagttctggctgttgtccaaagcatgggattctggaggcagccagagccctgctgagttcctgctttctgacctggaggctgagcaggccggagtggatggatgctgtccagacgtagccacctggcctctgtttcttattttaaaattctctgctactgggctcagtcccaggcccttccttgggcttctgggactgagcatgaggccatagacagatctaaaaagtttccaccaccctacagaagtacacacagatacctgactggtgtggggtatgcctggtactgtaataggagcctaagacagcacacctaccttttcaggatttagaacctaaaattagaaagagaatcccagctgtcattgttccttccccagaagctaagagccagcctcagagcctacccaggagctgtgaaggggcaagggtcaaactgactcactctaccaggaggagaccaggttgcagtggcgtaaggccccctggtttctctggccacactccaaggcaccacagtgctgccagtgaggacagctgacacccagccagggaaaccattctagtctttattctgttggcttccagggcctgtcctggacttgtcagcatccagactgccatgtcagctatcccagtagctgagctccaaggactcaggcagagggactcagggatggggactgccaggggcagttggcaaaagtccaagtagagattacacccagaacaccattccttccaggagcagtaggtgggaggtttgacccagagaagccaatccttgcattccaggagtggcctgtgcctcccacctcttccttcccactgccaaaggcctgtgttgagaaagatgtcatgcaaaaggacgacggtggccaactaaagcaagtcttccttccaccctgtggcctgcacttgagccacaaagtgtgtgtgtgtgtgtgcgtgtgtggtacgtgtgtgtgtgtgtggctatgaggctgattcctgtttggatttttgtcctcacgtgtatcattaagctggcctttgggccttttcctttctacctcccctgtgacctttcctagcctcagatctgttaattcttttggccccagccctgtccctcactgtcctctgtccttggaccagaaccctggggtcagacccatctcctgtagctgtccatcacactgacaggcttcttcctgagatatcctcaggttttctcagccagagagctgcctttagagtccaactgttgtacgtatgtcaccttcactagaaatgtcccatcatcgtgggaggggagcagggcacaggggatggtgtgcattcagagcattgggttgggggcttccctgttccctcagccccagtcgagaggaaagagaatcgggccactgccagaaagagagtcaagcaaacctggaagggcaaatctgagagtgggaaggccaaaggccgaggcccagatttagtattcactagcagcgccttcgggtagcaggatgattccttttcctgcctgtctgctgctggctctcttccctaaggtacaggttggcaggaccacctccgcctacttctccaccatccctagcatgtcagcccgttcccagatcaacctgccagtggagtcaggcagtgcactcctggagccaagagggaagggcagggtagagagggtatgtccagtagcctggagctccatggtggcttcatgcctcccttctcccagctcaggtggccctgagggctccctcggaacagtgcctcaaatcctgacccaagggccagcatggggaagagatggttgcaggcaaaatgcactttatagagattttctattgctgggaaggtgtgtttctcccacaatttgtttgtgaatattcacttgttttataaatgtctgacctgtcttgagtaagtttgtgctgtcgtcaatcttgtgggaggcctgggaaccagggttttggtaagcctgagcctgaatgaagctgtcggccaccccatcttggttctgtgggagtcaggagcctcctattcctccttaggaagggggagcagccagagcagactggagcagcttggtcaagagttggtccagagcttggtcaagagttgggggtcaattggccaaaatagtacagagcactctggcccagagtgagggtcctaagtgccatcctgcagtgccacccagccttgcagcccacttaaaccccctcccaggctgggggtcagtcagtgcagggcctgctccacgccctcaatccatcctttaattcaatgcagccacttaagctgcagcctgtggtgaggaggggatgcaggctctctggctgtgactaggtggttgagatctgcccacagccaagcctagggcgcctggatgctggctttgtctcctggccagagaatggcccctctctgtgcagtgtgccctgcttccatgctaggggatgctagccttggactgaaagctttattagctcacaccccaactttctgggaaggggcccaggcaaggcccaagaatatcacagtctggcctgcacagagtgaagaaggagaaaaggggaggaacctgccttgggaacttgtctcattcttggctctgctctgaagctcctgctggcctccctcataccaagacctgggcctgcctttccttcttgcccttctggcttctctctaataatggctttgggttggtctttggagctaagataactttgctcttgagcaaaaggttctggaagagggagttgtcctttacatccacccctgacctgctaaggatgttccctagctgaggcaggtctacattctaaggaacgattagtagccatgatggcaagactgctttcctgagaggaaaagccaggcaccatggcagcagatgattaccgtgagggcccagtgaaaggggcctgatcacgaaagctgagaaagtagtggccacccctctgggccccagggacagggaaaagagaagcagccatgacctttggctctaggtattgggatattctcagggctggtggtcggaggttgccttctgcacggaaggtgcctccagctccttgctaggtgccgcactgaaggaaaggggccagcatgactggtcggcagtccagatttgcaaataggactccacgagttgtggcacagtttgctctgcacgttttctgccctgtggacagggtctctagggttctctcgagagaccagagaagccaatgaggtttgaccagaggctctacgacccagcaaagctaaggccctagccttggcagtccgtactctgaaataactcaatcgggaaactcagggacttgaaggcctggaagcccaggaataacaccctctcgagggagagacaatgaggaagaagccatggccaaagcctagcagggatggaggtgccagagggaacagaaacaaccaaaatgatcccaagaagtcaacagtgggaggagagggaaaggcgccaagtcttagaatgtgtgtctgtgggtgcagaagaggggtgctctgcaggaaatgcagttgaggcgctaagaaggagaatgctgggaaggtcctggcgagagaccgagaagcctggagggctcaattcaccacgagtagctgtttggggctgaagagagatttgggtcaatctttagagaagacagcctctagggagagtctttgggagggtcccctcaaggtaaagggacaggactggggtgagggctggatcccagcgcaggaggtggagtgtttctgggtctcaggcaacacatttgtgttacgttacattctcacaacaaccatgagagggactgctattgtcccatttcacagataagaagaccaaaccttagtgctctgaagtcactaatgcaaggccccactgcccagtcacttgtggagccagtgaattcacaccacctgactccaaacctgtacactttaagagcccactgacatcctctcctttctctgccttcctccacgaccctccttttccgcctgccttcttggtctctgctgcggggggccaacctggaccttggggtccagtgtcctgccattagtcatctgatacccgggcactaagcccaaccggagggacaaagcccacaccggccacggggtggaggagagtcgatgtcggatttagggcggggctgaaccaagcccagggccgcgggggccgtggcttcagcaccgcggagagcgccatctccgggggcggggctggcggggtgggggcggggcctgggcggggcgcgcgagaccccggccgggtcccgggggcgcgcgcggggcgctctcgccagtcccgcgggccgtgcgcggtgctgtgccgcgccctgccagacacaggtgcgcccgcctagcccgaactccgcggcggcggctgccctctcgccgcgcctccgcctccttcgcagccgccgcctcctccgcgccgcgctccgcccggatggccagggctgtgcccgagaatggcggagcgagaaagcggcggcctgggagggggggccgcgtccccgcccgccgcctccccgttcctggggctgcacatcgcttcgcctcccaatttcaggtgagagtccccggccgccgcgcgcctcgcccttcagcggggactgatccgcattggctgccctgcccgccccccaccccagaacctcgggaacccgggaacgaaagggctgcgtgggagtggggtctcttcccgggacagagcccccctcagaagccccgccagcctcaagtccggactggtagccgttgcatgttcacgaggctgttccctccgccattcctggtcctaggctgggaggtctgcgctggaattggaggagggggctcggaggcctccttctccccaacctccgggctgcggcagggtctggggtcggggttgcgatcccggagcgggcaggcaggctgcatcttagcctgtgaatagagctgggaacagcctggaggggcgcgggtcgcagtttcctggggcaacgacattgttggtgctgggaggaggatgtttgagcccctccccgagccctgcctggccagatgggcctacctgccaggcctggcgtggccgggcccctctctggattgggcagcaccgacctaggcaggtgtgtctctcagggcaggcgctgaaggctcagcctcaaccaggggaatcctaggcccggctgcgggaagggaagtcggctcggctctggagtagccagggccagcgagggtgtcgaggggatccctgctggggtaaatacccagaaccctgacctgagctcctattccaccacccccaccccccaatctggtgttaggcccgatgcatttcagagaagtgaggggtgagtgttgtgtggaggaggaatagatgtacctcccccataattctgaaccctagttggtggggaggaagaggccgaagtcactgctcccggcctagagagggaggcttagacataccccattgt

SEQ ID NO: 5623 - DNA, 6000 bp, Homo sapiens
cctcagcctcccaaagtgctgggattacaggcgtgagccaccgcgcctggcctaagactctgttgcccaggctgctggagggccgtggtgggatcctcctgcctgagcctcccaagtagctggactacgagctcacactaccaggcctggctaggaggggggaggattgcttgagcctaggagtttgagaccagcctgggcaacatagggagacttccatctccacaaaaaaataaaataattagatgggcatggtggggccagcctgtaggcccagctactggggaggctgaggtgaggggatcacttgagtccaggaggcggaggctgtagtgagccaagatcgcaccactgcactccagcctgggcacctgggtgacagagctagaccctgtctcaaaatgaaagaaagaaaagaaaagagagagacagagagagagagaaagaaaggaagaaaaaaagacacacacacacacacacacacgcacgcacgcacacacgcacacacgcacacaaaaccccccaaaaaaacatttcctgagttctccgtgtcaatgaaactgacctaggagaacagaaaagccctcagggctggcggctggtccggcgcgtgcaggcagccccgtctgagccctgagaagcagcccgggcctccctgaatcccccatcaagggcgtctttgttctgcctgctccctcccgatacagttcctcgttttggggccaggatgatcatctcctccaggggctcttcccatccagggctgggcagcagccacagtgttttcccggcacaccctgggctgcctcaccccccaggccgcgagttcccaggactggaaccagaggggcgctttccccggccccgtggctgagcccgggacagtgtgggcagttctggctctggcctcccccggccccgtgggtgtcagaagctgggctgaccactctccctggagctttcctcccttcctcccttcctccctttctctctttctctctttctctctttcgttttgagacagggtctagctctgtcacccaggtgcccaggctggagtgcagtggtgcgatcttggctcactacagcctccgcctcccgggctcaagtgaccccctcgcctcagcctccccagtagcagggcctacaggccggcaccaccatgcccgtctaattattttattttttgtggagacgagaacctgaggacagccatgtcctgagggtgctccctgggggcggagcctacctgggggcggggccttacctggacgtggtactgcgaggtctcgtgcatgatgacgttggagttggaatacttcttcctctgctctgaaccgggagacaccagtcactcccccgacgggcaggacccacagcctcccgtccagttgggactggacccacaagggaaggtggagtcaagcggagggaggctgctccgtggacctcttggccaccaggaaggatgtgggtgtgaaatcaggacctgcaggaagccccctccctccctccagggaagcccccttggagaaggacgcagctcggagaaggcgatgggcttgctctgagtggagtggggaccagcagcctgtgcccggggggtttctgtcccggagggtgaggggacaggaagggggtcccagcccggcttcttcccactctgagagctgccagcttcactctccctgccctcccaggtcttctcgctttccagactaggcaccttgtccaaagacataagtgaagggtgcatctagctagcgagagggcagggtcgtctctggggaagggcagagtggggggaggtgggggctggccaggcccccctcctggagcagacacctggcggcttatcctgcctgaacctcgctgtgatcaggttacagcaatgagtgcagcggaatcaatattgatgctccctgaattattagtaaaggcctctccccttacgggtgtgggggaggggatccagtggccaggagctttcggaaggttgattagggtccagaggcctccctgggcacccggagatcccctgggccagaccaggcacagctgtggggcaggagcagctgtcccccacctggatgcagtgcccatttctcccctgtgacgtccagcccgttctcaaacctcactcaccaaacaggtccttggggctcatcttggccacaccgtcggaccggcccaggctgccactgcaggggaggggctgtcagggcagggccaaactgcacccctccctggggactgttcagagggtgagggtggggtattcgggatgggtgggagggctcacttggtggcacccgggcagcagctcacggccccggactggctcatggtgtcttgggtggcggccagcgggagaagggcagacctcagtgtggccccggtctgaggccagtgcctgtcccacacctgggtggacagaagggctgcgctgacacttcctccggcctggctggttcctcccctccttccctgggccagatccctgactggcctggcctgggtgggggtcccttggggggcagagcccctgcccgacatcccagttggccccacgtcccagttggccccacgtcccagttgacagtcgatcagcctcgtcatgcctcagaccctaggtgctccacagggaccccccagaggctgactgggaggctctgacaagggccctgggggcagaaggcgccttccaagctgggcagcatggagtttaaggccctggtgctgtggggaggggggtgggatgggtaaggggagggggatgaggtgggagtgtggggggaggggggtgcggtgggggttgggggagggcgggtgggagctgcaggatggcaggagaggtgaggctggagttggggtaggtcctgaagtccagagggagcccggctctagccgccactcctgccccaccccaggcctgcaccccaaggggctcctgcacccacatgtggacttgccacccacacatgccacctctgtccaggccccagcaaagaggctggcccttggctctttcctgggcctgggagacctggcagggaagaggctgtgcgggcaggaaaccctggggtccccggggtgcagtgtttcctcacctcgagggcagggatgcggccaggtggccagcgcagaacccctggcagcagccaagcctaggggagggactggagggcaggtgtggtgggggctgagactgggagccagtccagtggccccaacacacagtatcactgcccctccaacgaggtagggtggctatggggcaggtgcctctggcctcccccaggggcagaatcctcagagcctgtctctgggctcctagtgctgacctcttccccgagcattttggggaaactaaggcccagccgccagggcagacaggtgggtctgatttgggctggaccctaggggcttcccggggggatggacagagcctgatggccctgaaccaggctgacttgtcccaaggggactatgccctgtggggacctggctgttctgtggctctgtgatcagctccccacaggtccacaccatctgcctcctgccagggctgcagggctgtcccctgtggcttcagagtttgggtctgccacggtgggggtcaccagccactgctgttggtatggagggtcaagggagtggctcggagcacccgggactttctggtttgaccaggtctggcctagtgggagggtctgggaggcccgggggcactgccgctgacatgaggggctgggtgcaccagggggtatggccacttcctccatccatctatccgtggagaatgtctggaatgttcacgggctcagtggcgagcctgagtgtttgcttaatgggattcctggcgggctccaccaagggcgccaggcacgtgtgtccaggcacacacctgggcgagacaccaacgcacccttgcagactcaggcctgggggcacgcaaacatggagggctgtgacacgcgacccccctggggaaggccaggttcctggccttcggttgcctgcagggcatcggggacctcaggcccaggcagggccgggcagcagtggggtgggtccaggtgtggtgtctgggtctgaagcacatgggtatggggctgcctcctgccctgtgggagccccgcccccctggggaggcttctttggcccactggtggtggggacgaagccctggaggcccaggctgcactttgtactgtggtcattttcccggtgtgaagtgaggcagagcggggtgcccggtcagtcgggctgtggaggggaggaggtcccagcagggcaggagggtagagggacgggctccaagttcaagttccagctccacatgctgagtgaccttggggaggggtcagctgagtcacaggggctccaggctgccctcataggcgctgggtggggccctggaatggggaggcccctcaggccctggccctgtccttgtttggaagctatggcttgagggaggaagggataagctggggaagctgagggtgggaaaggagaccgaggcaggcggagaaggcccggtgggagagctatgccaacaaggcctgggtgctaagcaggcccgggagaggctgggacccaggaggggccgcgaggggaggaggggccgcgaggggaggggccgccgccagctgggcctgcctcccagcacagccgacccaggactgagcacggggtgggtgggggcagaggtccgggcatgcccggccctgcctccccctcccctgccaccagggacaccccgcagcaaggggcaacgccaggcagctggacgcagggaccaggaatctaggatggctgaagttcgcgtgcccacaggctcctgccagcccaccctcctgcctctcctggcagggcctctgcagcccctgtcccagcctcccctcctccctgaaactcccacccccaaccctgacctggagactgacccagctggtgcttcccggccactggtttccttctgggctccgacacccaggaagtgcctcctggctccggcccacagggagtgggtgtgcagtgctacctccacggtcaggccctcgggagggtcctgctgctcacagaaccgggagaagcctccctaccaccagcgctctccggacgcagggattgcccccaccaagccccagagctgggagtgggcaggacggggcaggtgagtcacccatcgctggcttaaaaatatccttgctcgccggccgccgcccaggaccgacgggggcaggccgggctgcagcaggacccgtccaggagaggtggggactcgaccaggcccccagccccttgccccgcgccctcggcccggccgccctccaagtgccccgcgccctgcgacgccgcgttcgtcccggtgtcctgaaccagaagccccgcgtcccatcgccaccgggtaaactgaggcccgggcgggcgcgctcccccgtgtccgcagcgctcacctgcctccggcgccccgcgctcggcctgtcccctcggcgctcgccggtgcgtccgtctgttcgcgcctcggccggggcgccaggtctcccgcgggcgggtgggacgctcggcggggccgggccggggcggggccgggagaggaggaacctgagcgacaggttgcggagtcacccgagagcgggcgggcgcgcgggggaggagggcgtgggatggaggcgcccccgccggcctcggacccagctccgccccgccccctgccccgcctgggctccagccccagccctctgcgtcctccccaacacccgcctggtgtgcccctccgcgggcctagcccctagagctggggcgctggggacaggcggggcgcagggccgcctccgcgggatgagcagggcgaggcctcgagctcttccttgggcagggcctagctgcgccccagcaggccgggggacgggggaacgctgccaatgggacttcgggggcagcgctggcgcattgctggggagggctccagccctggggaggtcagagcct

SEQ ID NO: 5624 - DNA, 6000 bp, Homo sapiens
gggcaattcagtggggcccctataatggcagaagtgccatgggggcccactgagtggggtagaaatgccacagaggcctctgggtttgttggaggaccccagggggtgctggagggctgagggtagcaggatggacaattatagtcagctggggctaaggacacctgtgaaaagccagaggggaagctggaaggtaggagtgcaacagtcctgtatgaggaggggcaggaggatccagaagggtggcagagtgagaggaattgctggggaaatggcaggaggtaagggaaagtttggaagagacaaagattgggaggaagatgtggtaggactggaatggaatgtctgaaaacagggggagttggaattaaggctctctcctctttcactgtcctgccttgggtctgcagtcccgggcccctggctagagctgggctcccaggctccttctctttacctaatttgccgtctatacggggccgggactggacagtggtgactgtggtgacaatggtgccatcgggcatgatggtccggtcaagctcaatcttcttggtaggtgtgatgctggggcgtggagtggaggaggtgggagtacccaggttccggggagagccctcctcatagtgaagctgcccaggggtgggagagagaagagacagagcctcggagactgcccatcccctgtgtcctcccacctaccccaggggtcagcttctcacctccactgccatggtggctgctggtcccagggctttccctggccctggggtgagtgggcacaactgtcttcgagacagtggtctggagggggagcccacaggcagtgtggcctggcctaggagttcggctggggaaagggatggcactgtgagctgggcccatggccagaccccactctgtacccacccaggggtgcccctcccacccctcacttactgtctccacagctgctgctcctcagcactttgagggtcagctcccggctctgggggcccagatccctgtgggacaagaggagatggggcaggaaggagaaaattagcaagctgaacccacacttgagtggatcacaggccagaggcagagagctgtgtacataaataaaacggcataaatgctccaatcagattctcctggcctccaaattctctctcgtcccaagagaaagggacagggcctgagtggaaaccatgcttctcagctatgcattcaaatcctccctggtcctgctcttcctgtcttgccagtctctcagttgcaagccaccctctttcatttgctccagctcttccctctgccgagaatactttcacactctgatgaaatcctactcttgctctaaagtgtggtttaaatgtcatctcctccatgaagcctactctgatccttattccctcatgggaattaatctcccccccacctaggcactctgacggcacattacataaacctcaactggagcggttttaccatcttctttatgtacacctgtctctgcctcaagcttgtcattgacccaggggtgggggctgtatcttggtcaagtctgtatccctaagacccacgccagggcctggcatacaataggagctcacgccaaaggctactgaaaacagagctgattcctgcaaggactgtgctggaaaggtttgatcctctctgctctggagcatggggtcggggcagggttactccttacagtgccaggtcttctgtccactccacctcggatccagccctcgcgggcttggtccacttctgctgcatggggttgtcgagttcagctacacagcacagttcctcggtgcctgtgatgaaccagaagttagaagatgctcagatcagagatgggaagtcactgcagaataaagaggctgtacccttggcagaggggcagagagcatctgcaaccaaccatagccttggcagtcccgcagccacttccagctctcaccttccagctcatttcccaagtgagatgcccgaagctgccgtaggaataaccggttaggtctggggatggctggctgagcctggggcatcatgggtggcttctcactgggtacctaagagcagaagaaggtccaaagagcaagaatcctgacatagcaccctaggaacaaggtgcatgcaaatcttttgctttgggtgccaactcaccaggcctcctggggcagagcaagccctgaggttgaccatcatggctggctgggtgctgactatggcatccttgatcagttcctcaattgtggagagctccacttgttcttcacctctctgcagagagaagaagggaacaacaaggaggtggatcccccacctctgcctccctccccgttctgcctcttctctgccagctctgcctccttacctccctggcctgaagcttgggaagcaccgttaggctgagatctgggcgatcagtgaaggcccaggatatgagcagcccctcaccagggatttcctccaggttgacttccaactacagacaggaacaaagtgactgggctgacttgccccatttacccaaggactcctaattcgaggactctcccttcctgaattccatcccagagaggaaacaaatggaagaagctgagccaatggaaccgcccctgcccaactcagtttcccacatccccttctacctgtgttggtggcagtgtcagagtgacgtggtaggtctccatggagacggcagcgggggactgctgggtcacagagactgggaaccgcacctcctcagcagagagctggcaacgcagcacctgagaccggcgaggtgggtcagatgtgggggaagggtgctcaccctgctttgaactgccctgtaatagttcagcagacccctccccacttccgttttcctaaggacttcatgttttcaggatcataaatccctaaaagaatcagataaatgccaaagactcctctccccagaaaaatgcatataaacacacatccaacattttgcacataacttcaatgggattctcagacttcctgaaaccaatccttagatccataaggcattcacagactccaggttaagaacctctggactaaagggagcccttggggtcagtccttcttggaccccaaagagggcagtgcccatcagacccttaccatggtatgctcagattggtctacgcaggtcacatgactgatgctggctctgggtgggagttggggcacctcctcaaaggcgatttggatggagctctgagggagtaatgtgggcattggatcaggtctctggagctgccccccacagggttggcctgctcagttgctggctggactctgccactgcggaggcctcagctgcaggctggcttctggcccctccttggctcagggctttaagacaggaggtagtcccctcaaggcctgcctctccaggggcctgtagctgctaggagccactgagcaatggggaggtagtccacctcagagactagatcaccttaagctgaagaccctggcttcctcctggaataccaagagcttccttcttcttctccctgcaatccctttcatcccctaccctaccccctaaaaaaacaaataacaaacaaacaaaaaatcctacatagaaaaaagttaaggtgctggttgccacctatatataatagctgggcagagggaaagggctaagccccggtaaaggtggtagagccaccttgttcaagataagagctgcagaaatgaagctaagccttcttccaaataaataagatgtggaggcttcaagagtatgatgcttcatattcttggagatgaagatgagcatggccttggggatccgtaccagggggactgggaagagatacaagctcagaggacccaagagtccaggggcctggctaattcctcaaggcagatagcaggacggtattagagagcagaaagctgcttagatctcaaaagagctgctccctaattcgtccacagtaatggaagcaacctaccgcagccccacctggagagcagtgcggacacagaattgaggaaggggcacagaattggctggcaactcttccttgggtcttgagatggaggaaacaaatccatagggttcatttgcttggcaaaccaggggaagccaactcctttgctctggtagctgtctcattcaaaggctaggccaaggaagatggggagatggatgcttgaaacctcaatctccccaccctctgcaagggaggccaatgtccagttgagtcagctatcctggggagttgcttctgaccgagggacaaggtacagggagagttggatgaagaggtgggttcaaggtgtaaactgacagatgccatctggcttttagccagccagctggacagagtaaatagagcaatttcttgtggacatttctgtttccggcatctggggaactagtaaggtaaagcctccaaactcatagtggctggaaatagagaaccctctgagcaaggagctgatggactgtgagagcaaggagagattgctgggtcaggatgggagggagctccagaaaagagagacttctacctcccaccttatctccatctcatgaccacgcttcctgccccacttcctgggaggccagatgcccatggtgcaatgggaggaagtaggctggactggtttgtgactgaccctcaaggggcagttccaagctcatctactggtaggggcactgtcaatctgctctccacctgaacactccccaacccccagtgaaccacaggccagcatggaggagaaggatgtgtttgactgtagcagtgaaattactgtcgggtaggggggtgattcaggctccttggggatctgcctgaccacaccagggatttggggcatgaaatgttaaatgggtgtggtggcatgagaagcaggcaaattccttctgcaggtgcacctgtctcccatgccccaacacaaccagcacccaggcaaggcggaagtgccctcaggcacagggattagcgttgctatgagaacagcaacttgtgcatgggtttggaaccagagtaccttgcccacagaaatggaagtctggggacccagttggatttctacaacctccagccttagcggcacccttttctctgatccgggaggggaagagaagccatagggttccccagtttatgcccaccctcgtctggcctcctagcacgagcagtcagtccctcccctggaaggaaaggctgaagggaccacccaagcgcttggtccaactcaccccgtttctgcaggcctgctcgttcagcgctcgcacccaagcccgctgccagttctcccggaaagacttgaaggcgaagagtgacgccaggaggccccggactcctggctcctcggcggcgccagcccgagtcgcccgcagccgcagcagcgagcgccacacgcccagctcccgcagggaacccgcgggttccccggctaaggcgggtcccgggccccggtccccgcgggcccgcgccagccacaagccccgggcatattgcagcagccaggcgaacaccgtgagcagcgaggcggcgaagaggatcagcaaggccgcccagcccacgtcccgctgcccccagcccggatccatgctccgcgcgggctccgatcccggtcccggctggggctcacccgctgccccgggggagcatggcccgggcgggccgcggggaggaggtgggctcccccggggctgggcgcgcggggtcgggggctctccgcggctgagtgcccaggactagtgggtgccacagggcgaggagaggaggtcctcgggggtcgcgatgccggggtctctgtctccgtggtccgggtctctcctagcttggtcagcagtcggacccgttagtcgccggccagtgcccgactcctcccaccgcgcgggccccgccggaccctggaggggactggtctgcagagacgctggggctcgcgggccggcaccggctccgggagggctgcgtgcgcagagctgacactgacaacaccgccggcgccccg

SEQ ID NO: 5625 - DNA, 6000 bp, Homo sapiens
ctctgtttttcttgtcctcgattctggtatttttttctcagcatcccacccaccttctgccccagctgtagcagttagttgcccggcaacccagcgcagcacttcactgagggattgggagtaccctcaggtcttggatttaactcgagacttcagcttggccgtggatcactgcattgtacctagctcccacaaggaggagatggagatttccaggctgaggctctggaaagagctgaggagggagaggaatcagacccacaactgatttcctgtgagtctgaggaactcccagtcaggtttcttcctgtaggtcactgtgcattttgcttggcctcctgcaggttgctgtgcattttgcttggcctgttcccctgcaaacaacaattcaccagctttttttttttttttttttttttttttttgagacagagtttcgctcttgttgcccaggctggagtgcaatggcgcgatctcggctcaccgaaacctccacctcccaggttcaagagattctcctgcctcagcctcccgagtagctgggattacaggcagtagctggaattacaggcatgcgccaccacgcccggctaattttgtatttttagtagagacgggatttccctatgttggtcaggctggtttgggactcccgacctcaggtgatctgcccgccttggcctcccaaaatgctgggagtacaggcgtgagccaccacgcccagccagttcaccagcatctttattacctttcattccccgacaggctcttaggcggcaaatgatttccatttgtcagagaggaagtcaccaccagtgagttagggaaaggactccaatagcctagcgctttgtccactcttccctctatggcatgttccaggagtcagggtcatgttgaccgtttttaagccgaagatagtttcttctttccctcaaaatcagatgtgaggccgggcgcagtggctaacgtctgtaatcccagcactttggtaggcgaaggtgggtggctcacttgaggtcaggagttcgagaccagcctggccaacacggtgaaaccccgtctctactgaaaatacaaaaattagccgggtgtggtggcacatgcctgtaatctcagctactcaggaggctgaggcaggaggatcgcttgaacctgggatgaggaggttgcagtgagccgcgatcatgccactgcatcccagcctgggcaacagaggggaaactgtctcaaaacaaacaaacaaacaaactaaatcagatgtgaaatggcttttctacttgaaaatggctctaattaacaacaacaaaaacccagatatgtataaaatacataaattttcgtaatttacttgctagtattccaccagattttcagtacttatcccactgctattatttttctgtgtgtgttgtgtgtatgcacgtgtgccccttttaaactagaaactcccgggaggcaagtgttttctcttccacagggtgtccccatggggctaggaacacagacatctgtgtacaaggaaggcatcatcacacataatgaggctgaggctgaaaggaggactgagggcaataggtgcatatggagggagcaattagttgtgaccagagtaagtggtcttgaggaagagaagtatcatttcagtagattataagagtagaaggacctttcacaggcagcgacagtgagacaccagaagctggtggaaaggaggagcttgtgggatcccagaggaggcagcattcagttatcttgttgatgacgagtatactgagactccctggaggtctgagagccagtctgtatctatttccttttttattaggaggccaatcctaataaatcttccttcccagcctggtattgggaagctttatctctttcttctccagagatcattagccctccctaccaccaccctcctggggagggtggaaggatgtaatcaaagacaagagagactaaggattcatcatccacatatacatgttactatcagaaaatggttactaagatacttgtcagataatctgagtatttttgttcccatgatgataaagtcccagttgatgatcagactaatcagaaggagaaacaaacacatgacttttggcttcacttgaaattgtgtgccttccctggtaaaagttcaaagcgttttcctgaatgctgaagccggccctaggattcacagaccagttgacttgtcagtggccctggactgagcagacagtgtttgagatgcacacctcttctaagtagccttgagtggctcccaatgagcaaggccaatccactgaatgtgattgctagacaaagcctgtcccaaaaatgtttcatagtgccacaaagacaatgagacccctctggatagtctggggctgtgatacttgcaggactctatctgtggctctgtccagtcagctgaatcactctttttccttttcctcccacctctcccctcttagtctagaaaaaagttgttaattaaaagcaagccccaggatttcccattccactggtatggcatgaatgatatttcaaaagacagaaatggcatagaaattctcaaagcatacttgagtattttctgttagacttcttaaaattacaaagtttgttaatccctactatgtgcataggaagctcttcagtactgtggaggatacaaactaatataattgcagttgcttgcccccagggagtctacttcagcatatttggagcatcttggttgaatttgagggaaaagagatgactaagacatggttcccacccctaggcagcttcctgatgcatggaaaaagcagacatataaacaatcagctagactctaaggcagaatgtaagtgctagaggtctaagtaatggaagaaagaaggaggactaggctgggcacagtggctctcacctgtaatcccagcactttgggaggccgaggcgggaggatcacctgaggtcaggagttcgagatcagcctggccaacatggtgaaaccctgtctctactaaaaataacaaaaattagccaggcatgatggcgcatgcctatagtcccaactacttggtaggctgaggcaggagaatcactcaaacctgggaggtggaggttgcagtgagccaagatctcgctactgcaccccagcctgggcaacagtgactttctgtctcaagaaaagagaaaaaaaaaaaaaaaaagagggaggactaactagggagactcatgtaactaggtagactcacagttcagatactgaattgtgaagcagtatctggcagcataggaccaagcactcagtggagaagttgagggaataaatcaaagaagtcagagaatggagatcactagggggtctgagggttcctgaaggattcttgggggaagagggtcttcatagggaaagcttctacctggacaacttcctgcataacctgctcccctaaaccctagctgctcttcccactgacagcttcctcctgcatccctggttctggccctgagttctctcctcccttgatttcatgtcttctcctccctttgagattagaaacccagactctaggaatctccactgatttggcagtccagtgacaatgcatgggcagggccacaggaggttacctcattcacccccacctctccccatcattccttacagggaaatctagggaggcccaggctaccccaccacctcctctggctcagacaaacctgttgctgacctgtcagtttctgtctagccctgccatcccacacttcagaaggcattgtttattctcttattctcatgtgctcattcctcagacaactacttgggtttgggagaaagatacttaacacctttccatcctacctctttaagaaagggactgtgtgccaaagaccttcccacatgtatgaagaaggggctcttgggagaatgtgaattcccccaggattcctttgaatccttttgcaggtatttccttcccctgtcctcagcaagcattgatgagccccagtcctgtagaggttgaatcaactccttgagtctaggaaaagatggcttctgaggccagaggttgggcagtgtacctacagcaccatttcttgggagcttgttgggatatcacatacttagagtggcaaggtcttgtggctgaatctattgatagtccagtgctacattgccagctcccttgtcattaccaccccctctacacgtgctccataggcaggagctgttactatggaaatacattatttttaaaaacagacacacagcctgggcttgggaatctccagaacaaacctacacgagcaaggaggttaatggggctgtttctgggtccaagctccaagaggaaggagggtgatgatggtggggggaattcaaattcggtgttctactctcaacctctcccagcttcaggttctgctttctctctgttgacatcagctggacctctgccagacacttctatctgggagggacgctctgcgtctccttaccctgggcctagcttcccccaggaaatgggaagctagaagtcgctgagtctgggggtgttgggagaagggggcggtgatttccacaggggtcacctccttcttaacctcacaggcgtccgacctgtggaaatctaacaagcataggggaaagcaaaggcagcatcttaggtaagtgaagttactcttgccttgagctgagtgtgggagcaccgcgattgcaagatggggcgaggtgatcaaagatcccgcctattttcaaccccggaacctcctccgctcgctgctagccctcccgccctcctccagcgagggagcgccaggctgtcctggccccgcccggcgcgggtgcggctcctttaagggcgggtgggggcggggcgccggcggtgttgtcagtgtcagctctgcgcacgcagccctcccggagccggtgccggcccgcgagccccagcgtctctgcagaccagtcccctccagggtccggcggggcccgcgcggtgggaggagtcgggcactggccggcgactaacgggtccgactgctgaccaagctaggagagacccggaccacggagacagagaccccggcatcgcgacccccgaggacctcctctcctcgccctgtggcacccactagtcctgggcactcagccgcggagagcccccgaccccgcgcgcccagccccgggggagcccacctcctccccgcggcccgcccgggccatgctcccccggggcagcgggtgagccccagccgggaccgggatcggagcccgcgcggagcatggatccgggctgggggcagcgggacgtgggctgggcggccttgctgatcctcttcgccgcctcgctgctcacggtgttcgcctggctgctgcaatatgcccggggcttgtggctggcgcgggcccgcggggaccggggcccgggacccgccttagccggggaacccgcgggttccctgcgggagctgggcgtgtggcgctcgctgctgcggctgcgggcgactcgggctggcgccgccgaggagccaggagtccggggcctcctggcgtcactcttcgccttcaagtctttccgggagaactggcagcgggcttgggtgcgagcgctgaacgagcaggcctgcagaaacggggtgagttggaccaagcgcttgggtggtcccttcagcctttccttccaggggagggactgactgctcgtgctaggaggccagacgagggtgggcataaactggggaaccctatggcttctcttcccctcccggatcagagaaaagggtgccgctaaggctggaggttgtagaaatccaactgggtccccagacttccatttctgtgggcaaggtactctggttccaaacccatgcacaagttgctgttctcatagcaacgctaatccctgtgcctgagggcacttccgccttgcctgggtgctggttgtgttggggcatgggagacaggtgcacctgcagaaggaatttgcctgcttctcatgccaccac

SEQ ID NO: 5626 - DNA, 6000 bp, Homo sapiens
ccaacatagtgaaaccccatctctactaaaaatataaaaattagttgggcgtggtggcaggcacttgtagtcccagctacttaggaggctgaggcgggagaatcgcttgaacctgggaggtggaggctgcaatgagccgagatcgtgccactctactatagcctgggtgacagagcaagactctgtctcaaaataaataggctgggtatggcggctcatgcctgtaatcccagcactttgggaggccaaggtgggtggatcacctgaggtcaggagttcaagaccagcttggccaacatggtgaaaccctgtttctactaaaaatacaaaaattagctgggcatggtggctgaggtcaggagtttgagtccagcctggcgaacatggtgaaaccccgttcctactaaaaatacaaaagttagccaggcatgatggcatgtgcctgcaatcccagctactcagaagactgaggcaggagaattgcttgaactcaggaggcagaggttgtagtgagccaagatcgagccattgcactccagcctgggtgacaagagggaaactccatccccccgaaaaaaaataacaatttttttaaaaagaatatgaatggcagaaaaggaagagaggtggggaaatttggtgactagcggcatgaggagggggatttggttttgaaagagcagggagtgtttcagtagagagggaagtgtgtgagaagcccccacagcagatttttaacgccttagggtcctgaggagtagagtgacacgctgtccttgtcactcacccccctgaagccgggccttctccgcctgctggtagattccgaagaggaagcggaagctgaagtcctttagccggctgagacgctgcatggtttggggtgaggcccagggcggcaggcgcagcccgtgcgtttgctgtgtatcgcagcaggcaggttagcgccccaggcctaggccagcctctccagggggcagctctcttccctagtgggaaggtgcctgtgtgtgtgagggagggagaggggagagaggcagaggggctggaaccagtagacatggcaggcggtgtggatgcttcagggcacaggaaaggaagctcaggcacaaaaagtgagactcagcagaaaggagctctgggtggagagcagcagggactgctgacaattaataaaccatttcccactctgaggatctctgtcacccatgagggaagttcccgtgtttcacaagcacagcctccctggacctccccaggggcgtgacggtatcaggcactgtgttctaccgtcctggtgacctgggcctgctgagagggaaaagaatgatcacagtgggcaccctagtgggctcacctcacagaagagtgtgtcatagacattccagacggtctccagtgtcaggtctgtaagccctgtctcgttggccaccatgtccagaaattgctatgaaaaatggatcagggtctcagtcctgctctggggaaaagacagcgtggtgagctgcacctctgcccccactcactgcattccgagaactctcattctgatactctggtgtctgccgggtctcgttctgcagctgctcataacggggacatgggcccaacgggaacttcagcagctgtagagcgaagcggggaaacaggcagcgggaaaaggagcctggcatcagcaggcctacggccagagctgtcccctcaccaccccagggaagggctggccactcttaccctgtcctcagtgatgggcacagtgtgcacaggaataggctgccacgagatgttcgggttgaagcgctgcatcccgttgggagggaagagtccagccaggttggcctcagcactcatgagagtccggtcaaagtctgtgcttcgcacataaacctgcagcgatagcaacacaagtcgtgtgtgtgtgtgtgtgtgtgtgtgtgttggggaagttttggtcaccctgaagtggagccttgtatgtatgtgtgtgtgtgtggtgggaagttttggtcaccccaaagtggagccccagaggagaacctgttcctgatggtcacccagcaaactaaacctaccatacatctggccctcaccctcctctggcctctggccttccccatcccccaaacactccactgggggttgtcaccactctgtgaagaactcttgtgggaatggccttagttgaaatgccccttccagtcaaaagtgctgagtcaatcagtaaggctctctggtctgtctggtttcataacaacacctctctccctgtctagatcagggtccttggggcagaaactggctccagtgacgacccttagagaccagggagaaaaaaataagataaagggctgggcctggtggctcacacctataatcctagcactttgggaggccaatgcaggaggatcgcttgaggccaggagctcgagaccagcctgggcaacatagtgagaccctgtctctacaaaaaaaaattttttaattacccaagtgtggcgggcacttgtagtcccagctacttgggatgctgaggcaggaggatcacttgagcccaggagtttgaggctgcagtgagctatgactgaggcatgtgctacagtttgggtgacagagtgagacccctttaaaatatatgtatatattttgggccgggcacggtggctcatgcctgtaatcccagcactttaggaggccgaggcaggcggatcagctgaggtcaggagttcaagaccagcctggccaacatgatgaaatcctgtctctactaaaaatacaaaaattagccaggcatggtggcacacacctgtaatcccagctacttgggaggctgagacaggagaatcgcttgaacctaggaggtggaggttgcagtgagccaagaccatgtcactgcactccagcctgagcaacacagcaagactctgtctcaaaaaaaaaaattttttttgaagagcttattcagagatagtggctcatgaaaagggaggaggaaactggggaaggacaagctcaggacagagctgggccttaagagaacaataacaatgtctatggattcttgatacggctgaggctgacagtggtaatcagaggaacagcttcccccattcctggggtggggcgaagactcaaggagcaggcacactcaccagtcctccctgatgtgccctaggaatatagcacgacctggcgcagcagacagggctcaaaaacctcatcttgatcaagaaaagacaagccctctctacgcatgtcttccccgctgtctttcatcttggccctgtctggtttatcattagatacccccacaacattctaagctccatgaagacagagatcatatctgtatggtgcacaactgaatgcaaagtgctagcacagtccttggcctttaataggtactcaatgtcttggatggaaagcctgtgatttcacagtcagaaaccactttgccaggcccgcccttaagtccgaatttggatgcttaatcaaatttgcctcatcccagccaagcaggggcaactcagctcctagggctttgttccagacagctctcagatgtcttttcctgtagttgtgaccaaaaatacaagaaggaggccaaagtgcccagcctcagccttaggctccctgagggcaaaagatgagggcagcataccttgttccccttgcctctggagctcccaaccttacctcttgccggtgataagaggtgtttaggaagccgtgatagcgctgccgcagggcctggcccagttcccagtgctgtagcatcccctcctgtgggcaaacccaagggttaagagggtctagagggaaggggtggcttcaagccccatggggtttaggccctgttgctttccaggttcacgctttgctggagtcaattaatctgatcccagaagtctttcattaagtggccagtcatgcacagcaatatcatgggcacagagattaaggttatgaaatctggtcaaagtcagcacccatatgggaaaaggcagtttagtaggaccccaagttttgtagactgctctagacgtcgctcattctgcagctcatcctgaggaaaggctggcttctgacccaccttggttaactgaccaaacccctggggccattcttcttcctgataggggtccttgggatatgtcttcactggtgaacggtctccatggcggtacagctgagagaataaaatggtttgcctataggtcagaagcatccccttgatagggacccagagcctaccttttgccccatgttagggaaggaagtctcattccctctgggaagcctactggctgcaaaagaccccagctaggagtcagtcacttcttccagattccagagattctaacttagctaagcaatgctactggagaccataggcaaagccaaggtacaggtaggaagggaaaagagaagtgaaagcaacgtatgtggtggggacaactggggaaaaaagataaccaaaggcttctttagggatgagtcttaaccattcaaccacttccctgtctcaaggcagactcaccccgacgtattcggtcatcctgactcccataagccagggctccaggtcaatcctgaatccagcctcccaactacccaggccagtcgtcccctcctaaaccagctgttccttcccgagatcctcgacctccaccagctggcctttgcccttttagcttcagggaagtctttggtgagcccatctctcattaccaaggtaacgaagcgcagactccgggcccgggtgggcggcatcaccaccaggttcacgccgagaaggagctggaggagagccgcccggctccagccggaccgcttgcccgccatcaccgttgtaatctatgcagcaaacaagctggaacccgctgggtggcacctgcaagcagccgcccggacgcacccgtaaggacacacgccggaagtgcgttcgccgccatcttacttagggacctgctggggtgcggggaaaaggcgcagtctcggtgggattgcgtgcaggagggtcgtggtctggctgtggcggaggagcataagaaggtaacgcgacctggcgcggcagacagggctcgaagacctcatcttgattaagaaggccacaaattcgcgtttgcctctgctcggagaaatcccttaccaaggtggcacttgcagtgggcgggaccatgtctggagaaccagcgtcccctccaggcttgaccccatagctagatcgggtgcagaattgaggcgagggatgggaaagtagaggtcgcttctctccacgcccctgcctttgtggggagattgagccctggccctgttctccaggagatgttttgcttggggtgcaggacacagtatgtaaacaaccctttggactccgtgtgtccttgaggttgccccagtctggcctaccgttcctgccctgcacaaagcttcagtagccctctcactttcccttccagtcctttccctgtcctccctcccctccacttccaagttttagttaattagagtcaagacgtcatgtcatgcctcttcccaaaggagttgggttgcacaggatgttcagactttacaaacccaaagcactgaatccctgggggaggaatttcagaccagtggggaggtattttgaggtaagggacaggcgcatatcataaagtgggagtaggtggggtttccacagaatcaatggccctcttggcattgaccattaggattcaggtgcagccagtttggcctcaggactttgtgactcctgtgacggttgcaggtcagatcataggtcctggggatgctttgattcagatctgcctactggaagcaaatctcctcagatctttgggaaacaaaactgatcaggcttggcctgggcgccgtggctcacctgtaataccagcactttgagaggccgaagcaggcagatcacctgaggtcaggagttcgagaccagcctggccaacgtggcgaaaccccgtctctactaaaaatacaaaaaaaaaa

SEQ ID NO: 5627 - DNA, 6000 bp, Homo sapiens
gcaatgtctctgggaacacactcggggatctaccaagtcacatatctggccccccagaacctccacaggtttcttctcacagcaaggagaaacttgaagcagaaacaggagcattcaccagccatggtcacaggtagtactggctaactgccctgaaagtactcattcccatgaagcaggccacagggtaaggtctgcagggatggaccaggagaactgcttcttgttccctccttcaccgttctggaagggtggaaagtgcagggatcatcttgcagaccactgcgtatctactcaagtgacttctgcccaaccttccaatcacaacatagagaataatccagaaacctggattcccagacctgagttcagagatgatacagaaggcagaaaggaaagatgtgacatttatttcatccctactacatacatttatctttacatgcattatttcatttattctcacagtaaactctaggagatagttactagcaaggggcaaatatcaaatttgaatacaggtataagactgggtgtggtggctcacacttgtaatcctagcactttgggaggccaagaagggcagatcgcttgagtccaggagtttgagactagcctaggcaacatggcgaaacctcacctttacagaaaacacacacacgcacaaaaattagccaggcgtggtggcatctgcctgtagtcccagccacttggggggctgaggtaggaggactgttggagcccaggaggtcgaggctgcagtgagccatgattgcaccactgcactccagcctgggtgacagagggagactgtctcaaaaaaaaaaaaaaaaaaagaatacaagtttagctgattcaaaagtttgagctcaagctcaaacaaacaaaaatcacaaatacactccattatataaaactgccggctggggccgggcgcagtagctcatgcctgtaatcccagcactttgggaggccgagtgggtggatcactaggtcaggctaacacggcgaaaccctgtctctactaaaaatacaaaaaaaaaaagccaaaaaaattagccaggtgtggtggcaggtgcctgtagtcccagctactcgagaggctgaggcaggagaatggcgtgaacctgggaggtgaagcttgcagtgagccgagactgtgccactgcactccagcctgggcgacagtgggagactctgtcacaaaaacaaaacaaaacaaacaaaaaaaacagccgggtgggtgcggtggctcacacctgtaatcccagcactttgggaggccaaaatgggcagatcacctgaggtcgggagttcgagaccagcctgaccaacatggagaagctgtctctactaaaaatacaaaattagccaggcgtggtggcacatgcctgtaatcccagctactcgggaggctgaggcaggagaatcgcttgaacccgggaggcggaggttgctgtgagccgagataacgccattgcactccagcctgggcaacaagagcaaaactccatctcaaaaacaacaacaacaacaacaacaacaacaaaacaaaacaaaaactgcctcttcagatggaaaaaaaatggctaacatacctggatttaggtttgcttctgccaacacagaatatggtagtggttcctgtcctcaccttcagagattctgatttatttgatctgggataggcccacatatccatctatctacatgtgttttttttttttcttttttttttttgcacctgtagttacgaaccaaagtgtaagaaccacagaatcatctggcagaaaatgcaaaagctgaaggcaaaggggtgaagaaactagggctcagcttcaggctctactatctacttgcgctgtaatccccacccttcctggaatagtttctccctataaaaactgaaatagtatctgcttcatcaatccctcctacgtgggatacttgcatgcacaaagaatatagacatatttgagcaagtgggaagaaaagcaaaagctgaatttgagagatagctgaaatttggtgagccaaagatttacactctgaaagtacaatggtctggctagtttgcaaggagtaagaggcccattaaaacaaaacactcaactgcctcccactaccactaatatgcagcattttgccaattacccaagccctctttattttatttttttttttgagacagagtctcgctctgttgcccaggctggagtgaagtggcacaatctcggctcacggcagcctctgtatcctgggttcaagtgattctcctgtctcagcctccccggtagctgggattacaggcacacgccaccacgactggctaatttttgtatttttagtagagatggggtttcaccatggtggccaggctggtcttgaactgctgacctcaggtgatccacccgcctcgtcctcccaaagtgctgggattacaggtgtgagccatgtccggcctaggtcccgtttagtccaactaatttgaaaaggtttcctttgacagatacctctttattgaaaggatttcgggatcaccaattacagtttagtaatgcagtttgagtagcctgcaagaagcagcccattatagactatttaactgaaaatcacaaaacctgactttttttttttgagacggagtcttgctctgtcgcccaggctggggtgcagtggcacgatctccgctcactgcaagctccgcctgctgggttcacgacattctcctgcctcagcctcctgagtagctgggactaccggcacctgccaccacacccggctaactttttgtatttttagtagagatggggtttcaccatgttagccaggatggtcttgatctcctgacctcgtgatccacccgcctcggcctcccaaagtgccgggattacaggcgtgagcacgcacccggccaaaacttgacttttaatccattctcaaactgtgcccatgcccaaactgtgaatttgggcaagtcacttcctctctttaggtttgtttcctaagctgtaaagtaagaggactaggttaaatcaggtattcagagatgctgatttatgaaacctgtaataaatggtctttgtgaaccatttgggattatatgcaaaattccatgtgtgtgtttatatgtgtgaacatttttctggaggagaggtgcaaaattttcatgtgattcataaaggggcttgtgattaaataagaaggttaagaactgtttggctacccaggctttggctcttactctatttgcttcttggcctcctccatgacaactctggaagcaaagtttaaatcctgaagtatatataaataattgaatctggagtcctaggacaaaataaagacagataatcctgatctttttttttcttttcttctttttgagacacagtcttgctctgtcatctagactggagtgcagttgcaccatcatggctcactgcagcctcaacctcctgggctgaaggtgatcctcccacctcagcctcccgaggagctaggaccacaggtgtgtgccaccacacccagctaatttttaaacttttttttgtagagaggagatcttcctaagctgctcaggctggtctccaactcctgggctcaagcaatcttcccaccctggcctcccaaagtgctgggattagaaacgtgagccaccacaccaagcctaatcaggtttttgttgttgttgttttgagacagtctcactctgtcgcgcaggctggagtgcagtggcgtgatctcagctcactgcaacctccgctttccgagttcaagcgattctcctgcctcagcctccagagtagctgggattacaggagcacgccactgcacccggctaatttttttttttttgtatttttagtagagacggggtttcgccacgttggccaggctggtctcgaactcctgacctcaggtgatctgcctgcttcggcctctcaaagtgctggtattacaggtgagccacggcgcccaggccaagcctgatcagttttgtttcccaaagatctgaggagatttgcttccagtaggcagatctgaatcaaagcatccccaggacctatgatctgacctgcaaccgtcacaggagtcacaaagtcctgaggccaaactggctgcacctgaatcctaatggtcaatgccaagagggccattgattctgtggaaaccccacctactcccactttatgatatgcgcctgtcccttacctcaaaatacctccccactggtctgaaattcctcccccagggattcagtgctttgggtttgtaaagtctgaacatcctgtgcaacccaactcctttgggaagaggcatgacatgacgtcttgactctaattaactaaaacttggaagtggaggggagggaggacagggaaaggactggaagggaaagtgagagggctactgaagctttgtgcagggcaggaacggtaggccagactggggcaacctcaaggacacacggagtccaaagggttgtttacatactgtgtcctgcaccccaagcaaaacatctcctggagaacagggccagggctcaatctccccacaaaggcaggggcgtggagagaagcgacctctactttcccatccctcgcctcaattctgcacccgatctagctatggggtcaagcctggaggggacgctggttctccagacatggtcccgcccactgcaagtgccaccttggtaagggatttctccgagcagaggcaaacgcgaatttgtggccttcttaatcaagatgaggtcttcgagccctgtctgccgcgccaggtcgcgttaccttcttatgctcctccgccacagccagaccacgaccctcctgcacgcaatcccaccgagactgcgccttttccccgcaccccagcaggtccctaagtaagatggcggcgaacgcacttccggcgtgtgtccttacgggtgcgtccgggcggctgcttgcaggtgccacccagcgggttccagcttgtttgctgcatagattacaacggtgatggcgggcaagcggtccggctggagccgggcggctctcctccagctccttctcggcgtgaacctggtggtgatgccgcccacccgggcccggagtctgcgcttcgttaccttggtaatgagagatgggctcaccaaagacttccctgaagctaaaagggcaaaggccagctggtggaggtcgaggatctcgggaaggaacagctggtttaggaggggacgactggcctgggtagttgggaggctggattcaggattgacctggagccctggcttatgggagtcaggatgaccgaatacgtcggggtgagtctgccttgagacagggaagtggttgaatggttaagactcatccctaaagaagcctttggttatcttttttccccagttgtccccaccacatacgttgctttcacttctcttttcccttcctacctgtaccttggctttgcctatggtctccagtagcattgcttagctaagttagaatctctggaatctggaagaagtgactgactcctagctggggtcttttgcagccagtaggcttcccagagggaatgagacttccttccctaacatggggcaaaaggtaggctctgggtccctatcaaggggatgcttctgacctataggcaaaccattttattctctcagctgtaccgccatggagaccgttcaccagtgaagacatatcccaaggacccctatcaggaagaagaatggccccaggggtttggtcagttaaccaaggtgggtcagaagccagcctttcctcaggatgagctgcagaatgagcgacgtctagagcagtctacaaaacttggggtcctactaaactgccttttcccatatgggtgctgactttgaccagatttcataaccttaatctctgtgcccatgatattgctgtgcatgactggccacttaatgaaagacttctgggatcagattaattgactccagcaaagcgtgaacctggaaagcaacagggc

SEQ ID NO: 5628 - DNA, 6000 bp, Homo sapiens
taaggtaaggatcatcaggtgctagagtgaagaggcaaaccaggtgaggcagatagcaggagtggggtgaaagggagaagcgagggagatagccctgcccagaagtagcccaagagggaaataggagcatgcaaagcactaacacagcaggagtgactgggaactaaaagagcagggctggagcaccacatctctgcatttctaaacagttactttgctataaaattcacgagtgataatattacacactatcttcctgcaaataacctgcagcaccactgaaattctttattcacgttactggtcccacctcagaggtaatttttgagggctaagcatctggtgtcttccccgtcactgccttcccagagagtcagggcagggtaaaataatcctctactttcaggttttagggacagactgtgtcgtcaaggctgccttgatcattaaaatgatcattacaataatggataacactggccaggtgtggtggctcacacctgtaatcccagcacttttgagaagctgaggcgggcagatgacttgagcccaggaattcgagaccagtttgggcaacatggagaaaccccgtctctacaaaaaatacaaaaatttgctgggcatgttggtgcatgcctgtagtcccagctactcggagggctgagaggtgggaggattacttgagcctgggcggtcaagactgcagtgagccatgatcgcaccactgcactccatcctaggtgacaagagtgagaccctgacacacacacacacacacagcatcaattgagcctttacaatacagcaggcttcatacatcatttatttatttagagacagggtctcactctgttgcccaggctggagagcagtggcgtgatctcggctcactgcaacctccgccttctaggctcaagcgatcctcccacctcagcctcttgagcagccaggaccacaggaatgcaccaccatgccccgttaatttttctatttttttgtagagaagaggtttcaccatgttgcctaggctgttctcgaactcctggactcaagcactcctcctgtcttggcttcccaaagtgctgggattacaggcgtgagcctacacatacattatttaatgccagccacaaatctattaaagtgctattattattgccattttaagatgagaaaactgagttacagtcaaaccaagtaacttgccccaggttacaaaaatgaagctaggatctgaatccagggcccatgctcttaaaccaccacaatccacagaccgtatttcttgccattcccagggatcccctgggttctctgcaagtccctccctgaggctgctgtcccagttccaaggctcctacctcaacatagccagatagaggaaagtctttccggaaaggatgtccctcgaagccataatctgtcaggatccttcttagatcagggtggttagcaaagaagactccaaacatgtcccagatctaggaaagagaccacctcaaacagccaatccatcaagactaacaacagggggaaggggctacactgcatcccgtagtctgaaccagttctgcaactgtggcccagaggcaggtccaccatatccggtaactcacctccctttcataccagttggctgccttgaacacagagacagcagactcaatgggcgtcagctcatctgtgtaggtcttcacacggatccgtgagttgaagcgcagagacaacaggttgtagacaatctagggagaacagaaggatctggagggctgagatgggagtccctgattgggagagttctgccctgtgaccctgccttctattctgaacctcaaaacctcaagattctcctatgcttacaactacttccaaaggcccaggccacagctgtagcttagcatgtcagcatgcctgtgtttgctcatgctattcactttgtcaggaatatttccctggtccatctcacaaggctacctggtctcctactcatattttagattcagcacaaacattctctcttttcaaagaagcctcccagacagggccaagtgcccctcctgctttcttaaagcatccctctaatatcctttgtattatatgttactacagtaagctgtttaggtgtctttctccttcactagagtgtaggggactcctggaggacaaatacttcatgttatttctctctccatcccagagtctggcaaacagtagataatcagtaaaatattaatagctaaatgtattgaaaacactgtgtgcaagcaatttacttgaactatctcattggatccttataaccattctataagataaggacagctttatatttattttcccggtaagaaaatgaaagctcagaaagattaaacaagggccgggcatggtggctcatgcctgtaatcccagcactttgggaggccaaggcaggcagatcacgaggtcaggaaattgagaccatcctggccaacatggtgaaacccagtcttcactaaaaaaatacaaaaaattagccgggcgtggtggcatgcacctgtagtcccagctactcaaggggctgaggcaggggaatcgcttgaacctgggagacggaggttgcagtgagccaagatcatgccactgcactccagcctggcgacagagcaagattccgtctaaaaaaaaaaaaaattaaacaaaatatttgagttatctgaggtcccacagccatttagtggcagaaccaagatccaacttcagatctacttgactctgaagttccagtttaactgctgtgttctattgtatgttacaaactgaaattaatatccttacccccaaaaccttctcagatctcccaactgacctcaaaacggttttgccgagttgggacgtccactgctgtcaagtcaaccagagatttgaactgtgcattggtgtgatccctgaggaaagtcagcactgggatgacgccatcaggatggatacagacctctaactcattgaagcaggacacctgcacacatgaaagtgaggggagagggaacaaagagctactgagggaacagctaacttcagctggagtcacctggtttaatgctgagagaaaagtccaagcttgggatggaggaatctgtagtttctttgaaacaagtctgcccactcccacatgccctgcgaacatggttctttcttgacccagacccaaataacattagtaagtattacctgaacttgttggacatacttgggcaagatttcagccacatactctccaaaagctgagagctgcttgtgggccacatcattccgtggtctgacagtggctggaaggaaaaggcatatttaaaaaagaaatggagaaggcaaaagccagccctgcatgcagtctcttaggcttgtaagggatgtcaaatccaggaaaggctccctgaagcaccttgagaaaggtgcatgtgaaaggtttcccttctagggaatacagtgatgaaaacttggggaaagtgccaccttaactacacggtcctcagaaagactcttactatagcagctggggtgttcacctcttctcaaaattactccacagttcttccctcacattgcctgcatttctgctaaagcagtagtctcagttctcctgtcagactaagagctgtttgaggatgggaactgaacttttgcctctctgtagctccttagcacgcaagtttataccaggttctcaagctaagaacttcagggcttgaagatccctcacagactctctctctccttaaaagtgtgtgtgtgtgtgtgtgtcaatgagaaaactgaggcccaggtgtgtgtgtgtgtgtgtgtgtgtgtgtgtgtgtgtgtgtgtgtgtcaatgagaaaacccaggaaaggagaaatgccaggtctcctaactcccagtccgtgtatcttgactgtaacataatatgtacatactcattcatgcaaccctaaaccactgagcaatcacacatcacaagctacagaataatggttaggtgtttctgcctctggcagcaggcaggcctactttgtcattcactaggtctttgaccctgggcagtttaattctttggactgtttcctgatctatagtaagaagagtaagatgctatctaccccataaggctgttgtgaggacgaaataagatcattcactaaaacgcttagcgaggttccaggcacacattaagcactcaattaacgctaggtactattattacagggctctgaggcctaaaggttatattgcttgctttcaaagagctgacagtttaatcagacaaaaaggggatgattgaaatggacaaggaacaatcagggccataacaggcctaagggcacagggagggctcgattctgcatgcagggtgaagaccactgcaagtcagatctccaagatttgccaggaggacgtagggaagggcatcctagggcaaggacaggcatctaaggggccccgccgatagttcagagaagagcgctgcccgcacatactcacggcgcgtgtcggccccggcgctctcccgcctcaccggcagcaacagaacggagggtcgcccagtccctgcacagggagataaaaggcacagacgcgcgggatgagccctgaggagctctctgcactgggcacgccgctgcgcctgaccccggtctcagctggctgcccgtgctcacccctggtcagcgccgaggcccccaagatcccgcgccaccacagcctggctaccgccgccgccgccatgttactcagatgcagactaggcagcggacggaaagacagcaggacacggagccccaagggcacggaccggaaacggaagtgtgcagcagatcttcttccgggcggacgtggagccggaagcggaggttccgggctccgggatgaaaggagggaacgcaggtgagaaagcgagacaggcaggtagggaaatcgtgaggtgagcgtggtcctagctccttgtggcagagcctagagagaaggcgaggacgctgaagaaccaggcgggtgagaggaggggagggggcgggcgttttgggttctacgctacacacccctcccccgctctctgagccaagcttttgacgagggcgggcgggcctgagcgggaagaacggtttccctggcgaccgtttccaagacgactcaaggtggagcggggacattgcacagggtgatgggcctcccagtgccccggcctgggggcggatggactcaagttctgggacgcagccatagggagtctttcgagcgagcggggaagtgtgggggaagcagctcagaagagagcaaatgtaagacccacggatatcccaggctaggcttcatatggagcgtcttaactccatgcgctgggaaggagaggacctggccactaggccggggccaggggtcctttttgtctgattctactgcccctgagcttcactagttttatgccccagttatttggttagtaaggcttttacgatcacaggcctctcccagccctttgctttcatatattgacctaaatcccaagtcttttgttaacattatggaaaggaattattccgtgttttctcaggaaaacacccagagttggaacttttatttatatcattagcggaggggcgccactggggataacgaacccagatttggttaaaggatagcgtcagggacatcatggatagggccaggactaaggccaatctggacccactttgctctcacttcttccttttccctccctgagttggacagttggattcacagactatggctgtgaattcctcaggttactcaagatggtgttgctttgcagacagctggcagagagagaagttggctagcatggaatcaccagaggagcctggagcatccatggatgagaactactttgtgaactacactttcaaagatcggtcacattcaggccgtgtggctcaaggcatcatgaaactgtgtctagaggaggagctctttgctgatgtcaccatttcggtggaaggccgggagtttca

SEQ ID NO: 5629 - DNA, 6000 bp, Homo sapiens
ggcagatggcccaatgtttccagatctctctaattttcatgagaagccagaaaaccaaatttttacatgacaatttcccattttttaaatgttggcaattactaaacttaaccagatacatacacacatacataaaatcctgtaagcctaagagaacacatctgcaggccagcaccatgagggccagtttgtatcccccaagtccagcacaggaagcaacagtttcctgtactctgtgctggtctgtccacaccaagactgctgtgctcagctgtgagcgctgcacctaatgggacacacatgagccggggctggtccacagacagatgggcaggatgggaggagactttaaatagttcaattccccttaatcgatattttcaaatagcgttgtgtatgtcaagcccagtgctacatgctggagatgcagaaggaaacaaggcagaagcagctctactcttgcggagcctattgccttgaggggaactcaaaggatctggggataatttccctggagaaggctcatggaggacagacggtaataataatgataagatttactgagcttttactctgggccaacattaccctcaatgctttacctataattatgtcatctaattcttaccactatccttgtttcatgtaatgaaactgaggttcaggaaggtcaagcaaatcagccactacaattgtgtacagattctctatggtccagaagaatggaacaggctgtcaaatgagagcacgtacttaagaggctaacacagtatgaccgtatgtggcaataaatgagtgctgagtacatgtctatttcttttccagtctctggaagcattcaagaacaagttgtatggtcatttgttagggttgctagagagggaggctgagtatcagataggtagaaacactgtgcacagccttccatctatgagaatctaactccacttttcctggaataattattttcctttttggcaataataacaaagtaattatcaatgactcctcacttccacacccctacaacagcagcagtagccctgtggatgggagactaaggcccaggaagaatatggaccaaattacaggtgataaaccatcaatcaagtaatactgatggaatgtccatgacacgtaaaccatattgttccaagctctaaatcagtgtgcacagcaggaaaagagcatgagaaaggggcttatacctaagactcagtactggctttggcattaatttactttgactttgagaaggtttttcctaagccttgctttcatctctttacaatgagggggtaggaatatacctctaaagtccttttcagcttgaataattgatataaattatttgcattaaaaaaaatcagacctcagatgtaggaggattcacctttcttcctagaagccagtgagaccacagaaccctgggaactcaaaaggactttagatgtgagaatggtcagtcctcatgggaccaatgagcacttttaaaatgtagctagtccaaaatgaggtgtgctataagtgtaaaatacacactatattttgaagactcagcatgagaaaaagaatatgaaatatctcaagaaaacatttatattgctttatattgatatttttatatattgggttaattaaaatattaaaattaacatcatagaccaggcatggtggctcacacctgtaattccagcactttgtgaggctgaggcagaaggatcccttgagcccaggagtctgagaccagcttgggcaacatagcaaagcctcatttcttaaaaaaaataaaaataaaataaaataaaaataacatcacccatttcttttacctttttaacatggatcctagaaaatgtcaaattacaatgtggcttgcattgtatttctattgaacagcactggtttaaggagaaactgaagaccagagagtaaatgacttttccacagagccagaactggaaccagggtcccctgacttctcattcgaggctctttccactcttaataggctgtggtggccattcttcaagatggcccctaataatcctcaccttctgttgccctagtgcagtcccttccacactgaacagggctcatctgttagaagactacagaaatgcctgtgtgacttctgaggctgggtcataaaaaacattgtggcttccagcttgtctctctttggcatgacttgctctaggggaagccagttgccctgtcatgagaacaattaagcaaccctatagggaggtccacacggtaaggaactgaggcctcttgtcagcaaccataaccaaccacgcaagtgaatgcaccatatggagcgctgatcctccagcccagccaagcctttgaataagtgcagttccagctgacatcttaactgcaagttcgtgtgagaccctaacctagaaacacccagctaagcttcccccaaattcctgacccacaaacgagataattaatgtttactgttaagtcactaagttttgatgatttgttacacagcaacagataatacgcagccttacaaatttagaggtctcatataagaaaaactcacttctatctttggcatttgtacagtgtgagaaattattcttatccttcctccagtctttggcctagctcagggtaacccaactaaaaactgctaaattatcaaacttggggaatcaaacccaggaaggtaagatcccattttattcttagaaggttcttcccttttccctttattgcagaaagaacccaggtctcttgagaatgaaaaagcactacatcacatcaccttcacctgggccattcagagatttgattcccacaaaatcaaaggaactagagcccagaattgctcagttagacacagtattgaggaagcaacaattgagaaatgacaatctatgacatcaacaatcgagaaataacaatctatgacatctgaatttctctgagacactgctgtcaatagcagtgctaatgttttatatagcatgtgttgcttttcacagtattgtcacatctagtatctctgaggtaggtggggaagatataaataaaacaggatacatatgaaaatagtggctcagagctcatggtatgtccttagtttcatgatcagtgaatgacaggccaggtctaaaatctgggtttcagtaggtgactcaagtcagacttcatgcttcccaaggcaggagcatcctggctgttatgagtactcttcagttggggctgtcctctgagatcagtgtgcacttgtagatctccttaaaggccacaaggaaaggtggcattacttcttccacggtgacgtgcctctggagctccttactcaaggaagtgacgcctgtcccaaccagtccacagggcacgatgtgctcaaaccacgtgaggtcggtagagcagttgagagccaggccgtgggatgtgatgtgccttccacagcggactcctgcaaggcaagccaaagggtcttagagtagataccctccactctccgggctttggtgtccctctcagggcgatgagaaaactggattagatcaccggttttcaaattttgtttctggagaaacaagggattgtactcagatgggaaaaggaaacaaatgaaaggaaggggtgcgtggcttcaagcagctgcactcatcatgaggattccaggaaatgtcttttaacagattccaatacttaaaaaaaaaaaagcttggggacaggcgcagtggctcacgcctgtaatcccagcattttgggaggccgaggcgggcggatcacgaggtcaggagatcgtgaccatcctggctaacacggtgaaaccccatctctactaaaaatacaaaaaattagccgggctggtggtgggcgcctgtagccccagctactctggaggctgaggcaggagaatggcgtgaacccgggaggcggagcttgcagtgggccgagattgcgccactgcactccagcctgggtgacaaagcgagactctgtctcaaaaaaaaaaaaaaaaaaaagtttgaaaattagcacccttatttgccatgacattgtcattcgcaggacgtaacctggcaattcacttctcttgtctctcccttaacagaaatgcgtgttggactagatgtgaggagccttctgcttctgaatatacgatatctgaaaaggggcttaaaaactcaaacgcagcgggtagctgtgattcaaaacccgcgctagatacgcctcctcccggccctcacctccgttggtccagccccgtcagaccccgcccccaggcctcaagctccgacctcggctctcaggtaccgccctgctccgcggcgctcaccgatcgcgcagatcttgcgatcgtctagccagacgccagtgtagggcgggggccgcgcgcgggcgtcctgcaggccctggagctcgcacaggcgcacggcgcacgcctccagcgacgctacgtgcatgcgcaagcgcaggccgagacgccgcaggtcgagtaccgggtggcaaagcagctggcccgggccgtggaaggtggccaggccaccgcggcctgtgacgcgcacctcggcgcccaaggcccgtagccgcgcagtttcctcgggcgtcaggccgccgcgcagcccggccgtatacacgggccccgcgggctcgcagagcaggagcgcgcccgcctcagtccccgacggggcctcaatgcctggctcggcctgcagccgccgcagccagcggtcctgcagccccagtagctcggcgtacggcacccgacccaggcgcaccaaccgaacggcgggttgccgcatcgtgcccaccgttgcgtccgcggggccccgccctctccgtgggcctgggggcgtggcctgaggggcggggactcgggggcacaccccgagccgcagctcccaggtgcgtgttaaaagctggaggggggatatgtgatcccaggaccaaaagcgcggggccagactcatcggttcattcaacaaccagtatttagtgcctgctgtgttctgcaggccctgccataggcgcttgatacagcggtgcatagcgtatgagaaagatctgtcctggtaagcttacattcttacagcagacgataagtattttaagtgttaagtaaataaggttatttcacgtataaggtgttaaatgctatgaaaagaaaaataaaacagggtaacgtggtgtgtcctgtgttgagcccctgggggacgcaagagggagattagcttgcctacaaggttattggtggaggtagggagaacttaaagatcagcacctgtaagaaagtgaaggaagcaggaatttgtaggcagaggaagaagttggcctgcaaaacagttgcagcagaggccttgaccaatcccaaggcatgcttggagcctaggatgacccttcagagtagttccacattaaagcaagggggccagaaactcttatccttgcattgaccagtcatggatacaggctacacctggggaggagctgtgattttttttttttttttttttttggcaagactgcttccctcggtggagggcggcccccagagaaggactcagttgtgtatcatcagtaaccaactccagaagctgagggaatgactgtctaggccctgagggggtgtctggaccacaacatcagctatgttgcagttagagtatcatttaaacaagtctgaattcaatgaatttttactgaggacttttcagacaccataggtgtctgaaaaacatttcataaacatagacataaagatcctaagcaaatattagcaaatcaaatccagcaatttataaaaggattaatacatcatgatgaagtagggtttatcccgggaatgcaaggttggttttgcattctgaaatcaaacaatgtaatttaccttaaaagagaaaagccttcattggaagaaataataaaaattttttttaaagaaaagctatgattatgttaaaaaatacagataaatctattggcaaaaataaacacctcttctgaccaaaatactta

SEQ ID NO: 5630 - DNA, 6000 bp, Homo sapiens
tgtttgtgcatgcctgtagttcccaactacttgggaggctgaagtgggaaggctgcttgagcctgggaggttgcagtggagccacgattacaccactgcacttcagcctgggcgacagagccagagccaaaccctgtggcaaatacacacacaaacacacacacacacacacacacacacacacacagttatgtattcatatcaacctcttttgttaaatgatagcatactggccaggtgttgtttctcacagctgttattccagcactttgggaggctgaggcaggaggatcatcacttgagcccaggagtttgaggccagcctggacaacatcatgagacccccgtctgtgtttaaaaaaaaaatggtagcacactaagcacacttttccccatcttgctgttttcactgaatatatcccgaaaatcactccacagtatcatccatagtattatcgagagatagttctcatttttgaaaacagctatatatataattcagttgtatagatgtattatagtttgttcactcaaactcctgtggatatttgggttgtttctacaaagaatgatgccctgaaaagtgtagaagtggcacctccgggtcaaaggttaaatacatatataattttggtaggtattgctaagttcccctcctggaagttatggcattttgcttatctaccagcaatgtatataaatgcttattatcccacagcctacagagcatgttggctttttgccaatgtaatggaggggttgttattggtagctcagtgtagttttgatttggacttctgttattatgcattagtttgaatatactttcataagtgccatttgcattcatttttgtgtgaattgtttgctcatacctcttgccaatattttctgttggattctataagcctataacacactgtttttacaaactatttatttattagggctattaacccattgggatataaattgcaaatattttttgtttgtcttttgtagttttgttttcctcacagtgctttttctcatgtaaaagtttacttttatgttgtcaatttataacaatcttttctctaattgcttccgaatttttgaagcaattaaagcaatttagctagcaaaattttttcttctcttatagagaaattcatccatattttcttctagtatctgtatggtttcttttaaaaaatatttatatactcgactaatttggaatttgtctttgtgtataagaaattgatccaattttatctttttcctttatcttaaaataacaaaaagtccacctttttcctagtgacctgaaataccatttaaatcatatactaacatgttccccatcacaaaaataaaaattaagagtagtaaccacctatgatgaatgctggcaagggaattcttgcattgtgtgggagactgagccagaggtccataatgattgttttttttcctttttgaagagactgaattctgatacttgtatcttctagataatttgtctttggttgacatgggtggaattgggtgtggtgcttacaattttttcaaatggttttacccattgtttattagagagctagtgtcctgagaccactaatctgaatcatcatttgctttaattattgtgatccagtaacaatgacgcaaatgtttttataatggaatatttctgagttctaaaattaaataaatgactaaagacttttactgcaagaatttgtagttaatcttataataaaattgatgttcattataattcacctcttttcccaaataattttagttttttccccttccaacttttattttaggttcaagggatacacgtgcagatttgttacatggttaaactctgtgttaaggggctttggtgtagagacaattttgtcaccaaggtaatcagcataatgcctgataggtagtttttcaatcctcaccctcctcctacctctgctctcacataggcccccaagtctattgccaaatgatttctcttaataacgttcctcttctaaatatagtttatcaaatgttttcagtggaaaatatttaaagtttcagattgtgcaacagatattcaccctgaccggatatggaaaagaccagcaacattcaggaaattggcagagattttgagctctgctagggcagggcaaaaaaagcaaggggtggagctatgcagtgtgtgtgggagttgttttaattctacccttgtgctaggttttcttccactataaaatgattacaatagaatgtttgtttgcttgtgcctatttctagtcacctttaccactctgttagaatactgtaataaaaagtaatgatgacaagaatttatacaaaatggatgttctaatcaacaatggctttccaggggttggggcaggggtcgtgggagtgcccaggatggagtgcagtggctattcacaggtttaatcatagctcactaccgtcttgaatccctgggctcaagtgatcctcctgcctcagcccctgagtagctggtactaaaggtgcgcaccaccatgcctggcttaggataggtttttagtacaaaactggtaaagtcctgacagtcataaaccttcaaggttggggatttgtaaattttatttataggagtgaaggaattttgccttggctttcaaccaaatagttattgttagtgggcatctgggtctctgtgcaggatggaatttagcataaagaatataaattacctttccaaactggtattccacctttcaaatcagtttgtctgtgccgttattgcagaacagtttcatataccccagtgaatatcagtttatttaaagagtgcagaattctttttgcagtacttaaaatactttcaaatggaaggaatcaaaattgaaaggaaaccacagatactcatctcaggaataacagtcagctgccagggatgcataggaacagtatgctggaacgtggcgagggtagactgtatgatctttttttcccccactgatttctcccgagaaatgtatgctcttttgcagttaccttccacgctgtatgtccgtgagaaatacaatgaagacggtctgaataatgaactggtaatcttcgataatatgaaacgaatttaagagaacatatcaaagaggtacatactgtttcaaagagcaagaactgttatctgaaactccctgcctcataaaaggctttctgcagaatggagatggtcttaagcaagttttaccataaacaaatgcttagtttcttattttaaaaaatgactaattttagaaagcttactctctcttttctctagaaggctctcaaaataggctgctgcaaaagctggtatattgtccggttgctctctcagaatctcgcgtgtcagcccttcaagaagattcccaaatccttgtggaattcggtagtgggtgttggagaatggaatcgacatcttcttggtaagaactgcctatggaacctaaagattcattaaagagtactgtctttaaatttgtctgattttacttatataatcacaactatgccaacaaattatttctgagactcatacatctggacttgaattcttttttccctaacacaacccaagcccatccatttcttccaaagagttttgaaatctccattgtgaattagtataatacaaacacagacccattcactaggccaaatcatttaaaatcctgcaaaaaacccataattttcaatatgactttttctctctttaccctttatatgctcaaaaggtaagggtaatttttgctatcacacaggaatttagagagaatgattgctaaaaagttaaattcattgtcaattgctgagaagaccttctttgaggtctatttttttttaaagagtagaaattagtcctggttctagaaattaatttgttgaatgaagaagttgcacaatctttccccttgctgccacttctgaagcatgacccacaatgcttcgaacaccttcgtactgtggaatggggttgtgcgtgcgtgtgtgtgagggagggatgggatgggatggggctgtgtgtcatgattttgaaatcccagcctctaaagttttagaattcttatatttttcggtttcttcttgatcaggttgtctctttctgtcttgaaatacaagggctagattaagggtagctgctaagcagcgggctgagctactactgagtatgaaaagaatcctccgggacctggcctgttaatgtgagagtgtgcgtcaatgcggaatagaggcggaggccgtggtaggggtccaggttgggagaactggacggtttaatgaggctcagactatggagggttctcgtttcatcgctttttttttctttgagagggggtctctggcctcgaactcctgggctccagcgatgatcccgcctcagcctcccgagcaattgggattacaggcgcgcgccaccacgcctgactcctctcttttgctttttctgagggagcagtagatgggggtatcgaaccattctagagtggtgaaaagagctggcgagattctgaaccaatgtgggcagaggagggcgggcggagggggcagacgggtctagtcgggggcgggatgttgaggacctgggatttcagactcgcgcagaatgggctgcctcggctcccaaacggcccagggctccgaggctgtgtctgggatgctgagagaataagagagacgaagggaaaaggctaggtcttggtatcggagaggaagtggggaagcggcctcacctcctttctctccgagctggtgccgccggttccggttgtttttctagttgctgggtaaccgttttttctttaaaaaaaaaaaaaaactacggcggccgagaaggggcgagtacagcccagtcctgaggtcgcgggaggctgcgaggactgcaaaagggtggagtcggcctcgcccccgcccaggccccgcccctgccgggaacccactttcccagtcctaggcggcggtcagatccttgcaagcatggtcgcgccggggcttgtactcgggctggtgctgccattaatcctgtgggccgacagaagtgcaggtgaggcggcccggctcggccggacccctgcccctcagcctgtgcgggctccgagaccccgtgtcctctgcgggacacggatccgcgcccctttctcaaggtcgacgaaggaacctagctaggctaggggctcgcgtctccgaccgaggcccggtctgcaggagtctgctgggttgaaccccggcctctccactttctccaccccccacttaccatccctgacatgcagcctgtgagcagggagaaagtgcggcttgtctgagtggggaggcccaaatgtgcccagaaagaggccttcggggtcctggagtaactgcaggggagctcggagggaaggaggcgaagctagttaggtaatatttggaaacaggtgactgaatcttccaaaacatttcagcgctaccccctcagtggtgcccttggggagggtttgcttcaggcggggttccttaggggaattaaattttactcgtttaagtggttatcagggctaagaaatacaaccccctcactagctctgactatttaaggctcagttttgatttctggtaccgcttacagatattggtggtgggaaaatgtgagtggcataggggaggctggtggctccctttggctgttgcgcaggtcagatcttgccattcgaataccctaggctggacactgggtcacagtatggagaaagcagaaggtgcaatctgtctgataatgcaaactaaagtgataatgttggatttcttcctttctgtttcaaaacactcaaagagtggaccccagagatccctgttaagaaatgatagttggggtaggagaacagcgtgcagaaaaatgactcctgctctacctgagagccggaaaagtacctagattcagacaaactgcagcccataaatgattgttcagagtctaacaaaagtgcaaaatgctagcactctgta

SEQ ID NO: 5631 - DNA, 6000 bp, Homo sapiens
caaagtctttctaatgttgctttaatttccaaaaatgtatgcattgctttaacaatacatgtgatgtgtcatattacagatggggtcacagtggttataaagagttataccctgaagaatttgaaacagacaggtaaggaaaataggcttactgaaagaaactaagatggtacaaaatctgtattataaattgatttcttaacttttacgaagaatatacttgccatcaaaaatgtagctagagaaacaataggtgatttagttaggaggtgatccctgttttcccattctctggttgatgtttggcatgtctgtaagcattttggtttttatatatagtattccatacagtaactcagtatggcagcttagaatttttaccttcattttaaagatgaggaaacaaaaactcaatgagaatattaaagtgttaaagtatacattaaagtgcttatttaaaattcagatgttaacctcaattttttaatctagaatgcaaaatattaaaataatacgctttttttttacataaaagcttctattttttaacttttcttattagtagtgatcagcaagatattaccaacgggaagaaaacatctccccaggtaaagtcatctacccatgaatcccgcaaacacaagaagtcaaagaaatcccacaaaaaaaagcagaaaaaaaggtcacacaaaaaacagaagaaaagcaaaaaggaagccacagatataacagcagattcctcgagtgagttctcagaagaaactggggcttctggtacaaggaaagggaaacaaccacataaacgcaagaaaaaatccaggaaaaagtctctcaaaaaacctgctttattcttagaggcagaaagtaacacttcacattcagatgattcagcatccagcagttctgaggaaagtgaggaaagagacactaagaaaaccaaaaggaaaaagagagagaaaaaagcccatacctctgtagccaacaatgaaatacaggagaggacaaacaaacgcacaaattggaaagtagctacagatgaaaggtctgctgagagctcagaggatgactaaatgggaaacacttttgttttccacatgactgtggatatttacagttcttactccttgtggttttgccagtgactcttgttcagcacggggcctgaggtcagagctgtcttgtgccatctgtatgttctgacagacgtcttgtcttctattttggcgttaagcttgatccccttttcttgttaaaagggaatctggtattttgttatgaaggtttcttgaagagattatttttttttgcaattaattacgtttagtgtagagtgcatatacagcaaattaaaggacccagaaagctggatccaatagtgacctgggtacaccaatcggaatattgaatttggggaagtcaagggctgggatcaagaggtggattggaactaatgccatgtaggatggtatgacaaggcaacactgtattgctctctgtttatatagcaggtgtcacaactaacttgtctttagccttggtgctttgatccttctatattttgaccccacaggtgtggtccggtttacttaatcaggacatgggcctaagaacaaaccttttcccttcatgataacatccatagacaacttattagaagggactagagtttttgcaaatttccctgctggatggggcctatagctatacttagtatatgcctaaacatggtaattggatagtaaatggttttctagttccattgctgtatatttgcctaaatggacttgtgttcaaattatttcttcaattgtcatagataatcctgtaccaaatggggaagaattaggaaataatcatgttgtctaatggtactctggattcagggcagcaactgccatttaaatgttgtcttgttcatttctaaatctgttcatgaagtttaggttttccctgaaactaagttgaattatttccaaaatgaaacaggcttctcagggacatatccacttcttcccagtctgcctttggattaaagcaccaagcagagaccacattaattccctttgctatactgtgatccttagtatgttaattcttaagaaaccaacatatcactgaaagaaggctggcagaacgcaagtgcattttttcactgtgggaagaaagatcaagtgacgtattattttttcctggttgtcacttaatgggctgagtaaaaagcttgaaaactcagactttcggtcttggttctgccactcattggttatgaggaggcccagagcaggtaagttcaccttcctggccttactttcctgatgtgtaatacggaattacttcacagtagcatgacagtataagacaccagcagtagatacaactatgatgacattccatgagttggtatttttagttctaactgctaaatttgttctctttacgggacagatttctaataaagtgcttggtcttaaaatacatggttggacagaggtgccctatcccttaactatgagcaggtgctaccttttgggatatttattttaaattttaatactttggtactcaattgtcagtgttccatggtgtgtatttttatttttgggattagtgggggtctaaagggagaagaatagtctctaattactacctcttaacctaaagcaattattttgttcctggagcaagttaaatctttgttggaaggagctttggccatatattttttagcatgcattgtttctgtgccctgaaagtacctgaaaggttttaagcacagactcaggaaaatgtgccagtagaacaggccatctccaggaaattggctctatttgggtcctgaccttcccttcctcccaagttagcaggcttgttctttcgcaaggaatacacatcttgcctttttttttttttttttgccatgttttccttttcttggtcatgtataagcaataaagctgttttttgttcttcatctttcttaaccccaaattttcttctatgccttaggcttcgatggttcttccaacccccttaatatggcttagggtggtttttcaaaacctacaatcccccatttgcactactggccatggaacatttatttctagtgttcctgccaatcagagatctctatattaaattctaaaatgggattaaaagaagagttggagaattcacacttattgagtaactgatgtcatacaacctggaatttctgaattccaaataaataaatttcactctttgaacatttcatcttttactttttagcaccaacagacttgataacagcctgatgctgatctgacaatgggttgatagccttcccccactgacccttaaatctgcttagtaacaagtcctttgcttctgtcattctcctgggggatggcctactgccctcctttctgtacaatctgggcaaaccgactggtgatggcaagagtggtgtcaatgaagcggtctacacagctggagagacaattttcagtgcgagagtctaggcgattccctggcttctccacacatttatcccaacataactccatgaagtgatgcacctaaaaggaaagaaaaatagtaaccattggggtctgcagataggcctaactcttgtttattaacttctcactttttgacacctgacaaaaccattctttaaatcaaccacggagtcactttgggctcttctctttcttcatttcctaattagtcaccaatattgatccagatcctcgtccctacagattgtacattctcaggtaggactaataaccttttatattccccaaagtagctagcaccattgtgaaccaactagggaaccaattaattttcccaaactattgcactcattttattccaaacctatcccctagacaaggtaattcttccattaaccttttgggggttatggatccactccccagaaaaatgcacatacaggcacagaaattatgtgcactgtcattagaatgttcagggcccaaagatttctagccagggttcttgctggtcatccgagcaccctcttcctcccacccaaaaggaaaaaaccattttaccaagagcttactatttgtgaggctgggtactaagaaatcagttctctctaaggtcctcaaggatagctgtcatcacctcccatttaagaggcgtgattatgtagtccaaggtcatgtagccagcaagaagtcaggccgcgttagaaccatgtccgaagggctccaaacccttgttctacatccatagtctacagcgactacttcagagtccaccttcctccgataatgttctagtcgttttcaaatacattgtcgcatatgatcctcacaatccagtgaggcagtggggtgacggcgacaccaaaacccacagtggatgagtatcttttctacgggcacgtggcctgcaaggagcagagggaggatgagaacccagatctttcgaatgccagcccagtcatgtcgccggctaactagtctcccgtacccttgcgtcgcccaaatcttccctgttttacaccttttcttttctccacgctacgcttatatacctggcacctgagcactaccggtcaccagggacaggagagccataactttgtctttcgtgaggggaatgggatgcagccgggatcgagcaccagtgagccgccagtgtacagacctccgagcgtgcccaggaccaccaaggaaggtgaaacttcctttcccttcaccctccccgtccccgcacctgtgcagtaaactgcgccttctgctgctcggcggccaccaggcgctgcaactccgcttcatcggcttcgcccagctccgccattgttcgcctcaggctcgccaccttccgacagctgtgtttgcgcatgcgcgacgggtgtgcaccgcctctcgacttccggttcacccagcatttcctcttccctgttttctttcgtcgtcgtgggtgggaattgtcgcctaagtggttccgggttggtggatgaccttgagccctcaggaacgagatggcggttctctggaggctgagtgccgtttgcggtgccctaggaggccgaggtgaggggtcttcccaccctgaggtgcttagcgtagcctccagccagggaaggggatggaagtgaggactcatctgccgggtgggagatctcttgaggagaagaaaataccgaaatcacagcaatgaccactgtagtctaggggtccagatgtttacccgaaggtatatttcacttgctgtgagctgacgagttgagggaataatcagaaagagagctccctctggaagtcgcagtcctgatgaggctaatccacatagcagttctgttttctccccgttcactgtccctagaatgctccccactcgctcccaccctgagtcgggaaagagggttaggagcttgcccatttcttctggagttggtgtgtttggatgtgggagtggaggggggatcagttcgaaaatcatttaacctgggcatttgtgttacctcaggtactgtagtaatgctaggatacaaatgtgaagaaaacgtagttcccgccctcaacgagctttcattctgatgaggaaaacactgtcatagtagtccgggcaagatgaggtcctgaactaggaaagtagcacaaagaaaagaagattgtctcaagaactgttaaagagatacgccaataggatttggcgattgaatttaggggaaaagtctctcatgatttccagattactgagttaggttaaagaatgcctgaggtgtcattaaataaagtagggaacatgcagatgttccctggtcttaacttcacagtaaccccagtgaaatagatgctatcttcattttacaaataagatgttatcccctatttattgttaagtagcttacctatggtcatttagaaagtttgtcagtcctgttaaaggagaggttcttatgatcatcctaatgactctttcctcagctctgttgcttcgaactccagtggtcagacctgctcatatctcagc

SEQ ID NO: 5632 - DNA, 6000 bp, Homo sapiens
aaaaagaaatatctagaatgactcctaagaattttagtttgagcatagctttgagaagggggttttaaaggagaaatcaagggagatttggggggaaaaaagagcgatttggccaatgttagatctgggataactatcagacatccaagtggatgtcaattagacaattagataaacaagtctgcagctcagaaaaacaggtcagatctgagctcacctaaaaaagggtacagatggagaaattaagaaggccatgactcagccctggagattttgtcatctcgaggtcagacaagaggagaaggatctggcagaggagacttctatgcatctggaaagccaaagaaaagtgacttatggggagaattgttaattgagttgaaggcggctgagacttcaagcaagtggagggcagaaaatagacaaccggatttggaaagatgaaggccttcagtgcccttggtaagaataacctaagttatatagttgggataagaccccaattaatacaggctaaaagagactcagtgttgaggaagtggagcacattatagacagctccttcaagagggatgacatgttagagaaatattacttactgtacttgtgatctaatatttcatatgcaactggaatcttttatttggaaaggtctgtgtggttaaaaaacaacatcaacaacaacaactcattctcctaaccagtcctacaaaaccagataattaaaacccctttaggctgggcacggtggttcacacctataatcccagcactttgggaggccaaggtgggaggatcacttgaggtcaggagtccaagaccagcctggacaacatggtgaaaccccgtctcgatttaaaatacaaaactgagccaggtgtgctggcgcatgcctgtaatcccagctgcttgggaggctgaggcatgagaattgcttgaacccaggaggcagaggttgcagtgaaccaagatcacaccactgcactccagcctgggtgagagtgagactccgtcccaaaaaaaaaagaaaaaaaaaatctttaacactagctagaaaatgattctgacaagtcacttaacctccctgggtcttagtttccaaatctgtaaaataaaagagttggttaagatactctccaaagtacttccagtttcaacaatccgaaagtggctccctaccccccacaatgacaacatattgtcccttgcaaaacttaaaaagaacaactcaaggaacccaacctgtcatttaccctcattttagaaggttcattacgtagaaagtcatacaaactataccagataaaataaacaaaagctgggccggacatggtggctcacgcctgtaatcccagcactttaggaggctgaagcgggcagatcacctgaggtcaggagttccagaccagcctggccaaaatggcgaaaccccgtctctactaaaaatacaaaaaaattagccggatgtggtggtgcacgcctgtaatcccagctacttgggaggctgaggcagggagaatcgcttgtacctgggaggcggaggttgtggtgagctgagatcacaccattgcactccagcctgggcaacagagcgagactctgtctcaaaaaataaacaaacaaacaaacaaacaaacaggcgctggatgctcattcattcagcaagtatttactgagtgctatatgtcacgtaccagagagtagttctaggctctagaggcacaacagcaaacaaatacagtaaaaataacaaaataatccacccacatacatctcttttttttttttaagaggcaagaataaactatactatttagggatatacatttgggtgataaaatgcaaggaagcaattactatataaaataatgaacagatgatgtagtatattagaaggcagtaagtactattgagaaaaataaaacaagcaagagagataaggaatggcaggacagaaactgcaattttgaataagtggttagggaaggctttgttgagagaatggcattcaagacctgaaggagatgaaggaacaagccaagtgtatagctagaaaaagagtttcaggcagaagcagtaagagaagccctgagacctggaatgtccctggcatgttcaaggaatctcaaggaaggcagtgtgaatgagagagagagcagctaaaaatgagggaagaaacagggtggttcaatcatgtagagtctacagacaaccctaagaattctgactttgagtaacatgaagagacaaaatagggttttgagaaggggaatgtcttattctaattaacattttaacaggatcactgggtatgctgtgttgggaatgaacacaaatgggaaccagttaggagactactactagagtcaaggataatgaccaagtttggagcttaccaggtttagacttgaacaaagagaaaactggaaatgccattaattcagatggggcaagagtgcaggaggaacagattaggggagatcagaaattcagtttgacaggctacattcaaaatgctattagatacggaaatcgaattgaaagacattgaataggcaggcagatatataaatctaggcatatacatattttatatatattttaaagttttcaacaaatttagggcatttcaatcaacttctccctcatatataatacataagacaagctcacagcaaacaaactgagcagacaactatatttggaattgctatacttgccagtgaccatgaagagtgagggctgcagccagggaatagtccatcgcagagcaaggattcaaataagcagccggaagcagacccaggagcaaaacactgacaaccctctcgctagtccagtggagagatgcagccttggagccagctacaaaaaggaccagattcataaaagttgatgtgagaaacacacatctttcatgttcaacatatgccacacagtaacccaaactgacaggcagtgtacatataggatataactctgagtacaaaggaagtaaaatatcaaaatagtagttgagagaagctatctctgttttttgaaggctttatctctgttttttgaagtcttttagcacaagggtatctcaatgcctacatattgattagaagacagatccaagaagatggataaaaaacagaattgctgtattgctacagaattaagccagtcttggttcagtgaagtgaacagacaccttatgaatgtaagttagtggtccaggcgtggtggctcacgcctgcaatcccagcactttgggaggctgaggtgggcagatcacctgaggtcaggagtttgaggaggtcaggagtttgagaccagcccggccaacacggtgaaacccgtctctactaaaagtacaaaacttagctgggcatggtggtgggcgcctgtaatcccagctagtcgggaggcaggggcaggagaattgcttgaactcagaaggtggaggttgcagtgagccgagatcgcaccactgcactccagcctgcataacagagcgagactctgtctcaaaaaaaaagaaaacaaaagaaaaaaatttgtaaagacttaggctagaaggtcttctatgattataaatggcatcattcaaccataatggcactgtctgcccaaaggtgtaaactaggtcttcatttgacaaagttggacacaagagtcccccctacaggtaggaagtcctgctaaaggcatgaccattagtgaaggtaaagatggctagagcccagaaagcagcagcgatggagagaacatacaatggtggctcggtgacaagtgtatgtgctgcactccacaccattctgggataggtcggtcctgaagaaatgctgagatatgagcaggtctgaccactggagttcgaagcaacagagctgaggaaagagtcattaggatgatcataagaacctctcctttaacaggactgacaaactttctaaatgaccataggtaagctacttaacaataaataggggataacatcttatttgtaaaatgaagatagcatctatttcactggggttactgtgaagttaagaccagggaacatctgcatgttccctactttatttaatgacacctcaggcattctttaacctaactcagtaatctggaaatcatgagagacttttcccctaaattcaatcgccaaatcctattggcgtatctctttaacagttcttgagacaatcttcttttctttgtgctactttcctagttcaggacctcatcttgcccggactactatgacagtgttttcctcatcagaatgaaagctcgttgagggcgggaactacgttttcttcacatttgtatcctagcattactacagtacctgaggtaacacaaatgcccaggttaaatgattttcgaactgatcccccctccactcccacatccaaacacaccaactccagaagaaatgggcaagctcctaaccctctttcccgactcagggtgggagcgagtggggagcattctagggacagtgaacggggagaaaacagaactgctatgtggattagcctcatcaggactgcgacttccagagggagctctctttctgattattccctcaactcgtcagctcacagcaagtgaaatataccttcgggtaaacatctggacccctagactacagtggtcattgctgtgatttcggtattttcttctcctcaagagatctcccacccggcagatgagtcctcacttccatccccttccctggctggaggctacgctaagcacctcagggtgggaagacccctcacctcggcctcctagggcaccgcaaacggcactcagcctccagagaaccgccatctcgttcctgagggctcaaggtcatccaccaacccggaaccacttaggcgacaattcccacccacgacgacgaaagaaaacagggaagaggaaatgctgggtgaaccggaagtcgagaggcggtgcacacccgtcgcgcatgcgcaaacacagctgtcggaaggtggcgagcctgaggcgaacaatggcggagctgggcgaagccgatgaagcggagttgcagcgcctggtggccgccgagcagcagaaggcgcagtttactgcacaggtgcggggacggggagggtgaagggaaaggaagtttcaccttccttggtggtcctgggcacgctcggaggtctgtacactggcggctcactggtgctcgatcccggctgcatcccattcccctcacgaaagacaaagttatggctctcctgtccctggtgaccggtagtgctcaggtgccaggtatataagcgtagcgtggagaaaagaaaaggtgtaaaacagggaagatttgggcgacgcaagggtacgggagactagttagccggcgacatgactgggctggcattcgaaagatctgggttctcatcctccctctgctccttgcaggccacgtgcccgtagaaaagatactcatccactgtgggttttggtgtcgccgtcaccccactgcctcactggattgtgaggatcatatgcgacaatgtatttgaaaacgactagaacattatcggaggaaggtggactctgaagtagtcgctgtagactatggatgtagaacaagggtttggagcccttcggacatggttctaacgcggcctgacttcttgctggctacatgaccttggactacataatcacgcctcttaaatgggaggtgatgacagctatccttgaggaccttagagagaactgatttcttagtacccagcctcacaaatagtaagctcttggtaaaatggttttttccttttgggtgggaggaagagggtgctcggatgaccagcaagaaccctggctagaaatctttgggccctgaacattctaatgacagtgcacataatttctgtgcctgtatgtgcatttttctggggagtggatccataacccccaaaaggttaatggaagaattaccttgtctaggggataggtttggaataaaatgagtgcaatagtttgggaaaatta

SEQ ID NO: 5633 - DNA, 6000 bp, Homo sapiens
cttcttctcccccctccccctccctctccctccccctctccctctcccttctccccccttttccctccttttcctcctcttccctctccctctttctccctccttctcctctgccctcctccttcttcgtcctcctcctcctcctccttgctggctgagggccaccatccccatctggaagctatcactcaatgctgcctcccaggcttgaggccctgagccagctcaggagaccagcattttccagaaaccatttcattcctcaggagaaagagcatccacggcctctctctctctttctctctttctctctttctctctctccccccaccaccaacctcccgcgcagagaggatcttgggtggtggatgggcccacccagacctccccagggccttcaccatcagaggctgctgggtggtcaggtctgccctggccattttctttctcctcattctaaatggaaataaataaatagatacataagcgaattgaatgtgcttccttgggcggcgctgccagctctgctctctcagcccagcaagctctttcatttcctgtgcgagaggccagctaggggagaggccggaggggtgggggcaggcaggaaggggctttgtggggagcatccaggcgcccagcccattggaaaaaatctttccactccctgctccccttccctagccccttcacttgtgctcatgcgtgcagacacacatacagatgtgccagatgcaacacgcagacaccacacccgtatggcaacaggggcaggtgaagaccggtgacagatacttacacacacacacacacacacacacagaggcacctgcacacgcacacacacatgcacacacacactcatgcacatgcacacacacatgtatatttgcacacgcatacacataggctcaccctcatgcacacacatgcatgcagctcaatggagcaggtctcttgactggggtctcccagctccctgctgtggccatgctgagctcaccatccaggctgggtctaagtgcattggggcttgggagctgtgctggagcccacccagctgggactggagtgtcctcaggaccccagcccagtgcaggcatccagttgggggcctccaaggctgctctacaggcctgacccacatgtcaagtcaccctggccttggggctggctggggacacagaacctgagcccaggtgctccctgaccgccttggccacagatgagggtgctagactggtttgtgcacgggggcaaggtggggtgggaaaggctggtgactgggacaggagccccgtggcccagcggctggcttctgcatatgtggcctcaagcccagcaccatggcaccccctggtggacggtactgcagccccagcgctggttctttctgggcctccagctctgacctggaccccttggcctggccctgttgccaaccttttcttccatccaggtgtccctttgcaggccacacaccctctgggggggggggcagactacctgccttgtcatctccccactggggcctcccacctggccctgaagccagatagcacaggccggggttgtccctgcccatgctcgtgtgccccggagcaggaatcctggctagtgctggagctgctgggtcctcctctgcccaccatgggcccacccagggctggttggcccggcagcagctccaggaggtgactctattcctattcttggagacatttataaaccagggtcattaaacaagcatttgctgaacttgaaggctgagctgaaaaccctgccagccctggggacccaggaggctctgccctcagggacccccagagtggtccagcttcacaggctaaacagggaagcaaagcccccagcacaagctcctcatggctggaaaggggagacgggaggctagagggacaggtgggagcccggggcgccagggaggagctgccccagctggggtgagagaagagggctgtgggcctagcaggggcaggacaggcgtggggaggctgccgccaggtggggtctgcgatgaccatcgagtggcagggaccaagacagaagcccatggggaggagtaggaatgagggtgacaagaggccactgctatggggtggggtggaggggcctatgggacctcggggctggggagacacctccggcagctgggaaggagagtgtgcagctccggagagcccaggctggagagctcaaggggcgtttcctgagcctggcccggcctcctccgaacaggaaatgggatgctcccagtgccctcccagagcttgctgggcaatagaaccagaccctcccagggactttggaaacagctcccagggtcaggagggccgtctctctctttcagagctcctataggaacccttgttgggcgtgtagatgacagggtgaggtagggcctggtggaggggccttggctacccaggtagggggtctcggctggctagcatccctggggcctctgtttctgcctagatactcaggtgtggggttgacgtgggggtctcggctggccagcatccctggggcctctggttctgcctggtcactcaggtgtgggggtggcacacagccctgccagctcttcactcctttctaattcttttctgggggcctgggcatctgggaacacaatgaactcacccctgccatgaggccctgggcctccctcacggtggctgcagcgctcagcacggctcccagagtcaggaggcccaccaggctcaaccccgcagagaaggctggttgggaggagagaggaggagggttaggggtgcccaggacaggtcctgagtgcacacagcctgggtgtgaaatctaacttgggagtcaggggccgtgagggactcctggggggctctgaatgggcctgtctctccatcagacggccctgagggaaggaggagggaggtgggactcgttcagcctgggggactgcccctccttccctcttttcctccctgccctccatgcctgtggggctatcttggaagccacatgctccctgccatgccctagtgacaagtggccggactggagctgtaatcttatcagtctggacctggacctgggccccaggcatcctcctgccatgtcctagtgacaagtggccggactggagctgtaatcttatcagtccggacctggacctgggccccaggcgtcctcctccagggaggccctggtcctaggacttggggaaaagcattgggttctaaggcagtatccctgacctcctgggcctcagtttccctacatctgcccaccgggctgcagccttcctgggccccctgagctcctgcctgagagtcccctgcagatctggctctgacatcccctcattaaaggggccttcctcagccttacccctgagtggccccagcaggctctggccctcgctcccgctctctggatgttggataagtcgctgctgagtccctgcagggaggcgtctggctagagcagcccccaccccctccccacccacatcccaggtcctgagtggaacatcagccatgtggagccctcatggacctgctgtgcccagccccaggccagtcccaggcctgcctgggactgagccctgactgcacagagccaggtcctgaccgcacagagccacttcctgaccctgcccgacatatacccacactgtgcccacgctcctgtggggcacgagaaccaggcaggaacactggctgtcacccagacccgaggccctgcccaggggagctaggactccagggcagcccctccctgcccctgaccacctctggctcctgcctagggcctggcaccattctggctgtgaggcgtccagctgggctcgtgccagccacccttgcacccgaggcccctcccgatgcagccaggcctggacctcacttaccccattggtgcacagcctggtacgggttcttctccagggacgctcggcggatgacagcaaagtgggccccgaagtaggtaagagtcaccatggtggccacagagaggcccagcagctgtggatagggcagactcagagtgtggggcatgggactgctgcaggagcagggagctcggccccagcgggcagggttggggctctctccagcttcccggtcccgtgagagacaggctcagctgcagggattcccggtgtttccgtggagtggtctcaggaggccttcactgcagacgccccagcacactcacaggcacccccacatggtagacgcatacacgcacagcccagcttccccagacacccaggacctctgatcattgtgtctacggagtgggagtgagccccacccctgtgccagcaccctccggggcaggaaggggagaagatccctggagcccggcagccagtgcccctccaccccagctcgccccaggcctcagccccactcaggcctcctccaggctctgtgctgcccctcaggaggagagacggggttgctcatggtggtccctgcctgcctgcggctgtctgcaagggcaggacacatgtctgcaagggcaggacagggacagtagggctggtgtgtgtgtcaggggagggataatccctgtgctgaggccctgccacccctcacccctgctcacccccacccaccacccactcctgcccgacctgcctgttaccaagataaagaagcaggtgaccagcatctggcatttggcaaccctgactcgactccaaggccccatgacggttcctctcctctcctctcctcccctcccttcccctccctgtggtttccagctgggcaggggcctcagaccgcagctcactgcccaggaggtaggctgcatccgcccctctgtctgtctgtcaacatcgccctaggaccgagctgctgggtgccccggaagaagggcaggcaggaaggggaggggcagtgaggttggctccccccaccacctcaccctggtgcccccagcccagcccaagacaccagggcatttgctgacatctgaggcccttcccaggaagacatggcctcgttcttggtgtggccactgaggacggcgctgagagggggaaagtcatgggcaggacctggtgtgggatgtggaggagacggcgcccggggaggaggaggtgagctccccgtcctgggagtgagcaagtgtggactgggccttgggggcgtaatccttggaggaatttggatggggtctccttggaacatcattattgaggtgttcttaggaaacaccctttgaaatgtcctgtgacagcttaagttttgagaaggtcgttggttttaatgccttcgtgggcggcactcatggatattttgtcgcagagccttcttggggccacaggggtgggctggggcctcgctcacactcacgtggggcctccagggggaggctttgtaaacctcgaatttgcaattacaccgagccgtgtaattacgtatgggtgggggcagcgctgcggccccagtacaggcagggtttccgtgggcctctggggcagggtgggcctgaagagggtgaaaatgttccaggtgaatccatcattcagggaccactccgggccctcccaggagtgctaacaggcggctctgctcgcccctcggtgctggaattgctcctcctgcatttggtcaggacctcatcaagggggagggggccccaagacctgcaggcatggcaaccccagcgtggctgtgggaagagggcccagctgccgcccgctcaggaacgctgctggaggaactgctgaggccaccgcctccctccctctgcggagggagaaccaggagaaccaggagggacaaccaggacccccgtccagcccagcacccccaggcagcaccctctgcagctctggcccccaggaattcccaccctgagtctgtgggggcttgtggagacctcagatgcctggcacccacagtgtcacttcagctgggggcctaggtgtggctcagactggggcgcaggtatgaatgtaggggtggcaacaagagtgaaggt

SEQ ID NO: 5634 - DNA, 6000 bp, Homo sapiens
ccagcccacatagccagccagagaggacgggcagagccaggcctccaactacagtgccattggcactccccacgccgtgccgtcatgtctccactcccccatccctctaggtcttcttcctgtgagcagagagctggctcacatttcccacgtatgagaagagagagctcctgccatggctcagaagactgagccgtggaatccacagccccctgggcaaggttagtcctcaaatccagtcaactcttgatccagactcatactctccacttttgcgcttatcagaggtaaagccttaatccctgccaggcacttggcgcggaggctgcctcctgccctgctgtcagctggtgtgtgcgcagggagcgcaggctcattttaatattggctggagctaaacctcattagaaaagtaaatttgctgtagctgcaaaaaaaaaaaaagcaacccacataacccttccaaagctaaacagaaaacactagatttggacttttggattatttgatgtttcacgttcccagcacctggtgcagagcctccaacaccgtaagtgcttggtcagtgttggtgcaagtgaactgaattttgggggctctctgaccaccctgtcacctttcagcatggataagaagggctcacagatctggaattttggtgtcaagatttttttttttagacgaccatttgctgataaattggaaggattacatttaacaataattagacacgaaagtattattttgtgtttggcaaggacgaactctgagccaaggcgggctctgggttctttgggttgggataaggaagggtgggtccagcccagagtctggaggtgtgaggactcaagcgggtgaggagggaggtgggacagcctgcaccgattccagtggggtgaggagggaggtgggacagcctgcacctattctagtggggtgaagagggaggtgggacagcctgcaccgattccagtggggtgaggagggaggtgggacagcctgcaccgattccagtggggtgaggagggaggtgggacagcctgcaccgattccagtggggtgaggagggaggtgggacagcctccaccgattccagtggggtgaggagggaggtgggacagcctgcaccgactccagtggggtgaggagggaggtgggacagcctgcaccgattccagtggggtgaggagggaggtgggacagcctgcaccgattccagtggggtgaggagggaggtgggatagcctgcacctattccagtggggtgaggagggaggtgggacagcctgcacctattccagtggggtgaggagggaggtgggacagcctgcaccgattccagtggggtgaggagggaggtgggatagcctgcacctattccagtggggtgaggagggaggtgggacagcctgcaccgattccagtggggtgaggagggaggtgggacagcctgcacctattccagtggggtgaggagggaggtgggacagcctgcaccgactccagtggggtgaggagggaggtgggacagcctgcacctattccagtggggtgaggagggaggtgggacagcctgcaccgattccagtggggtgaggagggaggtgggatagcctccacctattccagtggggtgaggagggaggtgggacagcctgcaccgattccagtgggattggctccagggctggcctgacgctgctactccaaattctagagccatcctcatcctggaagcaagggggtgagggtgtataaaataaatagattaaattaaaattcatctagtatttcttctaaaaactggtgagatgacagtttcccaatttatagactgccaggaagccggggcttagagagctctgtttttttcaaagtctactcggctagccacagatggagatgagactggacctcagacagcctggccaagggcctgtccccactgcacttcttccatgtcccctggctagtcttcagtagggtccccaaaggtctttttgcctgggggcctggggagggggtgcatgacttctcttcttctcctgagtgccaggtttccccagaccccacatccttccccactgccctgcattccaggaccaggagggctggggcagggccagaagatggagaggagccctcagcattgtgagatgctcaggggtgaagggtgtccctgaaagtccctgcaagctcttgatgtgcttgacctcatagcctggcctccctctgcctttgggcttctgtctaaaagaccctcacattcctgagagccacaggaaagcaccttcctcagtagaatgtccaactgctctagtgaggggcctcctgcaggggtggacaattgctgaggtcgatgtaggggaacagggggaggcccccagcctgccccaactcaccactcagtcagggaggccctgacttctgcctgtgtgcctccctctgctgtccgccagtgcgcctccgtgcctttgtctcttgtctcactgcctctttctctgcctcagtcaggctctctctcggattcctcctcctcctgagcccgttcctctcctcctctccattctcatcagagaggaacactcatccctctcttccagaaacaatggagcaccatgctcctgtccgctcagcctttcggttggtgcatcctcttccccatctcacactcccagctcctggccggcctcatcaccctgtgctccacacctaggaaaagtatatctgacttggtccccttatccccgagaaaccactaagagaaccttcaggtctccccagaagccgaagctgaggaactgggcttgccccagggcatcctcctgtgaagctccttggtctccgccacgggctccaatcctgttgctggagcttatctcctcagtgatttacctgccccctgcttctggtggaacagtgagtaactgcccaaccagaaacctacacacacatattcaacacagcgcctgcaagcttccagctcacctggacctggagtgatccccaagcatcctggggtcaggcacagaaacaggaacagcgagctcctggctccagtgctgaatggggcacagatgcattaactctcccagtcccattaaccttagcaagtatttctgcttccatgaaaaggggaagagggaaaatgtctctaagctctggaacctttggcagtgctgggcatggactgggcagagtgagaagtctgtctgaagaccctgggaaagggtcttcaccccatgggaagaaagggaaggcttgatgtttggtccagtaaggccattaatggtcaccaactgagcagactctgggaggaaatgtctcagtctctgcagtggctaccagcagaggtagggcgacataagcacagaagacaaatcttagaaaaccctagaacaacagtcctgtgcagccacatgccccacagccctagtaacttagggagtgatgtgcctcccatttccacacaaacacatccaggcattgcacagtgctaggccctacgacatccgtaccccaacattttcaacagtgcgtgctacacagcccaagctctaggccccattgggcaccccacctatgcaggtgcccatgcactgggctagcaactgtcagtaaaggtccccttcctgtatgtccagagtccttcagctccagcttctacaagaatccatgcagctaggcctggctgggggaggaaggggacagggaagttggccaaggctcccatgtgtgtgcatgtgggggtggttcttgaccttagctgcttggtacggggctgtcacctccttaccctggcactgtcggacctggtggcttccttctctatttcctgcctcaactctcagcctcctttttctggaagttgtgtgctctgactttggagggattgggacctcagacctgagcccaggtgcagatgggagggtggtgaactggtcgcgcctccttcctccttgctacaccgaaggtcccaagggccctttgccacccttgctacccctgggtccctcagcgcgccccgcagagctcgggccccctcaagagagttaacttggcagtgcccaggagccagagagcgatccagagagcgctgttgggcagcaggggtggggaggtgggggacgactgacccctgactcctcatccggccaccagaaaccacctgctgagggggccgggaactgacgactgagagcccgggccgattgttagaagctgctgagaaccagctcttcccctaatcccggtcgacgagggcaggctgtgccgggttttgtttcgcagcccctcggcagcagcgcctcccagcccgagctcggttctcggccccctttccagctgcccccagcgcgcgcagcgcacacacacacacacacacacacacacacacacaccccagcgcgcgcccgggaggacatggcgtgggcaccgatggggacgcagaaaggggctctgtgcgcggcggggcgcccgcgggggcgcggggagcactgacctgcggcgacgagtccggagcgtctccggtgcggtccatcgcgggcaacggcccctacgccccggccccggcgcccctagaccgctgccctgggccgcgtgcggctccctccccggggactgtcgggctccgggcccccgggggccacttcatagccgcggggtccgcgcgcccgcccgccccgcccggccccgccgccccggcccggctcgttctgggctcagcgaggcggcggccgaaggctgggagcgcgcgggagggagggcgcgggcagggaggcggggggcggggggcggggagggggagcggggagggggagcggggagcgggcgcgggggcgagaggggcgaggggggcgcgcggccggagccgagccgaccgggccggcgcagagtccccgaggtggcggcggatgcgccggtgccgccgcggctctgccggcgcctcccgccccgcccccacccgctctccgcccccgccccgcccccgccccgagcccgcgccagcgccggcgggacccgagctgctaatggtcggtaccaacctcgccagcctaggcgggggcgcgaggagggaggccggcgaggggacccccccccgggattggtatcacctccccaccgccccccaccctcccccggcaccgtcccccgcggaggcggctcccgcttcaggcggcggagcaggggtggcgggcaggggccgagcgcacccccagatctcggctctcgagagttaaagctcggcccccgcctgcacccccattccaccccgcctccatcctggctgctcctggcgcccagcttggcagcctctctcaaagggtgattgtttccggccgggctgctgcaggagggcggggggcggcgctctgggaccgagaggccgagctgggaagccggtgggggatgcggctccttccttggctccaggcaccccggatgggaggtggccggtgggggcggacggtgccgtgccggggtacggggtctgctgccccgtggaagggcacctcgagccgccgcgcgtcagcctcaccccagcctccccttccgggccggtgcacccggcgttccggagagaggcccgggaggcctgcgtgggcggacgggcgcggggaggccgggggcagcgggatctccaggagtttcccgggcctctgccgcggtgtgttggtcggcgggggacggaggccagtgagtgggcgcgcacttggacgtatgtgggtgcactggtagggtgcctctgtggagctgtatattccagatactccttcagcttgtcggagactttgaagccatccttgcactcgttttagaggttggcatctcccggtgctcttggacacctgtattcgggccacacccgctgtgtcctcttcacagccccaggagaaggccacctcccatggcggggttcgcggcgggaccagggactgtcggtactttctctagggtctccctccttcccgggaaaccagttccagccccactgctagg

SEQ ID NO: 5635 - DNA, 6000 bp, Homo sapiens
gctgggccagacagtggcctccattgagcgcggcggcagcagcagtggggtctttgttgggggcctagggccaggagaaggagggagaggtgacattagatgccccccactcagccagggcagacagaaggggagagagatggagaaagagagacgggggctgggtgcagtggctcatgcctgtaatcccagcactttgggagcccaaggcagatggatcacctgaggtcaggagttcgagaccagcctggccaacatggtgaaaccccacctctactaaaaatacaaaaattagctgggcgtggtcccagctacttgggaggctgaggcagaagaattgcttgaacctgggaggtgaaagctgtagtgagccgagatcgcgccactgcactccagcctgggtgacagagcgagactcttctcaaaaaaataataataataattgggaggctgaggtgggtggatcaagaagtcaagagatcgagaccatcctggacaacatggtgaaaccccgtctccactaaaaatacaaaagttagctgggcatggtggcgcgcacctgtggtcccagctactcgggaggctgaggcaggagaatcgcttgaacccgggaggcagaggttgccgtgagccacgatcgtgccactgcacttcagcctgggtgacagagcgagactccgtctcaaaaaaaaaaaaaaaaaaaaagataggaacccctgttttttctagctagaatcctctgctgctatatcagttgggtgcccccaaactcaacaaaccctccccaactgctgtcaccatcaggctaccagaacaagctacatcaggggctaatggtgtcagtcccaaagaaggtggcccaacctcccgcagctcccaggagagggccaggagacccctcttttcagggctcaactcagaccctgggcctccaggccccgggcactaccacagaacagaggctgatatatccaggcccttgagtgtggggcccacctggctggtcccctcctccttgctgtccaggaacatcttctccaacgccaggaaggtcaggatgccagcaatgacccacagccccagctgttgctgctgctgcaggctctgcccctcaccacctgcagggggcggcaatgccaggccaggccaggccaagccaagccagggccataggagggggccatttggaatgggatctcatccagggcaccagggcagtgacaagggtgggttgggcagctggggcccagaactcccactgggaccagggcccagagaccaggacaatgaccctccctccctcccaggcaagctcctgccagaaacccagaatccctctcctggtcatcctggccatccctgggcgtgggcaccaggcccccactcctggcactgtcttgcccctggcgtgtggcctcacttaccagggctggcgctgcacgtgtaggcccaggcttcgggcagcagatgcagaaacacattgcccaagagtccccccagggcgaagctgagcagctgcttcaggcgccaggccccagctacaagggagagatgcggggtctgggggctgactggctggagctcctggcctgaccttcatcccaccccactcactgggctctttctgggcctgcaaggctggatatgggtggctgctcttcctgggtcccccacctcacagcagaaacaccacaccctgccaaatgcccacagggccaccaccatgtcatggtgaagagctgacaggtcccagctcccaacccactagctggtgaccttggcagatgactttggagactcggtttctccatctgtaaattgggtcttatgggaattattattttatcttgttttgttttgagatggagtctcgctctgttgcccaggctggagtgcagtggcgtgatcttggttcactgcaacctccatctcccaggttcaagcgactctcctgcctcagcctcctgagtagctgggattacaggtgtgtgccaccacatccggctaatttttgtatttttggtagagacggggtttcatcatgttggccaggctggtctcgaactcctgacctcaggtgatctgcccacctcagcctcccaaactgctgagattacagctgtgagccttttatgggctcttatgggaattaaatgacaatatgtacagcaagtgctcattacgtgggaatttttctcttctcagctgctgtcactctcagaaaagtggcagagatttggggacttgcagcatccagggttggaagtcgcctgcctgaaagccatgtccaaccctttggcttgatagagaaactgaggcctagaggacagaggcagctgggtttggggtgggatcccaggggaaactgctatttcctggctgggtgaccttggactggtcaaagaacctctctgtgcctgtgcatccccacttgtaaaatggaactaataatccaggtgctccctgcactgaccccgcagggctgctctgagggttgagcacaggcctgaccatggcccaagcagggctctattcacagctgtggcaccgccctcagcccagtgcctggcacagagctgctgggtaaccatctggtaagtgaatggttcctgagcatccagctggcagcaccagcccctgggatgctcgtttctaacagattcccagggccttggtccacccctcttaggtgggggataggcacgtgcattcttagcagctccctagagctctcctgcgtgttttgttacaacatgttatttgtgaacgggcagtacatgctcatggtacaaaagggtagtcaggacaaagctcccacccgtgcccacatccccatctcctagaccccctccccaggggcaggccctgctaccaggtgctcatagcttcctggggaagccagagccagccgcccctggctagatagctcctacaggaccaaggggagaagttctattctatcctctccctccatctcagacactctgtgacctggggtctcctaagaagagcagcagcatgcttcccacaccctggccagccctgggcgccaccggagagtcacctaccttctgagcgcagcatggtccccatctctaggggaatgacaagcaacgggaagaccccactgagccccaccatgagggaacccaggagggagcagatccaggtgtccagccgctctccgctcagcagagccccccaggactcgctttccttgttgtccaggcgacaggccgtcgcagtcccccggctccggagggccggctgggaacccccagccctttccaagagctccagggcaagggcagtgaggaagaggagccttgggcccgccatgccacagccagggcagggacatccaggcatgccacgtactgaaaaacacaaaaggccacctatatgagctacagccttggccgcacacctgcttaggaaacgtggcgcctccctcctccccgcaagggaccctggcatccaccctcctgctgtccttgccagagcgtctgagcatccaaatgctgggtgcacagcaatggggccctgtgtctccacaccctactcctgagcactgcgtattttttccttctgagcagctccagactgtgtcagcacctccgcctgaggctaaactttccctaatgacagggtgaggcgctggctggctctcctcagccaccggcggcacggcccggcccagctgggtgtctctggctgccaggggaggccctgccgcccgcgacaccccagagactgaggcaccccttctaaggggatggggtggattcagagagacatacgtggggaaactgagcagatgagccagggcaagaccatccacgcttcttcctaggacatgagaccaatgtccccagggcactgagggcaacaggagatggggctgatgaggaaggagcctttagccaggggatgcctctctcttgtatagcgcaggctttagagcccccacggtgaattctatgctgcactttgagctgtctaactctgggcaaatctctgaagccccccctctgagcctcagtgccctcatctgcaggacagggatcaatatcacctgcctcagctgtgaggacgagataagcctgaaagtgcaggtggatgtacccggcatgaggaggcgcagaggccctgcctgtgccagggaaggcctggggctccctgcagcaggaatgtgcccagccggccgatcacaggatgtggacgtgagtcaaccaagcgagaagttccatctggaaactcgggcatgaggtttaaatgtggtctgctctgcctcaggctggctgtgaccttgagctggtgatgtccctgcctcagtttcctcaccttctgatggagatgggaggggaagaaagcagctgcctctgggtggtggcagagatgcccatgtctaggacctccaggccttaactaatcaggggcactgatgaagccagcggggctccactggggaccacaggcaagactgggccaggacgaggcggtcacgcagaggtgaggggaccacaggctagcgggagggaatacacggagagtccaaggggagaggaaagtagagagtgagagagctagagagaggcgggtgggacgcggagaggacagcgagggagggatggggcgtggggcgcggagcgatgggggagaggaggccgaagcgggcgagcctgactcccgggtcctgggagccggcccaggtctgatgaggaccagtcggacggggcgagggatcggccgggtccatcacgcccggggcgcgggccccgagggtcctgctggcactcaccgtgcggcggcggcggcggcgatccgggcggccccagccatccagctgcggtgccgcgccccgcccaggctctgccccgcccggccgcccggccgcccggcccccggcccggggccgcccccggcgcgcggccacgtcacaaggggcctgtccggaacccgaggcgccgcgtgccgcggggtcggggggagtggcggcgggagggcgcttccgcctcgcggcggtgggggacccgggtagagggcgcacttccgtttgggcagggctgcgggccggaggggagggtcggtcggaagtgagagagccacacgcaccgcgctcagccaggctgggcagggacggaagcggcggctctgcggggaccgcgatcgaccaggctgcggggcttgcggatctggccgccgcttcccgtccagggccgcagtctgcccgtggccgcacgggggcgcgcccggccgccagaccacgccgcccaggtcgggctgggaggactactgtgcgctcctgctctgagtcagcccggcctggctcctccatgagcaagggaaaggggaagtgcctgccgcagggaggggcctggccccgggaacctcagaagagggaattttattcttactcatcgaattatttttatgctttggtttttcactgggaacctcaggccactgtctccagggcttgtaaccctttggggtccaatgcatggtggctggaccctgctgatgggaactccaaacctgggaggcgagggctctgtgcttccctcacctggaggaagctagacctgacctctttggttagactaaggcagcaaacactggatagcagttcttataaccgcaatttactgaccacctactatgtgctattcactttactcgcactatctcactgaatcctcatattatcccattgtggtgggtactgttagcccagggtcacacagtggcacagatggcagagccaggattcaaacctgggtgtcctgaagccagagtatgtgataccacttctcacgtctaggtcctgaacagcagtgggagtctggcttggcgtttcgagtttgtattcttctctggaaatcagccagtacaggagaagattcaggaaggggcatgtgggtactcacttgggcagagatagcgactgagtacaggtctcttaagtctctgaccctcatcagcctcccatggcagctc

SEQ ID NO: 5636 - DNA, 6000 bp, Homo sapiens
agttgatctcacagaagtagagagtataataaaagtagagaagtagaaaaacaggtaaaagaaatctgtggtgctacaactcaggactatagtttctctttgtgagtataatgacaggaaggaggcaaaaaaggaattaccggaggttgaggaactccctctgtgtagacatgaccttagtattcattccttcaatcatgctgccagaataccagcaggccccgtagtgaaccttcacagtatctctgctatatgctttacctgcacagacacaacagtgatatggactccagggctagtgaagccactgaaaaaacaactgaagaggtgtccacttgtatcagaaggtgctggttgcctaccatgttcattatatgttttctggtgtatctcaaagtggtttcctgcaggatttacaacagtcaatcaaggaagttatgggaaacattgtggacatggaaaaaataaaaaataaaaaacgtcgggagggaatagttgtttaagataggcaccttggagaaattcaagagttaacagacaccacaccagaggcattaacagaagatgacttgatggagatgaatgcttccaaacaagtgccagatgatgagaaagaagtagaagaagcagtgccagaaaacaaactgacattaggcaatctggcagaagtcttccagttattcaagactgctgtgacttcttctgacatggacccctattataacacagatactaaaactaaagcaaacagtggaagaaatggtactgtacaaaaacatttttagagagctgaaaaagcaaaacagacaaattagtatgtatttccataaagctatattgactgcgtctacctctccttcctcccctcccaccttctctgtctctggcacccttgagactacaagaccaacccctcctcttcctccttctgctcagactactcaacatgaaaaatgtcagaacgaagacctgtataatgatccacctgcacttaatgcatggcaaatatattttcttcctatgatttgattaacattttctctagcttactttatggaaagaatgcagtacataatacatatacaaattatgtgttaatccacagatgtcattggtacagcatccagtagtcaaaagtagactattagcagttaagtttgggaggggtcaaaagttatatgcgtgttttcaactacacgggtgtgggggtcgacacccctgatccgcacactgttcaaggatcaactgtactttattgacctatttgcccacgtatcttccccaactgtgaactcaaagagtactgacacagtatttttttctcctgtaacctgagctctggtgcacttcctagaatttagtatgtccttcataaagaattaattaagaacgcacctaaacatataactttttttttttttttttttgagacacagtctcgctgtgtcgcccaggcctggagtgcagtggcgcaatctcggctcactgcaagctctgcctcccgggttcaccccattctcctgcctcagcctcctgagcagctgggaccacagaagcccgccaccatgcccagctaatttttttgtattttttagtagagacggggtttcaccatgttagccaggaaggtctcgatcttctgaccttgtgatctgcacgcctcgtcctcccatagtgctggaattacacgcatgagtcactgtgcccagccaacatataacttttaactcttcctttccatgaatactttatttattctcgtgttttatattcaactctgctacttgctggtaagttcaagaatttgaaattatttgggagcaaagattttatctttgttaaaaaaaaaaaaaaaaaaggcggctgggcgcggtggctcacacctgtaatctcaacactttgggaagccgaggcgggtggatcacaaggtcaagagattgagaccatcctggccaacatggtgaaagcctgtctctactcaaaatacataaattagctgggcatggtggtgcatgcctgtagtcccaactactcaggaggctgaggcaggaggatcatttgaacccaggaggcggaggttgcagtaagccgagatcatgccactgcactccagcctggcaacagagcgagactccgtctaaaaagaaaacaaaaaacaaacaaacaaaaaacccatatttggctgacgcgctggctcacacctgtaattccagcactttgggaggccgaggtgggcggatcacgaggtcaggagactgagaccatcctggctaacacggtgaaaccccatctctactaaaaatacaaaaaatcagcagggcgtggtgacgggcgcctgtagtcccagctactcgggaggctgaggcaggagaatggtgtgaacccaggaaggcacagcttgcagtgagccgagatcgcgccactgcactccagcccggggaacacacctagactccgtctcagaaaaaaaaaacaaaagcatatttatcctacgatagtgttataccagatatatatcctaatttcatgaatactctggtgtgtatatagatcatctttccagaattatagtccaagtcaaagttggaaaataattcttcagttctagtaatgaggcaaacaaagcaccactatcatcatcttgggaaatctaaagggttaagtaaatacagtaggaaacaagggaatatgtaatacagaagcctataaaaacgaattataccattatgttaagtgaaataagtcagacacagaaagacaaatatcacatgatcttactcataggtggaatctaatagttcatcgcacagagagtacaatggtgtttaccagaggccaggatggttggcaggggggatggggagaatttggtcaaagatacataatatcagttagataggaggaataaatttcaagaaatctattatataacatgaatttatagcaagctgactatagttaataatcatatattgtattctttaaaaaaatgtaaacagtgtagatgttatgtactcttaccacaaaaatgataactatgtgaggtaatgcattgctaattagctagatttaacgattccggaatgtacatacacttcatagcatcatgaggtacacaaaacaatgccatctgtcaaaaaataataattatatgtagcatttcaaaaagttcacagcatcaaaaatatttgtaggggtggggggacagagagcatcaggaagaatagctaatggatgctgggcttaataccgaggtggtgggttgatctgtgcagcaaaccaccacagcacacgtttacctatgtaacaaacctgcacatgaagcccagaacctaaaacaaaagttgaagaaaaaaaaaattcaagacgtttctatctgatattggactgctttgtcactttttcttttggtcttcctagtgcttatttactacaggataaaattagcacatgctatttaatgtgttcattttaagtactatgttgttttctatgtgttaattttatctcctccaggtgagaccatttttattaccataggtctaaaatgacaagattaagtccaaacagacagtaatcactcaacagctatttattgagtaacttaaagattcaatatgaaagcaaccttgatcaaagctttccagttgatatattgtgaaacagggttttttcctaaacatgattctaaaaaacaagcaaacaaacaaaaatcctccccaaatgaaaaactccagtcactatttagcaatactaatttcaatttatcaaacagaatcagcccaaaaatttcaacaggtcagtgagatttaaaacaattcgatggcaagaatttcaatgaggtttggctctaattaaaaggtatcacagatcactgtcaaagtcaataactcagtagtgcggtaatgatttgggagtccttttcaatttagacatttgtcaatcatgattgcctttaaacatcagttacccactgtccctgctcagttttgaaaaaaaaattaaatacaaaaatacaactcaaaatacatgttttttccacacataaaattggtattttagtaataaactctcgattcagggttcataaaataaagtaggtatacttctaattcttcctagcagttttttgggggaaagaaaccctaagtattttctgttatttgcagctgctttaacagcaaacgacaattaaatgtgtgaacaaggttgtcagagtaacacttgtcatttacaccgcttaggaaagacatccaagacttccagaaacactaattaaaattaacaaaagcttcttatcggaacttgtcagagagctatagtttgtcagacacaggaaaaccagatagcctcaaagttcaagagttttcgctctaaggtttaattccaaaccacctaccactaggcactaacgaactaagcccagacgctcagcaaccaactcattaaggtaagagatcccatcctttccatataacacaaaattaagaaaaagacatcgtggggaaggcggagtgaattttctatcagaaatcagaagataaatgagcaggaaaaaagtctatcctcacacacagcggagaaaggtgctagcaattgcttgataagccctaagggtttattgtttcaccaaccttttctttaactcaatgtgaatgaaggcactcaaaaggagaagaacgttacgtgatattacctacctcgggccccaaagaaccctggagaccctcaaccaggacacaggtgggcctttctcacctgggccccgccgaagtcgaccgtcctttcgtagggcgcacttttcagcaatacgccttccgattggttggctcgggactgacgtctcagtcctattggttacgagagccgcggttggggcgaggaggcgggagtttggcactggttctgataggacgggtgtttgcgttcccagagttcctattgggttaacactggaggctctaagatggcggcagtggcaacctgcggtagtgttgccgcgagtactgggtctgcagtggcgacagccagcaagagcaacgtcaccagtttccagaggaggggtcctagagccagcgtgaccaacgacagcggccctcgactggtgtccattgcgggcacgcgaccgtcggtgcggaatggacagctgctggtatcaaccgggctcccagccctagaccagctcttaggtcggttcagagcggagatctgggctcagccgaggggaaacttagggaggggacctgtcggggaagccactttgaccccacatctctttctgacccctaaaccttcggaggaggagagaatagcctggtctgattgagatggaggggaatacgggttgtgtggagacttctgagcgctgttaactaaacatgttttagtgccctcgctctctatttcattccctgccctccaaccccttttcatattacggaggaattcgtacatgctttttaccctgaaatgctttctagtcaagggaagacattaatttatggagatggtttggctttcattcaggatacctcccttctgctttctccaggcagctcacggtttagaccagcctgcaaaagtttttataattgtgagagacagacttcattagaagatgctggaaaaaaatgatttcccctctttgaccgtcagactgcctgttctctggttctaaatcttaaaacattttggctttaagagagcgaatgttaaaggcttatgttgacacataatccttataaagtattttgagcctgtcgttgatatttagatagtgtctgcgttaaatctgtgtatatattttttattttttctatatacattttgcttcccagtattgattgctgctacattccatacgacatctttaaatttaactcacattttaacgagaaaagtctagttcttaggctttcctttaaaatctctggaattttttatgagaagcctgctgaagaatatgcttgtttcataactgttatattcaaaggaatgacc

SEQ ID NO: 5637 - DNA, 6000 bp, Homo sapiens
attcaggcctaaaaaaaggtccaaaaatctgttaattttaactaattctcaaaggagtctgatgtaaacagattaaagctgtgctttaagatcaggctgacaggccagccaggagacagaaatccaggtataaggctaaaagggtctagataatagcttctggaaagcatggtttaacaccacatatcaactttaatagccaaaacaaattaagcaagcagcttttctttataactgccaggcagaagaaaatgctttgatgtatttggggcaaaataacatactgcaatgatctaagtcaagttattctgtgatggaggcggaaagattatatttgcatacttatttttaagatcaggaaacaagaattgctgtgttcttaaagtcagtttcataagagtagaaattcacatctgcttagggaaaactaggagcatatttgcatctctttattacacttctttatggcaagtgaaactacagctgcagaaataaaataaaaaccctccccgcccaaatcaagacacatcaaattaaataaattatattaggctgggtgtggtggcgcacgcttgtaaaccccgcactttgggaggccgaggccgttggatcacctgaggtcaggagtttgagaccagcctggccaacatggtgaaaccctgtctctactaaatatacaaaaattagccgggtatggaggcacatgcctgtaatcccagctactcgggagactgaggcaggagaattgtttgaacctgggaggcgggggttgcagtgagtggagattgcgacaaatcgagactctgtctcaaaaaaaaaaaaaaattatattaaaggtaatagcttctcattcccacacagcaaaagcctctctattcattcagatcctgctccactgagaataacatttttttccccaagttctctcccacagtaccctcagtcttcaaacaattagaggcaccatcctctaaagctgtttctgaagactgaggtggcagatctcaagttttttctctgcgaaattcaatgctaaaagtacttatcttgtgttgatcactacagagaagcactcacaggaaaacgggcaaatacaaattggtgaaataatacaagacagtatgtcatattaagtgacagcttaattcccatgtgcagtgtaagtgctagaggaattcagggagggaacagttcaatgtaaggctgaaactaagttttccaagaaaaggcactcaagcagctcttgactattctcttctgtccctcacttattggttaaatcttccaagcactcttttgtgagaccttttatctatttctgctactcatgttggggttctcatcaccttgtcattctattttttaccacagacagccctttacaaagaacatttacttctagtagattccaaaggacagggaacagagctgggtgcggtggctcatgcctgtaattccagtactttgggaggctgaggtgggcagatcacttgaggccaggagttcacgattagtctgggcaacacagtgagaccttgtctctaccaaaaataaaaataaaaataaaataaaaagggcagaggaaaccaaactaaaaaacccaaagaacatttaccagcactatacaatttgatccttacaacaagcctataatatgtatgaatgtccacaatatttacataaggaaatttaaattcagtaatatcacacaacttatccaaggtcatgtggcttttattaggtaggtgcaaaagttatcgtggtttttgccattactttcaatggcaaaaacagcaattacttttgcaccaacctaataacatgcggcactagaactcaaatttgtctctttttattatatattatacactactgtgtatacggccttattaagaagtcttctaatttctgtctctccaaaccatctgaatagttttcctaaaaaccactttacacagtctcaaaacccttcaacagctttcctctacttcaagcaatccacggcctccctaatcagatgctatctacttgtcactacagttcctttagagagccttctagtcaactcaatacctgagaaacataaaacaccatcacatctgtgtaactttactcaaggagacttttttacctggcatgtctttcttttctccccccaaataaggtgccagttccactttcaggaatgaggcctttccttcaggctcttactctttttttttttttttttttgagacagagtttccctcttgttgcccaggctggactgcaatggcgtgatctcggctcactgcaacctccacctcccgggttcaagcgattctcctgcctcagcctcccgagtaggtgggattacaggcatgcaccaccacacttcgctaattttgtatttttagtagagatggggtttctccatcttggtctggctggtcttgaacttccgacctcaggtgatccgcctgccttggcctctcaaagtgctgggtttacaggtgtgagccactgcgcccggccgaggctcttactcttatcaataagctcgcagggttcactctatttctctcatttgaacttccgtaacaagtacacacttgagcgaatataccatatacttccttaaatagattcaattaccccatctcctatatttggctattctgagtgctctctgacagtaggattcttgatttactcctccaccatcacacatctgtactggacactacaggtaatggagatcattaatgtgtactgtcttacttggttcttcccaaaaccctgtgatctaggtgccagagattccaaaattccaaatgaagaaaggttaagtgacttgccaatcttcatactgttagcaagtagcagaaatacttcaaagctgaaatcttatgatccccacatccgggttctttcaataacacaatggtgccatatacactattccataataatagtattctatactgccttagcagaatgcccatacttaatgtttgctgatgatgatccaagtgcaaggaagagcaagagcagttagtggggcaggtaagcacaggctatgaggtgcttacctagcaagagggaaggatttgtgtacacaaatgaccatcaattccccatactctcacatgtcttgaagcaatttaccatcccaacctccagaatatgtttctgtatcttaaggtttgagtgtgaggccaggtgcatggtgacttatgcctgtaatcccagcactttggggagccaaggtgggaggatctcttgaggcccaggaatttgagaccagccagggcaacacagtaagaccctgactctacagaaaagttaaaagcaaaaaaattagtcaggcatagtggtgcacatttgcagtcccagctactcaggaagctggggtgggaagatcacctaagcttaagagttcaaggccgcagtgagctaagatccattctgggcaatggagcgtgacccctctcacaagagaagagtgtgagaaccatgtctttcaaaaccaatgacactcaaaaagacaagtaaaaagacctggatcttaacccctcaacataatcatgttttcatttcttaagcacctaccatgtgttatgcacagggaagtctgaaagctgttttcaattatattcaaaaattctgcttactatattaaagacaccatgcttaacaattctcatcaaaccagcccagggccctacaatgagagaactggaagggaatttagagttaagtccctcattttaaggctaaatctctcactttgcagatgagaaaacagatatagagagagcaagcatatttcaaggtcacaaagctaattagaggcaaaatcaacaccaggacgttgttctccgtgcaactgtttcttccaagatgctgtgcaaagagcaagaaaggccaacccagggacagttttcctttttttcttttcttttaaacccttgttgctaggactgcagttaaaaaaaatttttttggatgagcagagggaggaaaggggcaagcgtgagcgggcagcagtgcacttggtagcaaagagggaggtggagggaagagaggagagggcggggaaaaacaacaggaaaaaaagaaaaatcttaaaggcttcttgtcagcccagtagaacagtcaatactcaaatattttcagtattcgcctatcatgataaaacgcctaaaaacttcagtaagcaaaaggacaagaagcactttggaatctgtagcagcacgcaagggtgatggtggtagagagtttgggggatactgattctttaatctttgggcttcggttttccgtgtctgtgaaatgggcactgacaacagtgcacccagccccccaggagaaaagagatggacacgattaaatataggaaaaatcaaattaccgaaaaaggtgtggcgaccaggaccagaacacttgcgagaaaagaagaagttctaaagaggaccgggtccaggtttgaagtgtgatgagggcaagggcaggctccaagcgtgcgtagggttgtgatagtggtcacacaagggctcccctcaaaaggccgtagaaaataagggagaccgggatgggaaggttggctcgccgcctcccaggcctccccaggattcaactgttcccaagaaccggctcctcaccttatccaacaagccgctacggccacttcctgtcccgcagttggaagcaccaccagccccactacagcctccgctaccaccgcttctcccgccctgtacagctgccgccgccatcttgtccgcctctgcgtctccctcccctccgacttgtctgaagccgattggctggagctgacagcgtgacgcgccgcgcggagtcaatcgggatccgtagtttgggtcttgctggcgcgaggtagtcagaggacgtggccgcggggcttgctgggacttgaggttagacgtcccggccgtcggttgccgcctacactgtctgccgtcgcgtcgcagttactaaggcgtggggaagatagcggcaggcaccgcagtggagcggctccgagatccccggggggctcgcaggcgcgcatccctcctgactgggacgtcgcctccgcagacccctcggaggctgaagcgacgccggaggcaggtgcgactgaaacttagttttcgaattcgagtctttctccggcccaggtgtggagtttccaaaggagtgggcaggagcttgtccttcatccttttctagcccggttgtggcacttaccgattattctctcaagcagctgtcattttagctgtttgtaatgttttcgtgttaacggagaactcgcgtttactgagtgcctacagtctgccaggcagtatcctatgtgcacttccagccatcctctctctcactgagtcccacaacagccctgttagatgaggaggaaactaaagaacctacccaaagccagatagcatgtatctgaactcggttttcaagccggcatttaaaaaaaatcaaaaccaatatatatcccttctgacactctgcttttacggttttaggatgtaatagtattctagattttaattatttttttcacaaatgtatattgagcaccaatattgtactaacggatacaggggatcaagatagacctggttgctactctggtggactactactccatgacagagttatcaaatagcagtattgtattataccatgctctattacgttgtattttaattaatttttttcacaaatgtatattgagcaccaatattgtactaacggatacaggggatcaagatagacctggttgctactctggtggaactactactccatgacagagttatcaaatagcagtattgtattataccatgctctattacgttgtattgttttttaattcctatatatcccccataagcgtctaaagaattaaacaaatatttttgagtttcttactatgtaacaggcactattctagtcaccagggatatatccctgaataaaacagacaaaaacttgtcttgggga

SEQ ID NO: 5638 - DNA, 6000 bp, Homo sapiens
tcaccaaggtgaccttggcaagaaccatttcaacagaatgatggttgcagaagtcaaaatggactcggttgaggaatgaaaatgggaaatgacttgtaaaatggagaggcccaaactatccaactgttttgagaagtttaactgtaaagtagaaaagatagaagtgtaactggaggggaaatgaggtatgaagtggtttattaacaggagaatctttagcatgtttaaacactgatgagaataattcagtaaagtggaagtcaaagatcctccaagatggaaggactaagattccgagcacagaataggcactggctttagacagatgtatgcttgccttgtttagacaaaagagaaagaatgatgcatatgtgtgggtaaataagttgtaggatgttgagagaatgaccgatagcttctacttttgtctatgatgtaagaaatagttacttgcataaagtgaagataatggtgcgggggagtgataagagatttaagaatgttggtttgaaatagtcattgcagggaaaagttaaaatgactagaaaaatctagtaggactatggggctgagactacatttgaagctgataaccatggattcatagtgatataaatctgctccacagttgtttcctggggtggcatttagctgtccaaatgcaggtacagacaagtatcactttatttaagggttcaaaaagagatgaaaggcaaggaaattcagcctattgcacgaaaaccactagtttaagctatacaggaatctaaagaaggaagggactaatggaaagcagaagcattggctgcagtgaaatcagagaatgatagagggaatagttcaataaaccaagtggaaggaatatggtcaataaataagatgcaagtattttgaagatggagcaatttgaggtgatgataatggccaagatatgacaaacggagtgagtggccaagacagagtggaaatcatcagagattgggccaaataactaggagacaaaacaccaaatgaattgtctatgtaaatgttaaaatatcaaggagtggacaggaagaccaagggctagctatttaaagtagcaggagagtagtagtaaatgagagtggtagacaagtaatcagagggttgtatggatgaacagcctcaaaagaatgaggctttgcaaaggagtgggcagttctgaagccacaatggcaggaacaacaaagtatctccaacgtttacatttatgataacatgataaagcttgtcaacatttattctttagtgttgtgcttggaacatcacattgctccgattatgccaatggctatcactttatggtaaaacctgaggaagaccagattatggaaggtaaagtggtaggaataaggtttttctcctgaacactgaacatatttataaacaggaaagaaccaggacaagagattgaaattttaagaaagggattaagagatgggtcagactgagggacatttgttttttcatgcctagaggcaggttaagtacagatagaagctctcaaagttcaaagagcaaaggctttagaatcagacagatctatgctcctagctcttctttagcaattactattgtgtgacatggaaggacgggaagcacagataattcacaatggaagtttattgcaaggatacacacaaatgttgatgtggaagggtcctcccaccagcagcacagtatcacaggtcccatcctcctatcttctggaagttaagaagttcaaacctgttttacttgcatttatatttcccaaggacagagtgccaccctgtgggtaaggtcctagtcagcaacttttaccttcctaacaaacttttctgttcaagagatagcagctaaagggggcaaaaaacatgattggaaccacttttctcaataagaaactttgtataggccggccgtggtggctcacacctgtaatcccagcacttttggaggccgaggcgggcggatcacaaggtcaggagttcaagaccagcctgaccaatacagtgaaaccccgtctctacttaaaatacaaaaacaaaattagctgggcgtggtggcgcatgcctgtaatcccagctactcgagaggctgaggcaggagaactgcttgaacccgggtggcggaggttgcagtgagcctagatcgctccactgcactccagcctgggtgacagagcgagactctgtctcaaaaaaaaaaaaaagaagctgtgtataaatgtttgcacgaaatctgcagaatgtgccttctggcacattctggattcttgcttcctcatctgttaagtgaggttaatacctcttacttatagttgttgtaaagattaatataaagcatgacatctaccaaaatcagaacctacacaaagtgtgtgctcaataaatactatcttaagaggcagcctgctgtgtaaaatgaacatggactttaaagtcagatctgcactttaataccgggtctgctacttgagaatttcaattttctgctctgtagataggatagaacatctgctttgtaggtagttgtaagaagttttaaaattattactgtggaaaccaatgtctaagagcttcaatttctctaaaaaaggaaacagggtcacctgatgagggtggggtatgggattaaggacagcagtagaggtgtaaaataactgccatggtaattagagaaggaaatggaccaggaacccataaaggtgtgtgttggtgtgactgcgtgttggtgtgaggacttggctgaggttggaggccttgaatatttagtggcattcattacacaactgtttttctctagcagtttgaatgaaggaatggaaaagacagaataagtggaatgatacaaaaagatggccaatggtggcaagaaaatggggtgatggaatgatatgctatccaggctgctgaatacagaagtaaattacacaaagttggggggcgggggaggcaataatgagaaaagaatggagaggctggaattagaaatcacagaatgtactcaatgggaccaatgtggggcagatgatagaaagctggatttaggagtttctagacgagcagtgaaacattaacgtagcattaaagaagtcccgaagatttagttttatccctttttatcataaccattgccatctacttctcccttcagtttctcttcctcggatttggctgcattgcagaatatggtccccagctctctcccttcctgattgcccgtgaagacaaccacacagacctttgttcaaaggttttactgctcatcctgagaagactgtacatactaagaaagtaacaacctggggaaatggctgaagttccaaaagactccagacttcttacaggtttcatctctcttctgtggccactaacttcccaaggaggcagtgcccaaaagccctgtggttttttgatccgttgtacttcgatagctcctcctttccctagatccagcagaactctagacatgtaagacatagttcacaaaacaacagttatgaaccaacaaatacttggctcacggttatgagccactgaagtcagtcagacttaaggacaactagacagagctcccattttctgtcatctgggcaggaaccaatctcctgttgtataaaatgaccttctggtactttctggaatcttgcttcctcatctgttaagtgaggctaataccgcttactcatagttttgttgtgaagatgaactaagagcatgacatattacccgttttaaaattgtacacacagaccctgctttaaccagatgcctgcaaatgctcaggttttccttctacatatagaaaacaatttctcagctgccagggctgaagccagcagatatgcactaaacgacagaacaacggattgtgccaataaagtaggcaaagcttccttgcccagaatataaatcaaactgagtaaaaactgggtatattggctccaggaaaaggagcaaggacacccagctttcaggcaacctcgaattctctctgtttaggattcaccaaccccaaggtccaccgggtccttcaatctgagggtccatccaaggccttccttcctggggttgggtatggctagctgcctgatggagagaccccaggctgttcagcagcaacgcctggcacagccgaggcagcctcgtagtctgcgatgcggcgctgtaccagggcaggcatgagctgcacgtaagcggccatgaggcggtggttggaatggatcagcttcccagcacagctgtgcagacaggcctcctagaaggaagatagggtttaagtggaggataaaggtgccctgtcgggtccgcctcctttcttccccatgcccagcctaggggtgagggtcgtgggaaggccagggccagaggtacgggaagtggggtgaggagggaagcagtctaccgctaaactcttcttgcagcgtaacctccctacacagttccccacctcctcagcgtccagagctcggtggtgcaagctgggcacacagcgctggaagcagagttctgtcatccgattgtagaccaacaggaagtcacgcagctgagagaaaagggggaccacaaactcagcgataagggccccacacttctagtcaaggtcgcgccgcccaaagtttcccaggcccgcgcgccatagcccgaagtttccagccctcaaatccctggccctgtggggttcccgcgatgtgtgcaggaatgcgagctgaacgtctggcctcgaaacgacttagttctcacttacgtttcgcagttgctgttgctgctgctgctgccgctccatcacgccaccggcgcatgccgtacgccacttccgtttcagcttctcggtgccgccccggaagtaacctctcgctgatctcgagagctagctcgagtatcgccctgccctggctgcgacgtcagctccgcccttataatctgcgacgtggccggcttcttctgcccggagaggacgtcatttccgccgagtccctgacctgctgctaggatcgcgacgggaactggagcccgaggtccccgcgcggcccgggcctggcgccctgaggggaagagcggcccggcccgaggtgagaggaacatgcttgggcgacgggaagttgaacgcacaaacctgtccagagggcaagatgccccgagccccggggaaggatgaggacacacctgatgtccaggtgtatgggggtgggggcggggactcacacacctgggagacataactgactgtggaagggtcaccgatatcctgggagagagaggcttttaccagagactgggaacatacacccactgatctaactaaggcctggtggggagggcccgaggaagacgaggtgtatgagacggaggaggggagaccccctgaaggaagggggaagaaacgctaaaggaatgtgaaaggccaagcaatggagaacaaacctgaataggggggtgaagacctgagccctggaaagggttcatctcctcagcataaacacgcctgcatggagataagttctaagagagcagactttccctcttcactgttgtattttcattgtcacaaatagtgcctgacacatagtaggcactcactaaatgtctgctgaatgagtgtagaaataatcaccagagtcctggtgaggttgggggcttgtgagaagacaccgtgctttggtgtgcctgtttcaaatgtgcgttttggaggggagaaatacatatatctgaagaaaggaatgatggccaaacgctgggacactcaaaccctgggacagcctttaaagaaatgacagaggaggcctccttcttctagagtgctggccagtgtccagaacttctgtgttgggctttgcagggtgctggggtggagagttttactccaatacctttcctagccatgacggacgggatcctagggaaggcagccacaatggagatccctatccacgggaacggcgaagccaggcagcttcctgaagatgatgggctggagcaggtgcttctgtttgat

SEQ ID NO: 5639 - DNA, 6000 bp, Homo sapiens
ccttggaaaacaggtctgtcctccacctgaaccaggggcactgcattgccctgtgccccaccccagcttcccttgctctgagcctacccttcctccacaatttcctagggttccatcactgccagagcacactggacctacgcccagcactggcttggggtatatacttggccaccttcacagggatcctagggaagtgttcgggaccttttctcacttcaccctggtatcacccggaagacttcttgggaccaggtgaaggaagatgaggttgtgctgaccagaatgctgctggagaactgccccagggctgacaggccaggcttagctgagcagatgttatcactggccccaacttactttgagcaagggtggctgacccaaaaccatgaggtggcagtcagctggatgacagatgaacacttcccccataactatttagggtagtacccaagcactacaggaaagggtggcaggaactgcctcactcctaggaactggtagatggtgaggttgagggtgtccagcgcccttaggtcattttctcactgcctgggaacctcaccaaaatacttcttgcttccttggggtcagcccaaagctgtcacaaaatcagatatttccctttattccagatttcctggacactttcacccaattataaacaccccacttcagccccaatcacgtgggaggaagtgtaacttcccttttctggattctcaagcagttactttcacggtcagaacacgcagctattatgattgaaaacttaaaagggcaacaatttcagtcttgcttctagggctagacaggaacttggcaaacatctgtggcctgttcagcaaaggatgttaatatttaagaatcttgtcttgggctgggtgtggaggcaagtggatcacaggaggtcaggagtttgagaccaacctggccaacatgatgaaaccccatctctaccaaaaaaaatacaaatcagctgggcgtcgtggtgtgcctgtagtcccaacgcaggaggttgaggggagaattgcttgaacccaggaggtggtggttgcagtgagattgagcaactgcaatccagcctgggcgacggagtgagactgtctcaaaaaaaaaaaaaaaaggatcgtctcaacctttgccctcctactgcaacattttggtatttgaaatgaagggaccttccatacttatgctgttaatactttcattctcactagggatgaagcacattcctaacctgcttcctaatggggatgcttcgccagccaggtcctcacctgtgtgtacaccagcaggacactgatccagtcacagccatacagctgtccacactgaagaacatgtcctacaacagcctgaatcaaatggttagcttaatagataaaaatcccagactacttcagcctttaatgccttttattcataaaaactgtgaaagctagactgaaccattggaaacatttaactcagactctggattcagagtcgggaacccttagttctatctgaatccaagacagccacaccttagtatactgcccaaactaatgagtttaataaatacaaatactcgtttctttttgattagtgtgattagaactgaacaacggcacttaaggaatctggaagatagcctggatagatttctgattcatcccaagacctcaaagacaacacctgggtaccaaatttctttatttgaaggaatggtacaaatcaaagaacttaagtggatgttttggtacaacttatagaaaaggtaaaggaaaccccaacatgcatgcactgccttggtgaccagggaagtcaccccacggctatggggaaattagcccgaggcttagctttcattatcactgtctcccagggtgtgcttgtcaaagagatattccgccaagccagattcgggcgctcccatcttgcgcaagttggtcacgtggtcacccaattctttgatggctttcacctgctcattcaggtaatgtgtctcaatgaagtcacacaactgcaaaacaatggggaagacagttagtgggcagctttcccaatccctaaggcaaatgatttcctccatttatttcctggggttccaatactcacatgggggtcatttttgtcagtggccagtttgtgcagttccagtagtgactgattcacatttttttccaaatgtaatgcacactccattgcattcagcccgctctcccagtcatcacagtctggtttctgaatgagaataggttaatgcatctctaccaactaacctagaagtcagcaagcccatcatctctaaccaccacgttttggcaaaagggacattactatttgcctaatttagtttagatggtaagcctaaaaaagcacaaaaggcaaaagcccagtgtatcatcactttataagggcaattgctagtttaagtgatttctgatacccgaacactgccagatgatgaagtatgacacccctaggatcttttgttcaccttgatatcctgaaggaagattcggccacctcgttggttctgcagcttcatcagtttctcagcatgttccctctcctcatgagattggtgaagaaagtatttggcaaagttcttcaaagccacatcatcgcggtcaaagtagtaagactgaaaggggaacactgaatgtgttatactagggatccccagagacaggtagctgtgacgatctacagggaggcaagatggtctcgtcagcctaggcttcctttctcaaagcacagcatgaaggaatcagtgcctaaggagactggggggcagatgagctactggattgaacccaagagtaatgtttctattctaaaatagaaaactgaaacttgatccttgaaacttaacttcaaggaacctttaggatattatgggcattgcctggggcaatgtcttaaggatctgtattactgcacagaaaacttacagccagtgtcagaattcattgtctgatgagagggcgctggagtactgaccctgcacttagtccttttctcctccctgctcctgtattaaccatgttaaagcatggttaaaactgagctcaggagtctgccagctgtaccacatatttatttataaaattaaaaacccctgctgggtgcggtggctcagcctgtaatcccagcactttgggaggccgaggcaggcggatcacgaggtcagcagatcgagaccatcctggtcaacatggtgaaaccccgtctctactaaaaataaaaaaaaatagctgggcgtggtggcgtgcgcctgtaattccagctactcaggagcctgaggtaagagaatcacttgaacccaggaggcggaggctgcagtgagccgagatcgcgccactgcactccagcctgggcgacagagcgagactctgtctctcacacacacacacaaattaaaaacccccatgcaaggtggcaaatgtggacagtatgttgatgtaaacatacttttataatagttatatcacaaaaatttgattttcagttttagacatttgatgtagtcaagtgtttgtgaaaggcagtgacagtcacagaaatacaggcctgttttcaaatccatttggaacacatttattcttgggatagtttggacaatcacaaggcaattctaaggaagactcccacgacactgcctaagaccaagatttgggaaaactgattccactgatcactgaaaaatttcttgcccagtaactgtcggtggactttatccaagaactgggggttcaattagtaggccaaactccacacctcttacagtaagatacataaaagataaattaggtcccctaggcgcaaggtcaggtgacacttcggtgactgcagaaggggcgattcctagagatatgcttcaaagcaagtgggacttagagataagcagagccgagaggtggatacggctgctcgagagggatctacccacaagataagccacctcccgccagcccccaaggtttgctattcgacaccgttacccagcagctccgccacacacaggcggacgggagctggatacctaagcaaaaaacgctggcatttagggccaaatgccggaggcagaggaaaagatgggaaagcaaaactccaccttcctaaccgcaggattgatcacacaggctggcagtcttgcaaccccaggatttcaggacaccaaggtctccttaaaaaagaagggtgtgcagaggcggccctggcctaggagggagcattctcagggtacagccgagaagaaccagctgccccgactttctgcgccagagaagtcctcggaaacctcgagcagcctccattttccagaagggcgcagggaggcgggagagcccgcgggtggccacacccccggcccgccccagcgcgcgccccgggaaccgcgcccggcccccgccaccgcttaggcccgcccgcgctcaccatggacaggtaaacgtaggaggcgtagagctccaggttgatctggcggttgatggcggcctctgagtcctggtggtagttctggcgcacctgcgaggtggacgcggtcgtcatggcggcgactaaggagaggcggcggcggcggcggtggctgcgcggcgctggagcggcggcgggggccttggggcagtccgagggtgcggtgaagaggtgacggagggctggctatgggcggccggccggggtggggaacgagcgccgggttccgtccaagcactgttgaagcaggaaaccccgacgactctcggcgaagaacgtctggccctgcgggtcgcttgtggtctcttatagccgcgtcggcgtcaggcccgccccggccaatcagcgccgcccgccccgagcccgctccttccggtgggcgcgggaccccgcccctgctgtgggggaggggcggccgctggaggccctcgcgcgctctggcggagctcgggagcggggaccggtagccgactgcctctgggacagcggtggcgtctctgtgcccgtttagtggagttggagggaagctgcgaggaggcgcaggaagtccacctcagaaccccccccccggtctaggggcgcccgggcgttggaaccggcgggggaagggtgcgggggcgcatggggtgatcctgattcggctcccattttcccgaacgggcaccctgaggctcctggcccggggcatggtgttagaaatcatagctgcggagaagcccttgtgacaccttgctgcagattgggaagctgcagatgattgggaaggtggaaggtggagacgcggtccttaggtggtcgagcgcattttctcttcctcagagtccaggaaggagcgcgatggagaagtggggcgcacggcgggtttcgggtccgcccctgcccttccgactcctccgaccacgtctgcctttggctgaaagcaaatatggctccgtgtgcggtttctgcaacaaaggctgggcgggccgggtttccctagggatggggaccgcctccccggggagtcgtgggggtgagccaccggggcctccgagagaatcgctggtgtcgcttcgcacccaagggacacatctcgggttagaaaggagaaacgacgtggatctaaaggcgaagcccatgctgaggacttttcaaaatggcctcttatcggccccactcacaggagcttcaggcttcggtggccctgtaggacaaccctggggtgtcattggagagaagctgacggggttaatggcgggtgacaggtgaaagagaccccggaggggtggggccggtgtgtgtggctaagctgagtcccaggcacagggtggatgtgaatttatgggtggcagagctagagctaggccctgcccttacctaggtcctggcttcgaggtccactgttctgtcgcgtcttttgacgcatcggtggaagaactgaatttcaggatgctcacaaacctgcagctggaagctagacttccaaaccttagtttaaaaaagcaactctactgaaatactaaaataaattgccgacggaattagggtgat

SEQ ID NO: 5640 - DNA, 6000 bp, Homo sapiens
taatgttgatatcttgacctcctcccatgaatcatgaatgttcttaatagcatctagaatggtttcaatttactttgcccagatccatcagaagaatcactatctatggcagatatagccttatgaaatgtatttcttaaataacaagacttaaaagtcaaaactgattgggcatggtggctcacgcctataatcctagcactttgggaggccaaggcaggcagattgcttgagcacaggagttcaaaaacagcctgggcaacacagcaaaaacccatctctactaaaaatacaaaaaattagcagggtatggtagcacacaccttaagtcccagctacttggcaggttgaggtaggaggattgcttgagcctgaaaggtggaggttgcagtgagatgagatcatgctactgcactacagcctgagaggcagagtgagaccctgtttcaaaaaaaaaaaaaaatcaactactcaactggctgcagaatagatgttacatcagcaggcatgaaaacaacattaaggttgggcacaggggctcatgtctgtaatcccagaactttgggaggcaaaggtaggaggattgcttgagcctaggaattccaggccggcctgagcaacacagtgaccccatctctccaaaaatacatttaaaaaaaaagccgggcatggtgctcacgcctgtaatcccaacactttgggaggccaaagagagcagatcacttgaggccaggagttcaagaccagcctggccaatgtggcaaaaccccatctctactaaaaatataaaaattagcagggcatgatggtgtgcacctgtaatcccagctacttgggtggctgaagcaggagaatcactcgaacccgggaagctgaggttgcagtgagctgagattgtgccactacactccagcatgggagacagagtgaaactccgtctcaaacataaataaataagaaaaaaaaaaaagaaaaataatgggtgggtgcagtggctcatgtctgtaatcctagcactttgggaggccaagacaggtggatcgcttgaggtcaggaatttgagacgagcctgggcaacatggtgaaaccccatctctgcaaaaaatacaaaaagttagctgggtgtagtggtgtgcacctgtagttcaagctacttggggagctgagatgggaggattgtttgagcccaggaagtagaggcagcagtgagctgagatcataccagtgcactccagcctgacaaagtgaaacactgtctcaaaaaagaaaagaaaaaggaaaaatattgaccagtgaggtggctcaggcctgtaatcccagcactttggaagggctcacttgagcccaggagttcgagatcagcctgggcaacacagtgacacctcgtctctaccaaaaagaaaaaaaaaaaacaaaccaaaacaaaacacacacatatagatagatagacagacagataatagagagagaaaggaaaaaaaattagctgggcatggtggcatctgtctttgtcccagctattcgggaggctgagggaggaaggctgctcaagcgcaggagattaaggctgcagtgagccatgatggtgccgctgtacttcaccctgggagatagagcgagaccctgcctctagaaaaaaaaaatgtttctgagcagtaggtctcaacagtgggcttattcagtaaaccatgctgtaaatagatgtgctgtcatccagggctttgttgttccatttatagatcacaggcagagtagatttagcataagtcttaagggccattggatttttagaatagtaagtgagaaatggctcaactagatgtcatagatggcatcttccaatgtaagtctgtttcttctaccttgaaaacctattgtttagtgtagccaccttcatcagtgagcttagctagatcttctagaaaacttactgcagcttctacatcagcacttgctgcttcaccttgtactttattatggagatggcttcttttcttcctttttttttttttgagacagagtttcactcttgttgcccaggctggagtgcaatagcgcgatctcagctcactgcaacctccacctcccgggttcaagtgattctcctgcctcagcctcccaagtacctgggatcacaggcatgctccaccacgcccagctaattttgtatttttagtagagacgagatttctccatgttggtcctcaggtgatccgcccgtcttggcctaccgaagtgctgggatcacaggcatgagccaccgcgtccggccgatggcttcttttcttaaaagaacctctgctagcttccaaattttcttctgcaacttcctcacctctcttaggcttcaaagaattgaagacttagggccttgctctggataaggttttggcttaagggaatgttatggctggtttgatctatccagaccactaaaacattctccatatcatcaaggttgtttcactttcttatcacttgtgtattcactggagtagcacttttagtttccttcaagaacttttcctctgcactcacaacttggctgtttggcacaatgggcctagctttcagcccgtcttggctttcaggatgccttcctcatcaagctcaatcatttctagcttttgatttaaagtcagagatatgtgactcttcctctcacttgaacacttagatgccactgtagggctattaattggcctaactttattattgtatctcagtcaacagcaaggcctgaggagagggagagagatgatggaacagctggttgatagagcagtcagaacacacagcatttattaagttcaccatagtgttgccccaaagcaatcagaatagtagtatcaaagatcactgattacagatcataacaaatataatagcaatgaaaaagtgtgaaatatttcaagatttaccaaaatgtaacacagacacaaaatgagcacatgatgttagaaaaatggcattgatagagttgctcaatggagagttaccgcagccttcaatttgtaaaaaaaatgaaaatgcagtatctgtgaagtgcaataaagcaaagtacaaaaaatgaggtattcctgtacatgtgctgccaaagtgagcgctatatacattcttaacctggaccaagagcagtattcaaaataacaactctggccaggcacggtggctcatgcctgtaatcccaacattatgggaggccgaggcaggtggatcacttgaggtcaggagatttgagatcagccctccgccatcatggtgaaaccccatctctactaaaaatacaaaaattagcctggcgcggtggtgcaagcctgtaatcccagctactccggaggctgaggcaggagaatcgtttgaacccgggaggcagaggttgcagtaagctgagatcgtgccactgtactccagcctgggtgacagagtgggacgagactgtctcaaaaaaaaaaaaaataacaaacaaaaaaaacaactctgaggatacatttctagcctgaggcaactaaagcaagaaataatcttatgcacagacctacagttaatcattttactgaatctacatatacattccacttacatgattacatatacgcatcagtatggacttacattctatacatatgactctcccatattcaacaagagatcaccaagagcctgaatcaaaggataccaataaaacaaaccctaaactaggaagtgggagggaaaggagaaaagggatgagggagaaaaagaaaaaagaggaaggatgaagggaaggcggaagccaatattaataaatactgagtacctactgtatacacaccaccatttcatggttgcttcttggtttccacgctttcagtcttggccctacatccattttttacacagcagtctaactgtggtcttcgaaaccctgtgttatctgtccccagtgcaccccatgctgtgccactcctctccctcaatgctctgcagccacaaggggcactttctgttcctagaatgctctgacttctttcctgccacagggcctttgaacttactctttcctatgcctgaactgctttccacatcacttattctttttcattttttgaatttcaactcaaacatcaccttctaaaggaatagcgcacagccacttagtaaccctctatttcctttatcacaatctgaaaagttcctgtttgtctagctccacccaccaacttcgagggcaaggaccagcaatgtcttgctcaccaccgcatctcccgggagttagaacggtacctggcacctcaggcatctgataatactggctgaatggctgttggaggcagaggttcttaactgcctattaaggatgaggaccctgaggttcagaaacgttaaagtgatttgttccaaatcagacagcgccaggtctgaacctagccagctggggctaagtcaagtaacaactggcgaaacagaaagcttagcaaaggcaggatagcgacaaacacgacctaaagttttctcttcatacccagggatatccacacctttctctcccgccctgaccgaccgcggggcctccccgcccagcccctggccgtgcgagtcccttactatgtggggatgagaaggcatttgagaagagtcaccccgagcgccaaagccgaaaaccaattgccagtacccgtggcaattgtgagcgccgccattgctgcggcaccgcacgcttcccaccaacttgatccacatccgggatcccgcgcatgcggagaaagccctctgaagccgtgcccgctagctgcgcgcatgcggcgagcggcgcagccagtccggggactgcagtcagctatttaaacctcccgcccaccttttctttagacccgcgtctcaccccgggccggaagggctcctgcgcaggcgtttgtagccacttttaagttttatcagctagttcatgcttgcgttgaaagagtggtcgtttgcgctgggtcatcactgtgtagtattggggatacttaggtgagaaaaaaacttaacgctagagacgttcacgcactagtggagaagccaggattgttgccctagagttacagtagataaaagtacctcagagaactgcgggggctcccaacctggacgcttgcaccggagtattaaatccagctagagaatggcatgtgcaaagatacagaggtgagaaacattgtgtttttagaactctgagcgaggctcttggctcacctcctgcttgagcggaacccattctggaagcagggtagaggctagtcctaacgcttagtgtacaaatagcctacggttcatgttaaaataattcggattctgattcagtaggcccaacaaactcgcagattgcgtaatgactgaggcacatgcaatttaattaggcttgtctcattattttactgtatgatcttggacaaactaaactctaaacctcagtttctttttttaaaatttttatttatttatttatttttgaaaataggagataaaaatggtttctggccggacgcggtggctcacgcctgtaatcccaacactgggaggccgaggtgggcgaatcacctgagttcaggagtttgagatcagcctggccaatatggtgaaaccctgtctctactaaaaattaaaaaaaaattagccgtgcatggtggcgggcgcttgtaattccacctactcgggaggctgaagctagagaatcgcgtgaacgtgggaggcggaggttgcagtgagctgagatcgcgccattgcacttcagcctgggcaagcctcaggcctgtttatccaagatgcttttggtctaaaaaaaaaaaagtttcagcctcataaactggttgtgaggattaaatgagaatgcatgtaaattgcttgatatgattccaggacagaataaatgctcaataatgtgtcagatcagttaattatcttgctgaaagatgcacagcaagtaggtgacagtgtcacctccctaatatgagtttatgccctcccacagcttcagctgcc

SEQ ID NO: 5641 - DNA, 6000 bp, Homo sapiens
cagccaaactataaaactcttgtaacacttttctgaacccagcgtttccagtgtttatagattgctttgctatctgaaagacccagttagtatttaaaatggtaaagggttaaaaaagttaatatttctccctgctagttaccaactcacagctcaaatcccaccctgcaggggaaaacagtatcgccctggacttcctggaatctaggcaggacctccacgctccaagctgcaacctgctaaagtgatcaacgttttgatttttcacagctttgaaagcctctaactggcttttccattttggatcattccaaagtctgcagcaaaatcattggttttttgatgctggggtcggggtgggaggcagtgggttgacgggggtcacttaattgttgctagtttgttcaaactgagattcactgcataaaacttttagtagaatttcctccaaaatgctggcattccccccttcaaaatgaagaaagcatggaggctgactagccttataccacagtctcactgccttttccaggcttcacccaaccatttcctctcttctctctctttacctttccagaattcaccaatctgttggaacacttctgccacgtgtgaagagttttggcagaccaaatccacatgcctgaagtgatgcccaccaacaaagacataaaaattttcaacatttcaacagccatgttggaatcatctgcagaataccgaaaaagtgcccagttggagatttcataaaaataacaggcaatcacacacgttgcaggaactgtgtacagtactgagaacaccccaatcttgaccatcagtctttctaacttgtctgtctttgtcccatccttttgaagatttgaccgaattttgaacaaggccaccaaacctgcagcaatgaacaaagttccaatgaccaaataagtaaagaggggagccaccacgaacccggtgagggcatcgagattttggtttccaacatagcacaagccagtcagttcatctgcatccaccagtctcataatcaagatgacaatggttttcactgcggggatggcccaggctgcaatgtggaaataagagctgtgcatttcaatggcttcatgaccccatttgagtcctgctgccaaaaaccaagtgagtgtcagaataacccaccaaatggagctggccattccaaaaaagtacatcagcaagaaaattattgcacatcctgtgttcttaagtccttcttggatgagaacaggttctgctgcctcttcaaaatcacaggatatcctttcccggcctacagtcagcctgacaatataagcaatgctataaatattatagcacatactgagaaatatgatggggcgctcagggtaggaaaacctagaagaatcgatcaggaaggtcagtactgtgaaggcagtggagatgaaacacaggctggcccacacagccatccagatatcagtgaactccttggctgagcggctgtataagccagcatcatagccacacttgagcacacagttcaggctccttttcacccagatgtactgatcagaattggttcccacagagtgacactcttccccaggctggatgggggttttgtgaggtaagggcacctcttcatcacctggcccttccatgcacatgtggttgtggtcgttctgtggtgggaatttgctgcagttcagactctctggccaggcaaatccaaattccttcaggacgggttcacagcgtctcttgactgaaagacacatgccgccgcatgggccaatggggatgttgatcttctctgtgcacattggcacataaacagaacaaaggaagaactggaaaagtaacaaaatgaacacacacaaaaaaaacaatgacttggaagtttgaccaaatgctcccacaaagctgagttgaatgcttccaggcaatctaggtatctacttttaaaccaacctatcgggagtctgtctgtttactctgacctcaaacaagggcgcctgataatccatcacttacatacttttcttagtttggctttagtaatcctttccagaagaatgtacataaataaataaataaaataaatagggtctgaagaattgcataagccctctttgcacaacacttgaaataaatcttaaaaaactggctttcaatctccttccattttagaaactatttgaaaaagctaaagaaactaatatgactcatttaggtggtttatttttatccccgtttctttatcattttaaaaataaaagttaaaaaaaaatgtagatcctgttagtattctcttctccctaatttatcccttaaaaatttgtttaaactagtcccatactgaaacaaaaaatggcccaaatgagacactgttagactcaaggatgggatgcagattgaggtctctggtcactagggatttgtttggccaggtttcctcaatgaataataatgaagcacaataggaaaatgtaaatgttaagtcgctgaaactgcagtaccagcaggggagagtccagttgctgtcctcaattcctccagcattgataaacagtctgcttggctccttacagatgttgtctatgaagtctagagttacaagtaactattttccagcatgtaaagggatccagtcttgtccttcaaaacagcttggccgctttccccaggatacatgtaattaaaaatatatatccctgcaaaagctgtttctccaacaaattgccactgatgtcaggatatgtgctgtttccaaactgagagctggaggatcatttcttaagcttttataacctagttctaaagttctgaaacttccaaagggatattttagcagcaacaggtctaatccccaccatctttccaaaaccacaaaccaagttttaaaatgacctatgtaaaaacatgcacctagtaagtaagctgtatgtctgtttattatctctcagaagttacagccagaaccacagatttcttttcttttctttttttttttgatacggagtttcgctcctgtggcccaggctagagtgcaatggtgcaatccccgctcactgcaacctctgcctcctgggttcaagcgattctcctgcctcagcctcctgagtagctgggattacaggcgcacgccaccacgcccggctaatttttgtacttttagtagagacaggatttcgccatgttggtcaggctggtctcgaactcctaacctcgtgagccacctgcctcggcctcccaaagtgctgggattacaggcgtgagccactgcgcccggccagaaaccagatttctgaagcctggacaactaacgtctactttttcccacaacttctctcttttctaaatttctaaaaatcacccagcctcaccaacccaaacataaccaatgttaacactttaaaaattttcctgtcagtcttttattatcccaataaattttttattttgcaggattataatcaccctgtatatgcaaattcttattactgtggaataaacattttctctatcattagatatgctttacattttttaatgactgcaaaaaaatttcttccaatataccaaccaccttcctgcagcttcttctcaccctccaagcattaaacgtgccttcaactgtgaggataagaaagaactcaagccaacccaaccactccttcatgcatgacctctaaaacgctgcgggacgtcgtgagaaggggctattcagcagaaaaaggtgcagtagtgtttcatttaataacaccccaaaaatagtggggagaaggaagttcggtgaaggatggtctccttatcactccctccaagtcttagctgcagctggctccctcccactcgcccaccgagcagtggcggccagaatccttggcagagataaccctcagctccactggggttaggggtctgggccagacatgggtgggcaagagagaaaaacggaagggcggggtgtaagagtgggttctttcccaggccagatgacttacacaacgttttggcttccagtccctgagaaagtgggggtggggatggaaatcacttttccaggagagctgtctccttcgggctaggatgatcaacttggcatgggctctgcaaagttagtttggagcgtccctccccaaggggtcccgccaggggtgggggtgggggcgcccacctgcagctggctggagcagccgtactggatgagcggtgtgaaagttgtcagctgcagctcggcgtccgtctgcagctcgtgcccaaccaggttgggcatcttggtcacgttgtagccgaggttctggcacatggagatgcggatggggtcgcagcgccgctcttcctcgtccccgaagccccgcgccggccccaggagcagcagcaactgcaggagcaaccccagactgagaccgacgcccccgggcgcccccgggacgctcggccctgcgccccgccaggccatggccagcatcgggggtagcagcggcagcggctggggctgctctggcagacacccccagtttgcacgggggcgccggctgcccgcgctgctcccagctcccgggacgggagtgtgatgcggcgacgagggggcagcggccggctctccagcagctgcgcgcgactgtgtgggattttagacgtcccgggccgaggccgagggacaggctgcgagggtcatggctgcaggcggcgagcccacaagccggcgccggccgcgtccgttcggcgtctccgcgaggccagccagcagccagcgctgcgcagctctcaccgccggagccctgcgcggcgctggaggctcgcggcgcggcggcggggcgggacggacagcgggcctctccaatggccgggcgcggtgggcagctaggggcgaggcggcggggcggggccgctctcccgcaggaggagtcaggcccccgccctccggccccctcctccggccgcccctccctccctccctcccctagcgccccgccccgcccgcctcccggctcttgctttcctcccacccggatctaggcgcgcaggggccaagcagggacgcagcccagtggctccagccacgccgtcctgcccccttctgcaggtgagaagtgcgccctgttccatctgccccctttccttcctgtctcctttcagctgtaacctaggccggtggccacctccccgtcaggcagagaaacgtacacaaagaattggggatttggatttacaccgattgtggctttcagtcccggttgtgtgaccttgagcaaattgctcaacccctcggcgtcagtctcctctgtaaagtcacttgggaggattagagataaagtgtagaaggcttagcatggtgcctggtactgcgtgagtccacagctattttcactccggaccagcggcgatcggggcccggcctctccccgcccccagactcgcccgacctgcgcagggagccgcccacctccagccgccagcggggaggcgccccagagctgcggagctgcagacccgccgacggtctcgcgctctgatttcctcaccgtatgaaatgaaattccacagggggattcgaaaggaaatgagaccgggactctccgtgcttctcggcccgccgcccttcctgtctcggggacacggtttctaaataaggttgggagggtgagagggcgggaggggagaggcttgacctgtgcactggggacgaggaaggcgcacaaccaccgtgactcctctctcccggcctcccgggcaccccctccccaccaggctgcacccctttttttctttgcttctgcttcggctcctagggatctggggatcatgtgacccaggtttgaacccaactttcctgtctcattaccagccccccgcggctttgtgctggtccaccctctctctgctttccagtcggccagtaaactcccagcaggtggattcctccaccgtttacttgttgcttgactgtgttgaagctatggtgcctctctgagcctcaaagtggccggctgtaaagtggggaagttcata

SEQ ID NO: 5642 - DNA, 6000 bp, Homo sapiens
attttaccacaaaatagtaacatgaaattggaataaaacactcactcactgaagccataaaataaatttcacaaatactacagtattcttaaagaaattaacagggaattatgccttgcaaattccttaggtgagtaaataaccacactttaaaaaaaactctcttttttaggctctcacactacatatgtatacctttttcaaataaaattaaaactttaagtaatatttatgggcattagggccacggaatttttaaatatttacctaaccatttagaaagcacttagcactaaaggtatagaaaaatatctcacacactaacttatgcctttcaaaaccttgtatttacctagtcaaacacaaagtgatctcattgaaaagctgaaaattgcactgtagaatatgcaattaaaatggcatagaaatgtagcttgtttaattctgattaaagcttctatgcagacgactgatttttttaaacttcctattagtttctgctgattcttggcagataagactacaaactcagtgcttctttccattaacccaccaaagcagaacaccattaacagcacctagatttgggcttcaaatctctaaatgctttgccaaaaaaaaaaaaaaaccttagttaagaactgaactgatacatatatagcatttaaatcaaatattataaatctaattataaaatcaaatgttttacaaacatgccattatttttcaacacagtaatataacatcccaaaagttaaaaactactttaaatctattattctacaattaaaaacatttctattgatagaagtttaagtggctttcaaagaggttaataaaaatgtttaaattcttaaggaaatgaacatgtaataattttgttaccatcctacaaatgaacccccatatacttttttaaagtcctatccaaaatatacaggatatttgctcatctttttcaattattataccttggaaagtataggttagcaaggtcaacattcaacatttaagtaaaacttcaagaactactagtttgtgacatcttattttattttaatttctaccttaccaaaagtgtaaactaaaagaatttaattttagaattagaaggtattatataatttaattttagaattagaagatattacagaattcatctactaggatcccttaatttgacaggatactaagattcagaaaggttcacagacttttccaaaattaaacagttaagccaagactcctcaatcctctgtctatgaatccaggacattttctcctatgtcaggtcccatctaaaatcttttcatcttccttcaccttctgaaacaagcaagtgtttttaccattgtcatatacaacactttgaaaatcagaaaatctcctgatcttttacttccataaaagtactgatttcctctcaatatatttaacataatatacatgcaaacaaaaagcacaaatccactgttagacttctggaacaagcataaataaacattcttgttatgatagtatctgctaagttaaaaatacccttttctagtaatgtcaaaatagaattattttgtagacagaatattaggtaggcatgtataaaccctgaactattcacatatactttaagtgtgcaaaaatgttcctattagaagtagaatgtgaataagggttttctgcactaagaaattacaccctctttagaagcacaaattgtattttcctctaatataaacaataattgaagctacctggtatagctatatacatatatagctatgctgtgatggaaagagcaccacactaggattaagaagcctagaaattttccacttacaagaggacagacagaattaccgcaccaacaaattacaattaaaatatgttaaactgtaactgttaagttcaggaaaattgcccacaaaagtgatgaaactgctaaaacaattttccagtgttaaaaaatgcaatttgttcacatttggtcaaaattcaattaattccattctatgaaaatagttgataccactttgttccataataaatcctctcaaaacaatttttctcccgacacacattttcctaaagtactatctattatcactggtagtaaactgagaaaacaaaaggcataacagaactttttcaagtggttgaccacagaagtggcctctgaagccaaatcaagaagcaaagtattgtgtcattggaacattacagatcagtgttcaacacgtcataaaaccaatgtagtagcttggagattatttcgaagagaagacagacaagaagtgaaggaagagaacagaaaagaagagagaagaatgcatcaaatgcattaaggacaagaaacttttgtctccaacatattggctcccagtgtaaagcatatcactaatccaaaaattcagaaaacctagggtgtacgctcttactctcctacttaaaaccactatacttaccagttagtcgtgcagaacacagcactgaaaactcaaaaatctaatcaaatcccagaactaccacttaactagacatgtgaagctgtgttacctctatatgcctagatttctcatctctagaggttaatggcaccagccaaacaccgttcttgtgaggatctgagacagtatgtgtaaaatgttttgcacttcataaatgctcaataatagtaactatacttattaagtttcttggtgatgtacaacaggtagcttttccaatactatataaagatgtaaactcatttgctaatgatttcaatcccttttaaaaaaaaaacaaaaatatgtaaacctatggtgaaaaaatggaaatgcttttggcatctttccaggaattaccaagtttaaagtttaaactgttaaaacagtctcctaattatgcaacaaatacaaagaacattgaattaatctgtaaaatattatattcacctatactgctgtcttttcatctaaattactctcatttgcaaagctcatgtcttgtaacgataaaatctcagatttttcctctcgattttcaataacgaaaccacactgattaaaactcatagatgtatcctctcattctaaaggctgtatgttatttttgggtaggcatcattataacagcaaacagataaatggcaccaaaaagacacatatcagaggatgccaaaagcgggagtagtcaatctattcaaccacaaatgattcacctcattcttctgcgaactcatctattgcatatacagtccttaaaaagtgccatgtgattagcgggctatttgatttctattcaatgacaaaagctacttgcttctgcatttttaaaaggcttcctgtattttaagaatcctttccagaataaaacattatttcctccccccccccccccgcaacacaccctttttccattctgaaagttaacatgctttgaaataagcgaattcaactcggaaactgcagcggtaaacccgaacccgctcgcgtcccagacctcgccttccagctaacatacctgttctctggaaatacaaggcaacgacggtctcctgaatattttgcaactgccatagtaactggctgcagtttctcctaacgacacgcagctggacctcctccggggtcggatcacaggcactttttcttcggcggcactggacagtcgaggatgaagaggcgcttccctgatttgaaagaagtgatccaaccccagggccagcaggcagccagcgccccccaccaggccggagagcagcggcctgagggcggagggcagcgacccgaggctggtgaaggagacccaccagacgaagctggccaggagcagcaccagaacgcagtgccggagccgcagcgggtgcgcgagcgtcagcagcagccctacgcagctcagcaccagcagcaacctgcccgctgccgcctccgggggcgtgtgcggggccgcggaccctgcgtcgccatccccccaaggccaagaccaccactgccacaccaagaagtcccccaggtaacagcaggcgggcagcgccagcagccaccaggagccgcagctccggcccgggccgggtccccgcttggtccgggtgaggaagcaggtgaggaagaagaaggcacaggcgatgctgaagagggggctcaagctgtgcgaacacacgctcagcagcgtccgcagccaggcggccccggcagcccagctctcgggttccgcgcccagcagcagggcgaggacaaaggcagccagggcgcccagcgagaggcgcgcccggcagaagggggagcagcgccgcggctgctggggagaggccggcggcggccgcagctccacgttgcagaagcggcagaggtggaagaagaagccgcgcggagggtcctgccgcaaggggctcacgcagctcttcacgtagccgttcctcagactctcggggggcgagccggccccatccggcggctgcagggaccgcatggctttggcgtctcgctcgtccctcctcatggctggggccgggggtggccacgggactcagcacaccccgctcgtaccgtagcggccgctcgcgctcccagaccccaacccccgcgttcggggcgccccctggttcgcaacccgtcagggctgcgccggccgccacggcccggggtccccaccgcgcggactgaggagcggcggagtccgggacatgctggctgaggagaggggcggaaggggcttctctccaggaccagtttagctgccgcctccttttccctcgggcacctctcgggactggagactcagtgtcgcctcccacctccgctggctgcaacagttacctcacggccccagcctggtccgttgggcgcgcgagcggcgggcgggcgctcctcccccgcgactgccccggccgggcgcgcgcccagcgcgcgctcacgacttgtcccgccgccacccgcgccgcggccgcccaacagggacgcgagccgggaccacgccgacccagcgtgcccaggccgaggaaagcgcggcggcggcagtccgaagacccaccgggactgaaagagaaggacgaggtcatcttcggacgggaggggcaagccagccatcctgggaccccaggcgtgcaggttctctttgagggtaagtcacggacacccagccagaatcccacaggtcactactggggtcttcgggaaagagggcgtttgtggtccccaaggggtgtgcttagtggggatgctgagctaagggtgggaggggaggggcgctgtctctaaccttagtccctttcagggtgggtcttcagactgtgaccagtttagggccagccaccaccaaggccatggcgaagaaaccctaatcgctgtggctagatctagcctcagaagcaacgtggattcttgggccacgcagcaggcccaggatccttgcagtggctcttagggaggaacgtgcacgtggagtgcactctagtagcactccacgtgcacgttcttgagtgttgctcaagaaccatcttcacaggcgaagaactaacgtctcgccttccattttgtacccttgtcatacatatccgccggttcacaacttgtatccccttccacacagcacagatttgctgtcgcaattggtctttgcaaattgaaggctttttcactgtaacagcactttctagatgggggagcggagagaactaggaatcctctccaagaccactccccagtttggatcagcaggccttgaaggaagccgaataagatgctatctgtgaagtactggtgaaactagcaacattaggaaacacagacctgaaagcgagaagaaaagaactttactacaccaaagggactgctctggaatctaaccaatcataactgccttagagagtgaactgtgtttccctccctaagctctcgcttcaacctcatgaccggactgcatttctcaaagagctaattccacatttttccaggcagatgagaaaccttactgtgtggtaaatcccacaaacaggcccatttttcaccaattaatctctgc

SEQ ID NO: 5643 - DNA, 6000 bp, Homo sapiens; identical to SEQ ID NO: 1665

SEQ ID NO: 5644 - DNA, 6000 bp, Homo sapiens
gagtacccagggacacagtgcactgcggaaggccgcagggacctctgcccaagaaagcctgggtatcgtccaaggtttctctccactgagacagcctgagatatggcctcatgggaatggaaagacctgaccgtcccccagacacccataaagggtctgtgctgagaaggattagtgaaagaggaaggcctctttgcagttgagataagaggaaggcatctgtctcctgctagtccctgggaatggaatatctctgtataaaacccgattgtacattctatttactgagataggagaaaaccgccttatggctggaggttagacatgctggcggcaatactgctttttttttttttttgagacagagtctcgccttgtcgcccaggtttcacaccattctcctgcctcagcctcccaagtagctgggactacaggcgcacgccatcacacccggctaattttttttttgtatttttagtagagacggggtttcaccatgttaaccaggatggtctcgaactcctgacctcgtgatccacccacctcagcctcccaaagtgctgggattacaggcgtgagccaccgcgcccggccaatactgctctttactgcgctgagatgtttgtgtaaagtcaatcataaatgtggcctacgtgcacatcaaggcacagcacctttccttaaacttatttatgacacagagtcctttgctcacatgttttcctgctgaccctctccccaccattaccctatagtcctgccacatccctctggctgagatggtagagatagtgatcaataaatactgagggaactcagagaccagtgctggtgcgggtcctccgtatgctgagcgccagtccccgggtccacttttcttcctctatactttgtctctgtgtcttatttcttttctcagtctctcgtcccacctgacgagaaatacccacaggtgtggaggggctggcccccttcaggattacaggcgtgagccgctccacccagcctactttttttaaaatgccctcttttctagtagattctatgtcactcacaagaggttgcaaactcacaatcaaaggccacctttggcccacgggcatattttggttttttgtttgtttttgagactcactcttgtcccccaggctggagtgcagtggggtgatcttggctcactgcaacttccacctcccgggttcaaccacttctcctgcctcagcctcctaagtagctaggattacaatcgcctgccaccgcacccacaccacgcccggcttatttttgaatttttagtagagaagggttttcaccatgttggccatgctggtctctaatgtggggaaaagcaagagagatcagattgttactgtgtctgtgtagaaagaaatagacatgggagactccattttgttatgtactaagaaaaattcttctgccttgagattctgtgaccttacccccaaccccgtgctctctgaaacatgtgctgtgtcaaactcagggttcaatggattaagggcggtgcgagatgtgctttgttaaacagatgcttgaaggcagcatgctccttaagagtcatcaccactccctaatctcaagtacccagggacacaaaaactgcggaaggccgcagggacctctgcctaggaaagccaggtattgtccaaggtttctccccatgtgatagtctgaaatatggcctcgtgggaagggaaagacctgactgtcccccagcccgacacccgtaaagcgtctgtgctgaggaggattagtataagaggaaggcatgcctcttgcagttgagacaagaggaaggcatctgtctcctgcccgtccctgggcaatggaatgtctcggtataaaacccgattgtacgttccatctactgagatagggaaaaaccgccttagggctggaggtgggatctgcgggcagcaatactgctttgtaaagcattgagatgtttatgtgtatgcatatctaaaagcacagcacttaatcctttaccttgtctatgatgcaaagacctttgttcacgtgtttgtctgctgaccctctccccactattgtcttgtggccctgacacaaccccctcttcgagaaacacccacgaatgatcaataaatactaagggaactcagaggctggcgggatcctccatatgctgaacgctggttccccgggtccccttatttctttctctatactttgtctctgtctttttctttcctaagtctctcgttccaccttaggagaaacatccacaggtgtggaggggcaacccaccccttcactctaactcctgacctcaggtgatccgcccactttggcctcccaaggtgctaggattacaggcatgagccaccacgcccggccaaaaaattttaaattcaacatttcaacgtgagtaaatacacaattctggacttctggattcttttgaaaactgactatctgatcacacagagacaatattgtcgcaaggcaacaatcagctggagctgtgaaagggctgcccagttcaccagagtcccaactcagttcatttcacttacctacattacttagctgatttctgtacgtgagttggagacccctaacctaaatcccctcttttccacttccactgccattatacttgttagcattgaatcctcttgcctaaactactatggcaatctaattaatgcccttgtctccatcttatcccccaatgtcttatcactttcctacttaaaaactctccccggtttttttttcttttctatgtataattcaaatgatttagctttgcattcaaggtcctgcttatctggctttccccaggaaatactttccagttttatattctaatactccccttttgcccatctttcatgaattgtagctacacacttccttctttttctagcaccaagcttgtgctccagttgttcctttaactggaattcccctcccaagtctttctaccctttcaggcccagacactctataaagcatttcccgactgccattcccacacacaacctccccagccttgtctgtctactctgggccatcttgattttccagtttatctgtcccacattttttttttttttttttttttttttttgagacagggtcaatctcagtcatccaggctggagtgcagtgcagtggcttgatcacagctcatttgcagtctcaacctcctgggctcaagcaatcctcccaccttagcctcccaagcagctggggctacaggcatgcaccaccgctcctggctaattttttctattttttttgtagagatcggtatgggtttctcactatgttgcttagactggtcttgaactcttgggctcaagagatcctcccgccttggcctcccaaaatgctgagccaggccgggtgtggtggcccacccctgtaatcccagcagtttgggaggctgaggcaggaggtcacctgaggtcagtagttcgagagcagcctggccaacatgatgaaaccccgtctctccgaaaaacacaaaaattagtgtggcatgatgatggcgggagcctgtaatcccagctactcaggaggctgaggaaggagaatcgcttgaacctgggaagcggaggttgcagtgaacagacatcccgccactgcactccagcctgggcgacagagcaagcctccgtcttgaaagaaaaaaatgtttggccgggcgcggtggctcacgcctgtaatcccagcactttgggaggccgaggcaggcggatcacccgaggtcaggagttcaagaccggcctgaccaacatggagaaaccctgtctctactaaaaatacaaaattagccggtcacagtggcgcatgcctgtaatcccagctactcaggaggctgaggcaggagaattgcttgaacccgggaggtggaatgcagtgagctgagatcgggccattgcattccagcctgggcaacaagagcgaaactccgtctcaaaaaaaaaaaaaaagaaagaaaaaaatgtttataaagtgtgcttgtacacgtagatgtttaccacaaacgactgaactaatgttgtccggtctcagtaaaacagtctatagctgactgcaaccatattgatcaggcaggagttgcagcaggcagcaccgccggagctctttagggttccccatcaataaaatgggggttgtcatcctacctagctcttgggattttggtggattaatcgattcatatagtgtgcttaaaacggtgctccataaatgttagctaatgttggcccgtagtagtccaagatctaaagaaaacgcaccagaaggcaggacatagggaaccagttaggaaaaaatcagatcctgtcttcagtgaagcacttacgtcctgacatactttcccgaaatggccccaccaaaggggacctcctcccgagcttagcccgggatccagtacctgagtcgtcccccgcgctgagaccctggacaccagcctccgaatgtgagccaggcaactggcgcggaatcgacacgacggcgatcgaggcttcaggaggctgtagctccatggaggcggatcctgcacacaggtttggggtgtgtgggcaaggggcagctcagaacagggttagagggtaggcagtcgtgaccgtcagtccaggatcgccgtgaggcagtgatctcaccgctcctgccacatgcactgggtgagaaaaccaagccgcaatgcggtcggtgagccagcacgctcccgtaggacgcatgcgcgcctttttcgcgccgcaagttcaggtggcgctttgtctacgccctccttccctggaactctctacccacaactccccggggtcgcatgcggtcaacgtatgcgcgtgcgctcgccgtagccccgcccccaaatcccgtgggcctctgcggcatggtatttaatcgtctccccggggagattcgttctcatttttctactgctcgtggtaagtggcttcgtggtctttatagctgttactcttttgtactttgtctttttcttttattttcttttgagcgattgtgcgaacatagcatagcacgcactatgccttctgtgttgtagctgcctggccagggcgactggcggataaggtcttgtgcgtggcctcgaggcttaaaagtagcagtggggctttgtgaaggacaaaatggcgatggcgggccgtgtaggtcccccttcctatgatgaggaccttttcacagacctgtactgagctccgtgaggataaataactctgaggagatgggccctgcaagcctcttgcttagccgtctgttcagaaaatagcgttttcgaaatgccctgagttgacctaatgtcttattgggctcctgtctgcaggatttacgcgcacgttggaaccgaagagagctctgttgttgcagtaagttcttacggccatttcttaatctctgctctttcgttgagtgtgtggaagttgctacggggatgattttacgaactgaactctctctttctgatggattagtggagaaaacagaaaattctgagtagcactgtactgtacgcaacaaatgtcagggccctattgatttgtctgaggtgttagtgaagggtgttattttttcagatgttcagcccacaagagcttactggtgaaggaatgggacaagacccatctttatgcaaagccagcgttacagtaatgttccaggtaggtgtacatggtttatgctcttacagaggagaccttgtagataaccactccatgatgaacacaaaatgacaagcatatggctgaactttcaagtgatgtcatcttactactgagaagtgagagagaggtcttaaggggtctttgaatgactatttttaggtacataaaatgctttcctctgttgtctacagcatctcataatctatcctggggaattcagctgcctcccagggtgaatacaggtaattatccaaattggtgtatgtcatctttgtaaatgttcaagaaaacaagtggccggcggaacaatgttttt

SEQ ID NO: 5645 - DNA, 6000 bp, Homo sapiens
tgtctttcattgtgctctgggtcaaatcccatctccttctgcttcctcttggaccgcaggtcatcagtgctcccctctcttttctgtgtcttcagcttctaactcttagcaacctccttcccatgaaactttggatgtgcttgggtacttcctagcattaacaaaacacagaaacacaaaacctcacccattccacctaactgctccatttgccacttcacagttacacttttcaaggtctcatgaacactggctgttcctactttcacctcccacttgttcgatgtcctcaatctcagctgaaactgatcccgtagcattaaccaatgacttccttgtggctaatgccaatatttttcagtgcttattttaattgtctgctcggcaacatccaacactggtaagcattccttcttttactgactcatctaacatgtattgaacatctaacatatgctaggtaccgtcagacgctatggtatgcaggcgcccaagtgtgaatgtctttgacctcacggagtttacaagttcctgggagacaggggcaaaggagcacactataaccatgataggaggagagttaagaccaggggcataagggaggggtatataaccaggacctggagcccgatgcagcagggaggcttccagacaaagatggaccagctgggtgagctgcacttattgagggaacattccaggtagagtcagtagcaaagacccagaaataagagaaggaaagcagctgggggaacatgggtctaagtctcagtgagaaatctgagctgcagggatttggtcgtcagcatacagcaagttcttcatgccacaggagaaggtgcaaccagcaaggcacaatgtgtgcgatcagaagacgcccagggtcaccaaaggggcagatgaggagacccctacaaaggaggaggcaaaacccgaagtggtggagaaagagttttagaagaaagccaagtactgccaaggagtaattgcactgatagtgccaagtactgccaagagatcacctaagaagaagaaaacagtcctctcagcagataatctctcaacctcctgcaggcttctattttattgtgttcttccaacttctctggacactgctttgtagtcctttagaacagtgcagacaccactccctccaggaagctttgtttatatctatttgcctgttctcatatctgtccccgcaatcagtctatgagcctcactagggcaggggctgcacatgtaacttatttacctagcacagtgctggttcacttgatgactggaggatttgcaaatacaaatttaacaaaaaaattttttgtgagacagacattagtttttacttttcggtagtcccaggtccctgtaatggtagcaagctttccttgacaccagttcaagttgtgtatagtaagcctggcctaggtgagtgtttagtcatattcctcaacaatttcactaatgacctgcacctgacttgaaaggctcggttctctaaaccagcttcatcttcccgttatcaagcctcagttcccaacatttgcaatgcctcttcactgttagtatattcactttgtaagatgcagcttaagtctatctcttccagaagcctttctttcctccccctggttctgattatgagtgagttaagtcacaaccttcccaccttaccccgggtgcaaaaagcggataaccattcctgctctgagtgttgaggagctcacaggtggtaagggatggaaaagcacactgtaaagcgctgtacacaggcaatttatcttttcagaatggcagctcctccggggcaggcccctagggaaggcagaccctccccactctcgcagaggtcaatccagcttctccgcagcgcccagggggcctcccgctcccttctagatgcgccggagcgggccggaatatcactggctcgcccgcagcccagcacgcgtcaggccggttaaatctctgcttcggcctcggaggaggaggttgtgccggccctgctcgactaaccggagagggcgaaccaaaagccatgcatgacgatacgcaccgcggggactggagcctctggcctcacgacggagattccctgagagctgcccgtggttgccggtaccggctgctgccgccggactcccgtaggcgctgcgcggctcccttttcttcgggaggcagagcctatcggtgcttccgtgtgcgtcatcaggaggcgaccgtcggggatgctcacagttggacagtttggtcccgaggcatgctgggataccgcgggccggtctccatagtaactggccgacattcgcgcaggccttcggcctgcagggaaggccctgatggttcagtgctttgcagacggtgcccttcgtccgcggccatctccccacggcgtgcaaggggagaagccggccccgatccccccacccccagctcaggagagtaacggagccagctgtgggtgtgaacacgcatttatttacacattgtcatcggtaggcacatacccagcccagcccgttgaagggacagatctcaggctgtcacccatggaacctgcagacccttccctcctccagaacccttgaaggcgaagccctgagagaaccaggaattttaggcttctgttcaagagctaagaactaaattttatgccttcatctgatttctttccaaaaagtccatttcattaagtattcagacttcttagctccatcccattcatactttttgctctcctactacccacccaagattgttaataataacaataataataacaacaataatactgcgataatattaatacttcacatttgtacgaagcttacagaatgttttcacatatagcatctcatctgagcctcccaacagttccgtgaggtaggtattctcacctccctttttacagacagggtaaccgaggctcagagaggtaacgggatttactcaaggccacacagctagttagtggtaaagctaggaatcgatcccagcaccccatatccaagtccagtgtttcaacaccacagctacctctgtaaagtggagcgacatttcttaccccagtcaggcctaaatggtggcctgaggagccaagaggctgacttctcagattaggggagggaagggctcagcagcgtcggggagagttggggtacttggccttcaactcctgtttgaactggcgatataggatcttattgtgctgattttcagcctccttttggggatggaacttcaacgcttctttgaagcccttatgaaccaagaaaccttcgttcaggacctcaaaatcaaaccccgccacatgcagctcgcaggcctgcaggaggaaagacaggttagcaaagtttgatgacattgacaggcctgagactgacttccctaaagccacagtccagcgtcctcacccctctggaagtatcctggatcttccacaccatccacccacctcctgaactatgatccctcctgcttcattgcctcctttccatccagggccactcctcataactccctgatcccaccacccctcctgccccattacccctgccctctcccttatgagcacctggctgattcggttgaagccgtactgccgaaagcgctcgtcgaaggtgggcaccttgcctcctgccacgtagaatggctcccaggggtcctgccaaggtaccacgtaggcgggccgcagcaagctctcttccggcaggttgacccagcgggaatagttggtgggtgcctggcagggggtgcacaacccataatagaagggccgcacctcgccaacctggtagagctgcaccagctcgtttttgttcatgggcatgcggcgggctcttcggatttcgaaggcaggcaccaccagcgcggtgcctccccactggttgctctgatccagcatttcccgcaggcctctccacagcccctcgctgggcaccatgtccacatcgatcaccagggcatagttggccccctcacgagccagattcctcagcaggttattggggtaggagacattggtgcccagcgcataattaatcccgggctgggccaccctggctagcttgtcaaagacctcctggcaggaccgcagcagggcaaactcccccggctcccgggggtcgggcacggctgcctcgtaacgcgaggggcacacgaggtgcatggcgaccctggcgcgcatgtcggggcagtggctgctcagcgcgtaggccagcaccgtggccagctgcgcctcctccttggtggccgcgaacaccgacacggacagcgggccctcccagcgctccagcagacccgacaggtgcagcaggttgtccacgctggcgtgcgtggccaggatcacatcgttggggtccatggtggtcttcagcaggcccctgtagacgcggtaatcgccgctagcgtccaggacgcctccagaggccagcgcggtgcggagctgcgccttgacctggtccacggaccgtggggacgggggaaagaactcaaaatattggtcttgctcctcctgcccgtgcagtccggacagcagcgacaggtagagcagctgcagcatcgccaccagcatgagcgcggccagcagcagctggtagaaggcgcaccggatggcgtaggacatctgcatggctctcggggctcggggcgcgcagcaacgaccacccggccacagactacgccagcggccgcaagcccggatttaccgcagcctgccgagcgcagccgaggcgagccgaggccagccgagccccgagcgccgccccgcccgccgcccgccgcccgccgcccgccgcccgccaccgcccccagcccccggcgcgccggctcgccccctacgagggaggaggagccacggccccgccgctcggccgcgcgccgtgcagacgcccgcccgcccgggccccgccggcttcccgggacgcactcctctccctccccgccggcgcgcgcaccctggaccgggcgcgccctgaacgcgcggcgcgctcggccggactcggagggaaaccgcggcagagctcggctgcagcgtggtaaaggatggcgcgggctcagcagaaaggaaatcaaaacgctcccttccttccgcggcttcttctttccctgtgtccgaagaggtctgcgttgcgacttacgtggtagtgcttggaaggtgcggagtagatgagagataagtgaatgtggacaaacctgtcacgtaggacgaggtggccgagtggttaaggcgatggactgctaatccattgtgctttgcacgcgtgggttcgaatcccatcctcgtcggccctgttttatagaggttgggggggaagcatctacattttcacatcctgcctatttggagcagcaagctggaggtgcgaggggtgaggcatctaaattttcacatcctgcctgtggagcagcaagctgaagaaaactgaactgggggtgagagtggaattcgatcccaagtctctctggtctttatccaccacgcatctcctgcctgctcctacttcaggtgtctgtagctctgggcagaggccaaaggtgttttctttccttctagaaagagggcccaggggttggtggcacggaaaagactagaaccgggattctggccagtgtgaagttgggggccaacgtatgatctgcaggaatcagggaagccccccattggaggcatcgccctccccgtccgaagtagtggtacttgtcctactctccagcacttctcctagggcggagaccttgtgtccacatgccctgctccccaacacacacaatctctttttttttttttttttttttttttgaggcggattctcgctctgtcgcccaggctggagcgcagtggcgcgatctcggctcactgcaacctctgccttccaggttcaagcgattctcctgcctcagccccgagtagctgggactactagcgcatgcagcacgcccggctaattttttgtatttttagcagagacggagtttcaccgtgttagccaggatggtctc

SEQ ID NO: 5646 - DNA, 6000 bp, Homo sapiens
ccctcctcttccaccttgctttatctcaggctgcaggaactgagacctgagtgctggcaagagggttttctgggaggcccagggagggagacagcaaccaggagggcagggaccagggctggtgtgtgaacccttaccgagcggtccatgacgatcaccgcagctgtgcccaggcctgtctgtgcctgcaccagcgcatcgaagtccatcagcaccgtctcacacacagacttggggatcagtggggtagacgagccgccagggatcacagcaaggaggttgtcccagccgcccgtgacaccccctggggccccaagtcggtccccaaagggatgcatggtcagggctggggccggcacacctgcctagtcctgagcccaggcccttagtcagcccctagacccagccccgtctcctgagccctcccgcccaggctctctttgtggacacctgcccccactgcgcacccccccaccacctggctggccccaggccttaccagcatgcttctcaatcagttctttcaagggcacagacatctcctcctccacagtgcaagggtggttgacatggccagagatgttgaatagtttggtgcctgagttgcgttctctgccaaagccagcaaaccaggtacctccacggcggcagattgtgggggacactgccactgtctccacgttggccacagttgtggggcagccaaacactccttcagggaaatgggaagagaactggtggctgctagggggtggggcaagtttcctggcagggaggtgtgtcccagggtcctgcacccatggcagagcccctgctctaatatccccttatcattcttatccctgctggaccccaaactccagagatgcccattgccttgttcaccccatgcccttagcctcagaacaggcactgtgaaggtggagccacagagcagcactggtgcggaggggaccgaggcaggaggagggacagcaggcggccctgggggagcctgtgtgttgttgccagcctactctctatctggccccagccgggaagccactcagaaatccctaagaacaatccaaagggagcctagccagatcccgggtgtcacaggacacagtctgacccagggttacgccaggccttacccacgtctgcggggaaggggggcttcaggcggggcttgccctgcttgccctcaatggactcgatgagcgctgtctcctctccacagatgtaggccccagccccgcgcaccacaaacacgtcaaaatcatagccagagccacaagcattcttgccaatcagacctgcctcataggcctctcggatggccacctgcaggacaaaggtgtgagtttcccagcccacccccagcccaggagtcagcctataacttcaggagtcatgaagcccttgaaggcctcccacggtgaagctcctaatgctcctggtataaaaaattttgctagcttagtaaaacgaattggaaaacttgactatgatctggaacagataagcaagaaggaacacataagtaagctgctttgctgccaggaaaataaaaacgaagtagctactatcaggtctcctaactaccctagtctgtaaaggaaaaataaaagtccttataaaattaaaataaaaatgtaattgcctatatccttattgccttaacctattttatttttctatatttcctacagatataagtattattcatagttccaagcaatgaacataatgtattttctccaaataggaattgtttatattcataattattccgctctcttgctaaacacatagttccacttaggttttttcttcttgctacttgttttataaaaaatactatatttttgaagcaaaaaaaaaaaatttacaccagcagcattaggagccctggaaggaggctttgggagccaagtcccatttgggatgcatgcaggactggccaccactcccccagttcaaccactgacagaccaggtactaacacctcagaacaactgtgctgggtgaggggtgtgtgagtgcacactgaacaccttctcatctgtctacatctctccctacccacctgcagattggaggcctcattgtagaattcccctcggatgtagatataggcagcgcgggcgcccatggcccggccccccaccaggcagccttccagcagcttgtgaggatcatggcgtaagatctcccggtccttgcaggtgcccggctccccctcgtctgcgttcaccaccagatacttgggcctgcaggggcccacaggtcagacaggctacagggccatcaggactgggtcttcaactccatgccaccccactccacccagggaggcctcaaagatgtctcctctgacagccaatcctttactgccctcccaacatgtcccaggggctctgcttgctcaccaccaatgacagggagctcactgcctattctgtctttgggtggctatgaccacaagaaaggtcttcattcagctcatccaaacatctctccttgtgtctgcccctgagagccagattctactcttggtgacaaagagcattcctcaagctctaccatcaaaaggaggtaaagcaggtgacatttatcatttgctttatgtgccaaccagcatacaggccaaaagctgtatgaacattatctctttaatccttgcatgatatcactgtacctatttacaaaaaggaagctaaggttcacaaaggctgggaaattgcccaaacctctatgattaggaggcagagctaggatttgaactaagtctgcctgagtcaaaatcatgtgttgattctgctacataagtctcccctgtggaagtccacagagtaagtcccatccatttaaggcctgggaacatgtgcccacctcattcatgctaagtttctaaggaaagagcccaaaggcccagggaaaccccagccacccccaaggtctctcccacagccacatctgccccgcccccacacacacacctgccatctgagggcttattcatgaagctccacttgaggccagtggggaagccagcgcctccacggcccctcaaacccgatgtcttgatctcgcccaggatccagtcgggccccttcagcaggatctcctttgtcttgtaccagtcacctcgactcagggaacctttcagcctggacagaatagggaaggcaatgaaggggacaccttgctccgggacccaacacactaagggcactgtctcacctccagtcatggcggccgtacaggttggtgaaaatccggtcttcatccttcagcgagccaaatgaggttttcttgggtgctgtctagggagacaaagggtcaggaggcccagagtgctctggggccatgagggattgggccagaagctacagaatcttgggtctccctatttaggaggggctgggctagggctagggaagcatctatagcatcatagataccactgccacttagtaagcatttttttttttttgagacagactcttgctcttttgcctaggctggagtgcagtggcgtaatctcagctcactgcaaactccacctcccaggttcaaataattcttgtgcctcagcctctggatagctgggattacaggcactcaccaccacgcccgggtaatttttgcacttttagtagagacagggtttcaccatattggccaggctggtctcgaactcctgacctcaagcgatccgcccgcctcagcctcccaaagtgctgggattacaggcgtgagccaccgcgcccggccattagtaagcattttgtttagcaggtactggatggaagcattttacatccaaaatcccatttcatcctcataagaactctgataggaacgattttctctgtttcacagaggagaaaactgaggcttggagcaaaaggagcttatggaaggtctcacagtcaaaagcagcaggtccaatttgagcccaggtctgtcggtggccaaacccacagctgcatcacggcaccacacagccccacaagccgagtgtggcagcttggccctttcccggcctggctcccctgctggaccaaaacttgggtaggccaggggccttttatattcctacctcggccgaagaggcgaaatgtgtttactgatgggaaagaaatgcctccttaacacacaggtgatggaggggctcacttaggatgaaatgaggagccccacgacccagtggagagcgcaccagctgagggcgacgggattcccatccttttaagagcacttttcagccacttcagggcgcagagcagtggacgggaaatcaggaggtgcgcatccctaaatggggcaatgaccccttcacgccctacaaggctgtgacaaggagagaatgaaagactaggggtcttcacaacctgcaaaacttccgccaggccgaggactgtaaaacaagggaagccagcaagtcagagggtcaagggagtcggccccgcgttgggacccgttcccctacttcaaccaggccggagcgggggccttcccgcctggcctggggagaagggctctccagaggccactacagaccccagggactgctcgtgcacgggcgcggccgcgacacccggccccaaacacccgtggccccagccaggctgggcctcaccgtgtcgccgctgaaacgcacagatacccgcgcgggaagcgaccagccgagcagccgccgtgttgccagcatcgcggcgggccagatgggtcacctcacgctgtcaccttcatagcactgaggctgaggaactggcgcgatagagacgctaggtggcgcgcaggaaagacgtcacgcgcccgacgccagcgccgcgcaccggtatcgctgcgccccttcaacttcgccagcggccccgcctcctcgggggaggactgagaggccagtgccttggcgccggggcttctgggagatgtggtcccaccggcctggggtccgccttcctccctccaccgggctggcatttagcggtggctgtccccaccgctcgctctttcgctccctccttagctcgccggctcccagcctttgatgccacaagtaaacaaacctcgcatgtcgccttctgctgggtcctggtgtgttccactttctatagattcggcgtttagtgtgcacctgcggtatgcatcggtgtatcatgggaggagtgaaaagtcaggcaggtcatagcccgatcctcatgactacgttgcaattattctgcccagtgcgagccctgccagactgtgggcttccccaccccgggcgtccgtgtgctcgaggaaggattgcagactccaaggcagggggttgttcgcggagttcttcccagagggcctgtcacggaatcctaggctggggtgaggcagagaggatgcagatggtcagtgcacggcacaaactcttgctggcgccgctgagttctctcagctcttgtcaggagagtccagcactttctgcttctgcccaaaatcctggcatggtccctgctgcttttggaatcagccactggtccaggatttaagggctctgcgaccccgtccttcgccagggtcatcacgcccaggccactgctgtgaaccccacccccgtcccccaagacccctttctgccgtcattagactttagggcgtttgtgtggctgtccccctccctcggttttcccctgacctgaggaggtccctctgtcctttgccttcccaggaggtcttggaagcctgatgaactcgtctttttcagtttcctggaaccctctgctgtggtcctcgtgataagagtgacctttttggcctgctctccccagctcttttccagtcctcatggtgaggaaccatctctgttcttttgtgctgtaatcatccttcctgatctctctaaaacgtgctgtttacaaaactcctttgcagctattttctcacataccccacagcagccccacaaggtgttcactccattttgtccacgaaaaaactgaggctcagggggattttgtcctttgtctgtgggca

SEQ ID NO: 5647 - DNA, 6000 bp, Homo sapiens; identical to SEQ ID NO: 3218

SEQ ID NO: 5648 - DNA, 6000 bp, Homo sapiens; identical to SEQ ID NO: 3220

SEQ ID NO: 5649 - DNA, 6000 bp, Homo sapiens
ctgccctcccacggggttttgctcctatcctcagcttgtccctgcagagctgggcgtgcccagcaactgcatgcaggcatgccgtgaaggtgtatcaaacgctgatgtgacaggtgcctcctgccttacagctgaggatgaatctgaacatgtcagagtccagggaatgccctgctgggtcccgggaacccagatgtcaacctgagccaggatccatgtcccagacaaatggaaggactaccccagcaggagggcacgctccccacctgctgtgtcccaaccccagggcaggggctgctgacctggaaggtgacccacaaggtatagagctgggcggctttcctcgttataggtggagtcttggcccagatgtccgagagccgagcatgtccggtgacgatgtccaccacagggccagtcagggcgcagctgtactggtcacaagccatgatgaagtagtagacgatgaagggggcgaacagcagtaggaagatgacgctcgccagtgaaaaccagtccacctccctgcgaggacggatgcaggcagtcacactggggcccatctgccctgggccccaccaggaccctaagaggctctgtgtgggagaactgttgctcaaacccaccagtaccccatgacagaaggcattagctcctagcacgggccctccttgcggccagggaagccactcaacatgcctgctctactgtagttgattaactggtggcactatctgtggcccccatggaaggcccagagctcagaatatgagcggaggtaggtctttcacaaccaccaaggccagtggtttccccagttccaggtcggagaggatactcaccctgcacgaagtccccatggttctatggcgaaatgggagctgtgacaataggtcatacccccagatggtgggaaggccccagctgccctttaagcctttatctttttttctaagttgttgactgaccatgatttctagtttctttttataattccttactttataaagtggaaaactgtttacctttcattagtcttgacaaaaaaaaaaaaatcttttttaaaaaggtccttcattcctttgggtccatacaattccaaaggctggaaagctctgagaccacactttactttctagctgggagaacaggcaagatccttaccaggcacggccccactgcccttgagatgcggttctgtcattggtgacgccatctagactcttggctttgggaatgttgggttgcgattttgcagccattgggccctgcaagaaagagaaccttgcttacattatccctcaaataacagacaccacctttccctgttgcatccaccactgctcctgggcctggcagggctggcctcctgtgcacatcttcccggtaccttgttcctgacagcagattccaggcagggaagagatcatcttgtcttagactctcttccttggaccctgcaatcacctcccacgtgaccttgctatggctgctcttgctagtctcagttcattctccaaacatggcagaatgccccccctcttacagcacaagctggctcctgcctccctcctacacaccactctcccctattctcctttggctccaggaacacaggggtcttcactcatccttgaacacagtttaaattgtctgtggcactgacttcctctgcttagagcacgtttgcaggtgtccttgttcagggctcatgtaaaatgtcccctcctggggagatcttccctctcagccaatctgaagcagctgctccccagcttccctgccaaggccctccactgggtactttattttcttagtaactctccccatcgcctagaagtattcatttgtgtgtgtgtattgtctgtctcccctcactagaatgtaagcttcccaagggcaggaattgtgtgtcctcttcattgttctactaccagggcctagaacagtggcccatgtaggaccatcaataatcacccttcaaaaaaaaggggaagagaacacagaatgtctctaggtacccacagctgctctacatggttataatttgggggaagcagtgacatccccacttccagaacaagttcataactgtgaagctttaaaatatctgagattttttaaaagatgctcttgaaagcttttagagaaaaaacaggagtaaaaatcacagtaggcttagatttctcaacagcaagctggattctagaagacaatgatgaaaaacttcaaaattttgaggaaaactttttgcaacctagaattctactcctatgtgaactattactcaaggacaacaacataggatccaggaaactggagacccaagagagctgctgaagccatgtccacaaaagggcaggggcaagtcccaagaggacagctatgcagcaggactaaccagaaaccagtccacattggtacaagatgaatggctaggaaagagaggaaatgaaaatgatgaattttgttgcatctgaatgtgtaggaaaattattgatatatgtgacagctcggttagagcatccagaaaaaaatgaatgagagatgcatagaaaccttaccaaatgaaaaaaaaaaaaaaaaaaaaaggaaggcaactgttaactccaggaaaaataaaaagtcatataaggaaggaaaaaaagaaaccaagccattattataggaccttacttggctcaacagtgaataatggtaattttgtcataacaatgtatactctgactatttattgactattgtatgcacagaagggaatttgcaaagttaggggtactaaaaggaaattacttagaaacaagtaggtacaaacaacaacacaaaagtagctgaaagaatgaaaagtgtttgctgctggcaagcaagactgtcggatgtgggatgtggtagagagtatttcttctgaagccttttaacactgatttttaaaaaaatgtgtgcatgaattactttaataaaaattcacacacatttaaaaaatttcaacgatgaaagacattttccttatgcagtgtgagaacttcagtacccgcacttcattcaatttacacaagttagtttatgcagttcctatgatgcacaaaacaagacgaagagttcttgataggaagagaccgtgtctctctccggccccaaatactgaatacagagcctggcgagtgccagtcactctccttatatctgtaaaatcaaagtggatgaaagaaaactacttctgagaaaagctgacacgctagtgagtctgatctcaagatcacagccacctggacaagctggcttgctttagacagttcctctcccccaggctctcatcaaggtaagatacaagcttagtttcttcccagccaaaacttaccagctcagtgcccccactccctccgatccctagttcccacactgactggtgttaatccagaccacccacatgcacacttgccttacaggaaggctaagtagaatggggtggcattcgtcttgccccaagccatggataagctacaaggggacaatgcctggtaccaacattatcaattatgtaaaacactgggaaattgcaaaagggtcaggggatgtgtaacctcagaactaaagtgtgaaaaagccactgggagaatgttgtcaaaagggattaaaacaagaccaaagaagtacttttagcttattacagagttcattcacccaggagtcagctctttagccacaagcattgagttgtgcaataaacatctaagtaacatccttcccaatagacggctgggaacagacaaaggggaggtgccctggtatgttgtattttactcataagaggcacagacagtcgttggcactcgagagctggtggaccagtctgtctgtactttcaacgctgtgaagccatagcctgcgcccacgatccagggcactgagatacacttacctccagcctcttgccaaatagtttcacagcagaagggaacttttccttcttgaaccggccccttaaaagtttctagacacctgtgctccaaatgcctgcttgatccttctcaaccggctaaagtcctgcaaggaacacaaaaatgaataagaccgcaggcagctgacatttcaggagagggcagaagctcaaggcccacagtaggagtcaagcaagaggcagaaggtccagtgctcagggcttcaacagccgcatgtcagggaggacggcggacaagccagtcccatcgcaaagctgctgtgcctggctcagcactgacaaagagggaggcgaacaacaggtggggcaggagaaagagccgccgcggagcgcggcatggggccaggagccgaccccggagccaggcagccttcgcccggggaagctccagacagcgcggggacagagcatccctcagacgccggctcgtgggggagggggactatccacgcctccgccccgcctccccggagccccagcggcccctcgcctgtgagctggaccctctccccacctgcgcgcacgccccctacccctgaccccaccctcgccctgtgagtgggcacctgctcacctgggcaagcgccccccactgcgcacaccttcccctggcctcacctgcgcacaccttggccactcacctgcgcacacctcggcccctcacctgcgcccaccttcccctggcctcgcttgcgcgcgctgctccacgccgcctaccctctagccaggggtcggagtcacccgcagggcaggggcgcccgcccccggatgatgtcagcgattgcctgccaatcggaggcggaccctgcacgcccggcggctccgcgccccgtgattggtcgaggagcctgagctgactccgggcccaccgcgcccgccattcggcagcggccggactcgagattgacggcccaggccccgccctgccgccccaccggcccgcccgggccctagtgggtgggcgcagcctctggcgcttcttcgggatcccagctgaccagctgggggtggggcgtggcggagtggccacgtgggccgcgcggagaacgcgccaggctcatcacctggatcatcgtgcctcagtttccccctcggcaaatggggcttcagcggctcgcgacgcacattgatggagcgtatgtccaggcgccggtgcaccgcaaggagcaaaacagacacagttcttggtcctagggctcacgtcccggggcgaagaggatcctccataaacgatcaggtaaacacatgggtgtcagggaaggctcgccgctgggagaccgccaaagtgacccgagatggagtctgggtggcctgcttattaggggggcacacctgtgcgaggacgggaggggagggagcagcaggactgggcaaagggagaagctgagccacagtgcgagccggacgcacgggccacgttgcgagggcatgacctggggcgaggcagccctggaggagggggcagctgaaggtgtctgctgaccccacacccaacagctcgggtaacaggccttactgtcagagcgatctggttgccacgtctctgtggccctcagagagacatcatgttttcttttttccctgcacctttttgttttgaaaaatgttcagcatacaaacaagttgaacgtaaagtgagcacgcagattcctaggttcagcaggggtgagcagctggccacgtttcatttctctccctctgtgtttatatatgtgtatttttcttttttcctccccactcagcccccaccattagctgcagataccgtgatacccccctcccaaatacttcggtatccaactccttaagaacaagaacctcctatattaccaaaatacaatgaccacatcagttcaatgctgttatctattttccatctccagtttcccgcggttgtcccaataatgccctttacagcccttttgttattgttgttttgttttgctttgttaagacgggggtctctgtcacacaggctggagtgtagtggcacgatcacagctcactgcagccttgaactgctgggctcaagcgattctctt

SEQ ID NO: 5650 - DNA, 6000 bp, Homo sapiens
agaataacttgaaaccagaagatggaggttgcagttagccgagatcgcgccactgcactccagcctaggaaacaagagcaaaactctgtctcaaaaacaaaacaaaacaaacaaacaaaaaccagcctgggcaacatggcaaaaccctgtatctacaaaaaatagaaaaattagcctagtgtggtggcgcatacccacagtcatgagcaagtcagctgcctcctcgcctgcccagaactccgcggatccctcagcctctgccctcgtcagtcccttgcatgacttccctccaaatgatcagaacccagtgggaacccagggtataccccggctggcccctaattctctcctgccaggaatccctcctcccaacctgagcaacctctaagagacagggagggctgccggtgcggagcttgtctgtgggcaaaacagctcaccatgttggaaggagaattgggtctttgggagcctctctggccttgagccagcccaggacgggcatcaaggagggccaggcagccaaggtgcttctgcctggcaggaatcaggatgccagacgccaggagcagccactttggctgggttccctgtgcttagaccccatagggcccctccccttccccacgtgtggccgtggttgccttgcagccatgtgggcggcagccacatttccaaaggaataggagctgcaggcaggccagatggaagcaattgccaagggaaagcagcagaggtgggggctggggaggctgggagggcccacggggaaggagggaaggagggaaggagggaaggagggagggagaagaaccttgtcctgccccgccccgcccagctgagaaagcggacaagcgtgtgctcagggtacggcccggccgggatgtggggttcgggagagcactcagaggtcagggtttgtgttccacctttgacactaatacactgtggccttgagcaaaccccttcacgcctttgagctgggatctgtttcttcatggggcaaaatgagcaaactccagggggcagttgagaactgggctgaaaagtgaaggttttggaagcaagcctggatttgagtcctagctcagctgcttacgagctgtatgaccttggccaagtaacttaatccttcaatcctccatttcttcatttataaatgggcttaattacagggttgtgtgaagctcacatgaagggacgtaaagtgtctagcacatcttttttttttttttaagtttattgggccaggcttttaataagtgcctgattgctaaatggtaatatttttgttatttgctgaggccattttcattatggggacagatgtacagatgttcacccatgctgcagttggcagaggacgcagagcacaagtagggtcgctgcagaccagcattccttagcactctccaaactggtcccagcactctttggggctgcctcccctaaacaggaaagcaagatcctgaggaccccaacccccatgcacaggcttgaatgagctgcaggtgggacaaaggaactctcctactcaggtgcttctgggcttctgcagccaggccaggccttcctcacaatcaaggcccaggtgggaaactggaggcccagccagacccacacctcacttcagcccgagcagcagcaacctcctccctgctgggccagcagtggcacccagggcttcagtataggcaatcctaccatcttatcacatcctatcacagggcagtgtggggtacaggggaacagagatggggttgtggccaggctgtaggtcccaggtaaagggctcagccaacactaaaaacccacagctctggacacccacaccctctaaccccgaaatgcaacaacccaagcaacctttgggggaattcagcccctgcagggctcaggggctccagtcagaaagctgaccagcacttggctagggcctgggcatcgcacgctgctgctctcacgtgaagctacactgaccacttcctcagtctgtagaataaaggacatcattcacacacctccctccccgaaatgtggcaggggttggggtgattctgaggccagggacagccagtagtccatccagggccactcaggacactcatacagaagcctctgggaagggggcaacaaagaagagggggttaataacaagagtcacccaaatctgcctacactcaccatttcctcccggcaaccaaaagcttcaggtcaaggtcgtgggtcttgagtaggaaggaggatcccagcgtgagggaaacacggagcgggagctaaaccaccagcaggggcctgttgcagggaaacgtccagccggcccagtgcgactgaactgagggggcaggaagcaggggctgtttgctcggggtgtcccaccctgcactgctggactgccccgctctccagcatctaaggtccatctccgaggggccaggagctgggctaggctctagcggctgccttgatggcaatctgtaggcttggacttcagaccccacttggggcccaagctccctctccatcccctgcaggccccccagccagctcctttccctatcggcccagggtctggaacttggcaggcacggaaacatttgtattagtccaagatagagggatcccttccctccaacagatggtgcaaacctttgagccattctgagaagaattcccaattccattgggacaaccccaggagcagcctctctgaggagagacccagagaacgtgcccaagtcagacctggggtagcccccaaagcaagggcagatggtggccagtggggagttaggacagaatgacagctcaagatggagcacagaaagggggtttggtctctctgctcctgctggggaagggagccctttccaggattaaaagtccagaaaggagcagattcttagttctatccagaaaaccggattctaggagtctaacgaggttgggaggctggcgggggcacggcactctcttcctgagaagcagagggccagtcactgcttcccgtagggaaggcagcccagaggcacctcagcctgggccgccagctcacagagaaggcggccctgttgtctctgaacaacaacccatccccaagctaaagacacccactctgcccaaagtccaagctggcaatttccaattcactcttctaactcttccttccatgtgcaccctcacaacctcggttaccatcttggagtctgggggatctggccccaactcctggcaagctccccatgtcttgacagagcccagggcccatggggcagcttaggatcacccacccagcgcaatggggccaggcacaggagcagtctgggagtgggccaggagcagggcagggaacggtcaaggggcattcccagaccagctctcagcaagcaaaacaacctcccgagttcatttctaggccccaaacagcgggcacgtccccggaacccactctagaattatcgggcagctttggagagtaacagcatgggagaaatattaccaatagtgaatatttatacagctctccctccgtgcaggcgcctttcaaagcacttagcatatatcaactcatttaaaatccccctggcagatgccagggccaggacctagaggaggtggagtctgtaggacgggtccggcacagctcaggagacagtgacacgggtgtgtgtctcttgtgagaactcagcctgtaccaggcctgttcccaaagttcaaaaagaatgagtccgcctgagcctggcttccacgcggtacccgcctccggcggtggaaagtacaggcttccccaagaggcctgtggggggtgccagcttgtgggtggccatgaggtcagacagggcacagctgggcacccgaacactgcctacactcccagccttctggcagcagttcccttaagccaggccctcaggacccaggctggggagcagaggaagcagccacagtaggtcaggcctcaagctgcccagacagagcctccccccaggactgggaatggaggggcagtgctggcagacatgttggcagttctgggctggccgggaggtccctgccagccaggtccccgaggaaacacccacagcagacagctgagcccactccccccatcgcatccctcccactgctcaccacccatgcagccctgaggcacagtggcctaggcctgacgacccccataacgtggccctaggaccctgggcacagccggcctcccactgacaactccacctttgggtcctgctcagcgaccttgcgactcctgcacacaggcggaccccgcaaagcctgtcacctccagcacagtcagctcccaagtgctggacctgaccggggtagttgtgggagaaaccatcgctcgaggatgctggaggtgggggccgccgcttcagtccgggcgcagggctgggggattgggggcggaaactttccgcagaactgtcccgcttgctcactccaagggaacggagaggatccggcttcccgcgaaaatctggtccagggaaagggaccccggaaagcagctccgcagggctgtggcagccccaccccgacccgcgctgcgcccacgtgcagggcccgaccccctccgggaggcgcggcgccggctggggtcaggcggccgaggaccccgcggctccccgccccgccccgccccgcgggcccccgcgcaccgccgccgcgtactcaccctcacgggtggagcggggcggggcagcacggttccgcgcgcagctccgatccgctaggcgcaccgaccggcggcgcagcgctggcgcgacggctcgactcggccgggtccctgtcccgggcgcgggtccggcctgggagcgggcgagtccgcctgcaggggaggcggggacccgggcccgggttgggggcggggaaggggctggacacgcttgcgcacacggcggcccgactcccaggagctcccgggaggggtagaaagggcggggtggaggagggggaagggcgggggtgatgccgcgcggtcgcaggcttgggatggtgttcgcgcctccgagacccggacagaggcaagcaggggcgccgtgggtgccagagaggcggaagaggaggcctgatggggtgagcacagggccagggcaggcactgcctgtgaatggcgccagggtgggtatgcccagcgcagccaaggcgctcgctcccgggaacaatgagaatcaagaaagggtgcagtgctctatcccacggggaacggtgtccttccctcactggggaaactggggcagggtcctgttccgggagcctatgcttcccgtgccccatgcacgcaaggcagccagtcagtcccctgggcccagacgtgggcccttcctctgcttcggttggggcctgctgcccctaaactgctctctctgcacccctcacttgcatactctttatcttggcctcagaaagtttctcagtttcctttccgttattgaaggcgccaggcatcctgtctccaggaagaaacccctgggcccctgaccctggttctttggacccaggcatccccccaaataaacctgggaactgcccaggctgaagaacagttcagaagtcaccctacaggacaatccacagccccttaggccagtccctttcacaggtcagcacagtgtttccggagccccacgtatcaacagcccagtgccgggagcgccaggggctccaaggaaactatcagacccattccctgtccccaggaagcttaccatccagcggcacagagaaggctcaccatggactccattcaagaacgaggcaggataggatgtgaataagtgcaaggtgtgagtgactgacagtaagtgcaagggggttcagagaagtggcagctccaagcctgcttctgctgaagctggagggcttatctgtcaagaacccccaactcaggaagctctgctccaagtgagctgagtaaggagagtctgcctccaagttgttcctctgcaggtgactgtgctccatgctaaatcattccttgcacgg

SEQ ID NO: 5651 - DNA, 6000 bp, Homo sapiens
atggtatcaaatttggtaagaacaatgccatcaatgagccgaggtgtctgagccatagaatggtcagccaaggctctgttgaacttgacctggaaagaaaaagtgatagaagtgtaagaaccatctaaattgaccaaagctcaagttgtaaagggaactgggcccacgctctcaccagctggtccacggcttcattgcctactaaggcttctcctacaaacagcaccaaatcaggtgtattgacagtaatgagtttggccagggcagtcatcagaggggcattgtcttgcatgcggcctgccgtgtccaccagcaccacgtcaaagccttggttacgtgctagagaaagaaagtagtcaactctgaacacctggactaccactcatgctcgttcccagcttcctctcaaaaagtcctagtttgactacctgttcactgtcttgggctctggatttggttccaaggtaatgtgagaaaaacttgattatatgcttggccatcaccaaacatattcaggaaaaggaggacaacaggatgaaggtgaccaaattcaggtttctctggttaaggtatattagctttgcctgcaactacatctgttatccaaaagcagagcatggcaagtaactgatctgactttttactgtaattgaccaacgagtctgtagtagcacaagcctgatcttctgcaaattccaagagaacccaaggagaaaaagggaccccaaataagcccccacacttcccatgcactgtaccaaaagcaatggcttccatggcaatgccagcagcatccttgccatagcccttttcaaacaactgcaccatggtgcggccaccatgcttctctggagggtgtagggcactcaaacgccgggtgtgtgtacgcagctgctccacggccccagcacgaaatgtatcacaggcagcaatgaggacactgaagccattctctaacaaccagaaggaaatctgtgaaaaagacgtaagaaaagtcacctaaagccaggattttgagacacaagaagtacagaaatatcagcgataggctggggaactgcactgaccttggcaagattagtagatttccccactccattaacgccgcagaaggtgacgacataagggcgctggcgacgctgggcatccatgatgtcccggagcatgtctacacgacgctgtggctgcagaatctgcaccagggactcctgtagggcttgctttactgtggaagtcaccgctgaaaggggaggtggaggaggttgcagctgtgaaactcaaggaatgctctcaaaaatgcctaacacctttctgagctaaggggactaaaacagtaaattagactcttgtcccagaaatccagaacagacgcacattacaaggactaactcactgaatcctctcaataacccttaaaatctaggttacagaggtttagaggttaaggaatttgccgaaagtcacatacctagtaagaactgaggtctatgcacttaacctacacataagcactttctcacttaggtaagtacttactgctgaacgtccccatcaccttcccttccaacttgttggcaacagattcacagagctggacggcaatgtctgcagccacgttcttagctgaggagagggggacaggtatgtcagttccatgtcagcaatgaccaatctttatggtacaggtgagaaacgctaggtgattctgctctcaactacccctatcccgcgagtatgagtcagcccggtcctcagaacttaccaatgagatgatcacgcatcttgtccagcacagattccatgtcttcacgactcaagctctttgaacccacaaggcccttcagcataccaaacatgccacccagtgttcccttggtcgcactgcagggacaggagattacacatacacataaaaccagtaggcaggagttgtatcttaccagttttgcagatgcatataccaacccccacctgaaattcccctacctaggtttggtagagttttgagcagccccttcgtcatcagagctgctgcagtccagatcctgaagctgccccccagacccagtccctcgaatctggaagatacggggaaaggatgtggggtcaggaacactaaggtctctgaggaaaacgtccacattgctctatctctttcattttgggaagctccaagtataacttacccctcattcaaatcccagtatcacgttcccacactctacttcctcccaatttgttgttaaagatcactttgacccctgttacctcttaccaggttgatgtcctcagacaaggcagcctcaggggttccattggtggtgggagtactgtaatccaacacttctttgttagcacagccacccagttcccacacccggggtgcttttttgcccttctcctttggagcatctgacttcgtggacttgctgcaacaggttatgatacaaagagttatggtggagaagtaggaaaggaaacatgagccagagaccagaactcccttgcacccattgtgtctagataacagtattttgagagtactggagaaagagtgctcacttggacttctccatacccctcccatgcttctgaatgaactcctcgcgcttcctgcggatcagctcctctttggaaagttctactccgttctcaggacccactggaagacctgacttttctgcagggactggtttgctggtagccaaaggaccatcagaacctgttggggaaaaaactcactgaagaaaaaagaagaccaatcccaaccactagacaatggctaaaagtcttccaaattgttcaaaggaaatttggaccaaacatcttggagttcataaggcctggggattataggatggtgaccatttgagtgagaagcaggtaagcaatgacaaaaggaaggaccacctcagtccttagcaccgtgttaacacctttcatgtcccagtatatccaaagaactcaaacttgccttccttcttggcccccttttttttgctattctttgctttttccttgggcttttccccccgtgtctcaatcatggacctcacaggtttcttggccttttcagaatcttcaaatttcttcatggtagtgggagcacggatcttactgctctcctctgcttcactaaacaaaaaggagaatggtttatctttctaccccatgcagaaggaaaaataacggtccagagaaaggactctcacacccaagaggacaatgagaactgggtagcaaattaggaatgtctttgaacacatcaatttaccacctttgaaccaccttcagagaggtcatcaaatcatggaaataaattgattttagagaaggcaggtctctcaccgaaggagccgcaggaagtcattttggaaatcaaaagtgccatttaataaacttaaagcactttgctgttggatctctgtgcggtacttgtcccgaaacagccgatgcacgtcatctatcaatttgtctacatatgtcagtgtcaggatcttctgaaaaccaacctgtttaggggaagaaacagccaacagatctgcttacatactagcctagaatggagggacgccaactcaaccctggctttcagagataggttcagctacctggccggtttccctgtcctgagaggcagccaagctccctgcctgggcccagtagctgctgttttcccccatctacctttctagttttttcagttacgtcatcatatacactggctgcaattaatcagagttctcttaaaaatcagggctatgttaacaatgcaatcgtccctctacaacaccccacttaccacaaacaccagctcaaactggttgtccagtttatacttgagtgtgagtgcctcatgggtgaaggagttgttacctccccgttcctggagaaagagtatgtctcagtgttcagactatccccagaaaacccaggtttgggccctgggtttggataacctttgggaaagagccaaacatttcccccaaactcaaatctgtccccaggacaagaggatgttggggcacttctctctggcattccaccagaaataagataaccaagttgggggaaaaagatgagagagagagcaagacacatgggagccaaaagggaagtagtcatgtaaacaatcagattactagcagctatacaccatttagttttgtaaaggtgttttcccatctgttatttcacctaggctcgaaacaacaaaaccaagctgctggggataaatagagggagcggaggagaatcccaaaggcgccggaattcggctagagttgagacaccagaggcgggggccgtcattaagttgcggggtagtctgaaggggacgagaaaacgaagcggagtccgggttacgcgtgagtggtcagtgtgaggtgggcggggagggtgggaggaggcgcggaatagagtcgaaggggaccatggatcgggtcaggaaagaagagcctggagttctgatcccacggggacggtacctgcagcagcacggaacgaatcaacgcgttaacgggtccggtgcatgagtcgctaacgccctggaagcaccagagcacaagcccgcccttggagaaaatggtgaagaagtcgagcatggcggcagcggcagaggagctggggccggcgccgggaattcaggccgcgttcgccgccgcttcctgctgcgccaagcgcgggacacgtcacaccagtggccccggaaatcggctcaaccgtacttccgctcagaacgccgggtgccctccccatctccgcccgggggcgcgcaggactgacgtatcgcaaggccagccaatggcgggtgggagcgggcctgggtggggctccaggagaggtcacggggagacggccacctagagcattgggcggggcagagccctgagggccgctggccaattggcgcgctcgtctgaatggcgtttggcgcggagcagtgacggctgcgataatagcgaggcagcagtgcagctttcagagggtccgggctcagaggggttatgattcggagggttctgccgcacggcatgggccggggcctcttgacccggaggccaggcacgcgcagaggaggcttttctctgggtaaagttgaggacgacagagggtattgtggttctgggttgtccccaacctccgactgtgtgtccttcaggacccgaaaccatggcccacactggcaggacagtgggtcggcttggggaagggggttagcttacctaccagagcttgtaggggctgtgcaggtgtatggctcccaaggcggcccttttcaggtggcaggtctcacatcattctccatttaagcttacagtcagactgattgataatcggtggcacagatgtgcattaagtcctgcccgtgttcaggatgctgtacttagtgctgttgcggtaaaggagtgaagagaagacgggattcagtgaatgttctggaaaatggctagagtgtacctagagagggaaaatttcaatagacagtaggccagttcaagactggatagaggccgggcgcggggcctgtaatcctagcactttgggaggtcgaggcgggtggatcacctgagctcaagagttcgagagcaacctgaccaacatggtgaaacaccgtctctactaaaaatacaaaaattagctaggtgtggtggtgggctcctgtaatcccaggtactcgggaggctgaggcaggagaatcgcttgaacccggaaggcgaaggttgcaatgagccgagatcatgccattgcactccagcctgggcgacttagcgaaactccgtctcaaaaaaaaaaaaaaaaaaaaaaagattagctagaactcaacttaatgctttgcactgctagctagtataacggtagaagtacatggagcaggtgggaactgagatcagccttggaggatgtttactggcttaagaaaggtgtgtgttccagtctctaaataactgagtgcagactaggagaaaaatattgttcttatgcaaggaactggcaaaa

SEQ ID NO: 5652 - DNA, 6000 bp, Homo sapiens
aatgtatgtcctctcattacaacagatgttcttagatgggaatctagagatacttaaatagttgcatacttcagtgtttctaaagacttaaggagcttgataaaaatgtaaattccagggccaagcagcagcggctcacgcctgtaatcccagcacttttggaggccgaggagggcggatcacctgaggtcaggagtttaagaccagcctgaccaacatggagacaccccatctctactaaaaatacaaaattagcggggcgtggtggcgcatgcctgtaatcccacctactcgggacgctgaggcagaagaatcgcctgaacctgggaggcagaggttgtggtgagccaagatcacgccactgcactccagcctgggcaacaagggtgaaactccatctcaaaaaaaaaaaaaaggaaattccagggtcccaccccaagagattctgatttggtagctctggtctgggtcctagtttgagaaaacgcctccaaaaggatctacagatggttattaagaagctcatgaacccctccaattgtaggcaaatttgcatgtgggggtgtgggtgcagcatatgcctgggcatgcatatacgttttttttttttttttttttttgagacggagtcttgctctgtcgcccaggctggagtgcagtggcacgatctcggctcactgcaagctccgcttcccaggttcacgccatttctcctgcctcagcctctcaagtagctgggacaacaggcgcctgccaccacgcccggctaatttttttatttttagtagagacagggtttcacggtgttagccaggatagtctcaatctcctgaccttgtgatccgcctgcctcggcctcccaaagtgctgggattacaggtgtgagccaccgcgcccggccgtatatatgtttttatggcaggaagggccataagatccatttcctaaaagtttaagaagctctgctttagaaactatagctctggaccagggacttaagggaaaaaatgactttaaaccattgattataacgcccttctctgcatctgttgataggtcctacaaccactgttaagaaaagagaactaggccgggcgcagtggctcatgcttgtaatcccagcactttgggaggccaagggggtggatcacgaggtcaggagttcgagatcagcctggccaacatagtgaaaccccatctctactaaaaatacaaaaaaaaattagccaggtgtggtggcaggcacctgtaatcccagttacttgggaggctgaggcaaggcaggagaatggcttgaatctggaggcagaggttgcagtgagctgagattgcgccactgcactccagcccaggcaacagcacgagactctgtctcaaaaagaaaaaaaaaaaaaagaagaagaagaagagaccttggtggggcacagtggctcacgtctgtaatcccagcactttgggaggccaaggcggatggatcacctgcattcaggagttcaagaccagcctagccaacatggtgaaaccccatctccccagcactttgggaggccaaggcaggtggatcacaaggtcaggagattgagaccatcctggctaacaaggtgaaaccccatctctactaaaaaaaaaaaaaaaaaaaaaaaaaaattagctgggtatggtggcaggtgcctgtagtaccagctactcaggaggctgaggcaggagaatggcgtgagcccaggaggcggagcttgcagtgagccgacatggcaccactgcactccagcctgggcgacagagcaagactccatctcaaaaacaaaaacaataacaaaacaaaaaaaaacccatctctactaaaaatacaaaaattagccagatgtggtggcacacacctgtaatcccagctacttgggaggctgaggcacgagaattgcttgaacctgggaggttgcagtgagcagacactgcaccactgcactccagcctgggcaacagagagagactccacctcaaaaaagagagaatttggcacttggcagggtttgtaaaatgagaaggaacctaaggggccagtcaagacgcaagactctctgggaagcaagtttatgcgcctactcatcttatgtttccataatctctattgtgtagccgactttcagggactgagaggcagtaatgtaaaaagcaaactgctgctttcctaatagctcctctactgaaagccaggttggttctgcactaaagggttgagttggctcaaaattctacattggccctgagagaggggtgatccaaccaaaatagaattgatcctcataatgatagaagtggatatttttcctttttttttttttttttttaaccagaattcagtaatcagaggtagaactagaaccctagccctggcaacccaaatctagccttgggctgtgaaagttgagaggccctggaagcacacctggctccagttttccttatctgtaaatgaggggattgaactgaatgaactccaagggccttacaattcccataggagtcctctattttgatagaaggcccctctcacctgtagtagaaatgcacagggctgaggtggctgactgtcggcatataggaatagtagaaggagccatagaggaagacagacacccagagcaaaaggaggatggtgcagaagagcaccccaaactgcagcagcagcctgcgggcacggcctgccaagacttggcccacctcctgggcccacagtaaggcaggtactggagggtcgttgaccatggccgggagagcagggtgtctggccccaggttcaggccttgcgttcctagctgctctgccacctggacgccacccctggccatgggatgcagcagctggtggttcctggaaagagagggtgagggaaaagagtgactcctttccccagggaggtggggacaaaacagcttactggactggctttgaggaacgagagatagcaggatagcaaagtcattgtttcatatatatggcctttctccaaatgattgtgccactctgccaattaccccttccctttcctccactgtgttccctcccgcccagtgctaaatctcctcagtggaattccttctccagtcatttgatgctgggacaaaccaccttgattctcattcacagctatataacaaagaataagcaccttacgattcttagaaagagctttacacacacggtgatactgaatccacactgctaggcagctgcacggagagaatgtgcgacttgcctaaggtcgcacggcctgactcgaaaccagtagccttagagtagccacaattgcttcccgagtttctcctctccgcctcgagcagagctcgctcaccgacacggctacaccccacgcccggcggagcgccctgcagccaaccgccgcttcccgccagtcccctccagctcgggggtgggcaaagcgcccggagcccctacctaatcgtgcaaccatggaaaccagcccgccggctgccacagggctgccgactcaccagcctcgcgcgctgccagggcaaccgtgagacgggacttccggctcccggggaagtcccgcccctctccgccggccgcttttgtagccgtgggaggcggggcttcagcccagggcggggtccagcacggcggggcggggcgggacggggcggagccttcccgagctgcgaggtcgctgtctccttgcgctcgccactggctctctctgcggcaggtttccctccggttaccgtgaccaaaggggaaagacgcctgcctccctgcaggccccaagatgtgccccaggggatgcgctgactgcagcctccgctcggctctcccttgagactgcaatcacagccctccgtgcacaccttcaccacaggccatttcacccgcgaagcggccgagtgaggcggtcatccagctggcgctgatttttatcgcccacagctcctaggacctgtaggcatctaaggcgggggcattcgcctagagcatgttgcagtttgcggcaacctgggcctcttgcgttgttgcgcaggcagattagtgccctgttcccagcgtggtagcattgtggacctcctctgaccctaactggatacactctccctcagagtccccacagcacattatctagactagcttttggcagtcttctattttgtagacgtctaatcaccccagataaagtccttcagaggcaaggccagtgttgtgtacatctttgcacactgctgcgggcgtgggaagtaatctattcaaaatgaatgaaattcttaaaaccaatccatccccccgcccccttcacgccagcccacctatttccagtatatttctgctgactgtccccacaagggcccctacctcctctttgtccggtcctttgatctggtctccgcacacctctttttccccagcttcctccttttggtctaccttttctgtagacatcttcctgacgagcctctgttgactctggatcttccactgagtcacttgtggctaaaacgtgaagtggcgatccagacgctgatacctgtggcgcatcacattttcctggatatggaaaatggagggtccctgggagagaaacgaagattcaggtgctaagtgctgtgtcagagtagagggaggaaaggaggaggggggcgactgcccagctgatgtcagattttcaaatgagcagggtcccccgcagccagtacagactccactgcaggggccgtcataggcccagaccacgccatttgagagggggagtcggccttggcctcagctctgttggggaggtctctagcccagagtcaggatgcctgcaatgggggaggggcaggcagtgaactagcgacagtgggggtgtgcgcagggatgcaggcagctaggctcccccactggccaggcagttggtatgctccaggatctgagcagctccttctagcatccttcatccttcaggtaccagccatccagacagtgcttgagctgcagaaactgagaccagacctctggcctggccctccccaggggcctcctttcgtatagtcactgcttctgcatcagatactttcagctgcaactccctactgggtggggcacccatttcaggcagaaggttttggtaccctccactgaccctacacccagggctgctactgccgcttgtggcttcaggtaagtaatggcctgtttttctcctgttggggctcactggagcagacaggggtgatgtgccctcctcatcagggttggttgaggtcttcagagctgggaacacacatggtttgaagggctgaaaagccttaaatcatttgtgtaaggtttaatgatctgtggcccaggccatgagggagtttggggagcacctcatcccaccctatttttttccatgaggaatacagggatgagacagtccactggaggaggaggaggaggataggaggggaacaaaatattggggtatgaccacagccttgtaaaggttggtgtggagtgagcatggaggggggcctccagctgagactgtgctctgagaggtccctcttttttccaggatgaaaggtgagaccccggtgaacagcactatgagtattgggcaagcacgcaagatggtggaacagcttaagattgaagccagcttgtgtcggataaaggtaggtgggaccctggctggctcccattagttggccaggctgtgctgtgctgcaggttcccaaagctcaagataagagatgcgttctttccttcactccctgaggtcaggggaggagtctggggctctgtagagagagctgtccccaggcctctgggggggatgagggagaagacaagtcgtaaggagccctggagatggcaaaagagaacccatttggggagggaggctgcagtccccttcagaggtcctggctaacaatacccttcctggctgtgtcccaggtgtccaaggcagcagcagacctgatgacttactgtgatgcccacgcctgtgaggatcccctcatcacccct

SEQ ID NO: 5653 - DNA, 6000 bp, Homo sapiens
taattactgctagggggaaagcccactcattcaacagaagtttgatgggggttattttccagtgaatctggagaacgagacggtaaattaaatttacaacagcgccattgcttttttattttttatttttatttttattttttttttttgacagagcctcgctctgttacccaggctggagtgcagtggcacgctctcggctcactgcaacttccgcctcctgggttcgagcgatttttctgcttcagcctcccgagtagctgggactacacatgtgtgccaccaggcccagctaattttttttttttttttttcctagtagagacagggtttcaccatattggccaggctggtcttgaactcctgacctcgtgatctgcctgcctcagcctcccaaagtgctgggattacaggtgtgagcctccgctcccagccaccattgcattattagcactgaaatgatcctaacggcagtttctaataaatggtcagggtcttaaagctgagataccacaggctcatgacatccagtgttctgaaggagtagtagtattgatgtagatactgctctaattcctaccctctgtatgtgacacggattcagatacccgggtttacagttttgtaccctgaaggccacccttaattttggtagccatctattctttaggacatttaagttgctgttagagctaattaatcattttttaaagtggttaatcatagctcatgcctggtctctagttactgcttaaaccccattttcccacctagcgctgtagccacgcagttataatctgatgggtaggaacattgagtgtgcagaaaaattgaagagaggcgctttgttttgtttcgttttgttttgagacggagtttcgctcttgttgcccaggctggagtgcagtggcacaatctcggctcaccgcaacctctgcctcccgggttcaagtgattctcctacctcagcctcccaagtagctgggattacaggtacccgccaccacaccggctaatttttgtatttttagtagagacagttttcaccgggttggccaggctggtctcgaactcctgacctcagatgatccgcccgcctcggcctcccaaagtgctgggattacaggcatgagccaccacgcccggccggccaaaaagaggctttcttaaaaatcaaggttacatttattaaacactctaattttttttttttttatttaaccatgtctgagctgttgtggaaaatttcacttactcccctggaacttgcccaacaccgtgatacagtgggggtgagggaggcaaggtgcttggtccctgccatgccacatttgccatttaagcatgtacagtacaatctattcattgggtatttgggtgcctgatatgtgccattatcaggatacagggattaaaacggacctgacctgattgatccttcctggaattttcaccgtgccaagaaggaactgaggctcctccgcaacagaatgggggtagggtcccactccaggagggcaaacttctcccgtttcttcatctctaggatgagggaattaattagaagatctccaggacttcttagagctcagaagttccatcaacagtaaaaagttgcttgggacaccttaaggtgacccaagttcactgggtgtccctggaattcatgaagatatccttaggaggctaagttcagttgctggtgataacaacctttcttcctttggtttcctttatccactttgctgtcttctgtgcaaagatacctggaagctggaggtaatgagctgtccctactatttcaaagcagcctcccttcccgaagtatatccaggcacaaaacaggagccagcctaggcttttcctggggaggatgcgtccctgagtttaggggacctctagcaggagcacacgtactgggattgttacgttctttgtcttgtccctggtcccatctcgcctctgtgcacccttggaaggaaaagattctaggaggcattctggtgttcgtaaacctccgccatgtttgagtcctggagatgaccatgacatgttaagccttaagtttggtccctgcccagacagcatgctggacttttgcaaggcacattaggggtgcggccactgctttctggctgctgtggctgaatcggcctgaggggaaaatgaaagcaaaaacaagccccagttctactaggaaacccaaactgagcaacttcaggcttatccagctcctgggaagaccaggaagcaactgaggagcggtgcaccgagacggacagggtcgggggttaaccccctgccgctaatatttccgctccaaagggagcctctcctttcttggcaaaatgtagaaacctagattccctcgcaagatccacgcgaccagcgtcggccacgctgtacttcctggggtccccttgtttagtgattcttcgttatggccgcccgtgtgccttcgactcaatcgggaggacaccgaaatccagatttcggggttgcagggcgcgggccccggcttggttagggcaggggcagccattttgagaccagaagagggcggaagggaccatattgagaacgccggttgcctgggggccgccattttaagagaagccctgtacggtaaactccgtgacgtgggggctgccatgttggtacggccatcttggaatgggagtggctgtgggcgcagccatcttaggtataaaatcggctccagtcgcggtaactgaagccaagctccgcccctaccctcctaagagttcctctgctgtacgactgcactcccgcaccctcccctaaatcccccctcttcggcctgtttaccttttaacttggcttcgttgcacgtttgtgtgtgtgtgtttgctcttcgcagcctcttgagcgtcttttgtacttaattcttacactgtggacgctctctcgcgcccgccatcccccgacccctctgatctccgatccttgacgatgtctagcctgcattgattggcccttttccctgggtatggcagatctattgcttgatgatcctctccccccaagaattctaacacaggagctgtcctgaggctctggatgactttattcttcaaatggctttaccctcccagtagctccaggtgagactgagagcaagaacctggcccatccctctccattgtctgagcaggtcaccgagggaagcgggcaggacgcgctggcagagtctgacggggccctgctgtgggtggagcaaagggtgcctcatatctctggggtgcttggggtcggccacaaaggtggtaggaaatggggtcgacagataggtgagggtgggccttgtgcttcagataacctcacatggtcaggcaagggttagggatgggatgcaaggagcctaaggggctcacaacaattactgacctaaggaagggcccaggagagggaaaagggaggagttgtgagaagggacaggggagctcagaggagagcacagaagaacttcttctcccggaaggggttctccgaagtgggcacaggggtgatgaggggatcctcacaggcgtgggcatcacagtaagtcatcaggtctgctgctgccttggacacctgggacacagccaggaagggtattgttagccaggacctctgaaggggactgcagcctccctccccaaatgggttctcttttgccatctccagggctccttacgacttgtcttctccctcatcccccccagaggcctggggacagctctctctacagagccccagactcctcccctgacctcagggagtgaaggaaagaacgcatctcttatcttgagctttgggaacctgcagcacagcacagcctggccaactaatgggagccagccagggtcccacctacctttatccgacacaagctggcttcaatcttaagctgttccaccatcttgcgtgcttgcccaatactcatagtgctgttcaccggggtctcacctttcatcctggaaaaaagagggacctctcagagcacagtctcagctggaggcccccctccatgctcactccacaccaacctttacaaggctgtggtcataccccaatattttgttcccctcctatcctcctcctcctcctccagtggactgtctcatccctgtattcctcatggaaaaaaatagggtgggatgaggtgctccccaaactccctcatggcctgggccacagatcattaaaccttacacaaatgatttaaggcttttcagcccttcaaaccatgtgtgttcccagctctgaagacctcaaccaaccctgatgaggagggcacatcacccctgtctgctccagtgagccccaacaggagaaaaacaggccattacttacctgaagccacaagcggcagtagcagccctgggtgtagggtcagtggagggtaccaaaaccttctgcctgaaatgggtgccccacccagtagggagttgcagctgaaagtatctgatgcagaagcagtgactatacgaaaggaggcccctggggagggccaggccagaggtctggtctcagtttctgcagctcaagcactgtctggatggctggtacctgaaggatgaaggatgctagaaggagctgctcagatcctggagcataccaactgcctggccagtgggggagcctagctgcctgcatccctgcgcacacccccactgtcgctagttcactgcctgcccctcccccattgcaggcatcctgactctgggctagagacctccccaacagagctgaggccaaggccgactccccctctcaaatggcgtggtctgggcctatgacggcccctgcagtggagtctgtactggctgcgggggaccctgctcatttgaaaatctgacatcagctgggcagtcgcccccctcctcctttcctccctctactctgacacagcacttagcacctgaatcttcgtttctctcccagggaccctccattttccatatccaggaaaatgtgatgcgccacaggtatcagcgtctggatcgccacttcacgttttagccacaagtgactcagtggaagatccagagtcaacagaggctcgtcaggaagatgtctacagaaaaggtagaccaaaaggaggaagctggggaaaaagaggtgtgcggagaccagatcaaaggaccggacaaagaggaggtaggggcccttgtggggacagtcagcagaaatatactggaaataggtgggctggcgtgaagggggcggggggatggattggttttaagaatttcattcattttgaatagattacttcccacgcccgcagcagtgtgcaaagatgtacacaacactggccttgcctctgaaggactttatctggggtgattagacgtctacaaaatagaagactgccaaaagctagtctagataatgtgctgtggggactctgagggagagtgtatccagttagggtcagaggaggtccacaatgctaccacgctgggaacagggcactaatctgcctgcgcaacaacgcaagaggcccaggttgccgcaaactgcaacatgctctaggcgaatgcccccgccttagatgcctacaggtcctaggagctgtgggcgataaaaatcagcgccagctggatgaccgcctcactcggccgcttcgcgggtgaaatggcctgtggtgaaggtgtgcacggagggctgtgattgcagtctcaagggagagccgagcggaggctgcagtcagcgcatcccctggggcacatcttggggcctgcagggaggcaggcgtctttcccctttggtcacggtaaccggagggaaacctgccgcagagagagccagtggcgagcgcaaggagacagcgacctcgcagctcgggaaggctccgccccgtcccgccccgccccgccgtgctggaccccgccctgggctgaagccccgcctcccacggctacaaaagcggccggcggagaggggcgggacttccccgggagccggaagtcccgtctcacggttgccctggca

SEQ ID NO: 5654 - DNA, 6000 bp, Homo sapiens
agacttacttggtcaattccaacacatacttttttttttttttttgtagagatggggtttcaccatgttgcccaggctggtcttgaactcctgagctcaagtgatccctccacctcagcctcccaaagtgctgggattacaggtgtgagccactgtgctggactccaacacatacgtcttaaaaggagataattatctcctttggaagaatttaagggtttttttttcccttaaatgtactgaaagcacatctctatcactgagagctgactgaaatttgaatctgaaacccatgaacctgaatgcctcccaaaggaaataataccagatcaagcaaaggtactcacggatcaaactcatggataacactttcaaatctcaggacagcaaacagacgagtggagaaggctgcaaaaaccagagagttaatattttattggtaatgtgccatgaaagaacagcagatatagtattataatgaagacagtattatccagtagagaggtcacagaaaatataaaataatccctgaataaagtctttatccatctttccccacataaaggaaacaagagaagtttactttcccctgacaatggcatctacattttccactttcataggtcacagttaactaattataaaagcctataacattacattcacctactaataccaaactcaacttacatggtcatcttttatatacgctgactcccccaccatacacacataactaaccttaaccttggagcaaagtaataggtatggcaagcaaaattacacctaggactcatgaagagccagaaaatctaaaatacagagtaaactctcaagagactttcaaaaatactataggagacatctaaattgaagataattgtcttttacaaaaatcagttatccaagggtccccaatatcactttcaaccctatgagaaaacagaattggcacagcatgcttcccattctttcaaagatgatcacagccctcttttttttgagacagagtcttgctctgttgcccaggctagagtgcagtggtgcaatctcggcttactgcaacctctgcctcccaggttcgagcgattctcgtgcctcagcctcccaagtagctgggaatacaggcatccaccaccacactcaactagtttttgtatttttagtagagacagggtttcatcatgttggccaggctggtctcaaactcccagcctcaagtgatccacccaccccagcctcccaaagtgctgggattacaggcgtgaaccactgcatgtggcccatagccctgacttttatattccttttattttgccttcataaaattatactaatgaggaatggaaaaatgtaacaatctgctaaaaagaacaaggcattttaagatagcgattttcaatttttttctagactttcttctttctatccccaaagaaagagaggttcacatgcacactcacataatacagcagccattgacagaatgagaagcttcaaaagtgtgtcctgcttctcataggacaatcgcaaaaatccaaacttagtcatcttgacatgaatgggtggcaacacacgacgatcagctaaaatgaaaaagtcaagaccacaagatattgaacaccttcaatttacttaattttcatattttatgatgagagggaatcataaaggacgtaggagctagcaaaaacaccagacagggtcaaggctaatactagtatccaagcctggcctaaagtatgatcaacttgcaaggaagtaggcacaagtcaggtctatgtgtcaagactaaaatggagtggtcagaataaaccatccataattctatttcccactccttcacagctaacaagtacataagcacaattagcaatagtatagcacaaggaagagatgaaaaaataaacaggaaagattggaaatactgaaaaataataaaatggagaaagagagcactcaagaaaaggcaggactatatggggtggcaggggcggagggggggaagcaggaaataaacattgagaccagaagtgcaagccccagcaatttcagaggctaaggagggaggatcgcttgaagccaggagttcaagaccaatctgagcaatacagcaaaaccccatctccacaaaaaactgtttaaaattatgcaggcttggtggtctgcacctgcagtcccagctactcaggaggctgaggcaggagttggaggctgcagtgagctaggatcacaccactgcactccagcctggacaatagagccagacctcctctctttaaaaaggaaaaaaaaaaaaaaagaagaagtgaaaggcattaagaggaaaaatagaagtcacgactgaatcaacacaatttcgagccctaaatttaaacttcaactgaatggctataaacttttttcttttccaaatcccaatggggctgtcgggtcaactaacagcatacctgataactaatgcaggtacaatcatgcactcaaaaagaggtggaggtacccaaacacagatccactgtgttctcatcccatatatcagactgtaacgactgctcagatctatacccgcttccaatcatctgtctcaaggcttctctgtaactgacaatgctgatttaagagactgattaaattacacagacagtttgatggcatcagatgataatctagagggaaagaaaacgaatttttcctactgaagcagaagagtcgggggattaaaaaaagtagattaaaatgttgagggacactatctgtaggcagttcaaaatggaaatcacatgacagatatgaattatttatatagcaatatagcactaatctaccataggttagttattcttgtataagacagtactactatcttttttttttttttttttttgagacggagtcttgctctgtcgccaggctagagtgcagtggtgccatctcggctcactgcaacctccatccacctcctgggttcaagcgattcttctgcctcagcctcatgagaagctgggactacaggtgtgcgccaccacgcccagctaatttttgtatttttagtagagacggggtttcaccatgttggccagggtggtctggatctcttgacctcatgatctgcccacctcagcctcccaaagtgctgggattacaggcgtgagctaccacgcccagacctacttttttaaattacaaggtgatcaagagctaagttataacgactataacaaaggatatgcaacaccattcaagatgttttgcttttattctttttgactgacacataattgtacatatttatggagtacagtgtgacattttggtacatgtatataatgtgtaatgatcaagtcgggaaataattagtagattcatcaccttattttttttgtcttaggaatattcaaaatccactcttctagctatctgaaaatatacaacaaattgtgtatttttgttgttaattatactcctaataatagttatcctatagaacactagaatttattcctatctagttgtacttgtgtatcccttaacaaacgtttgtctatcctcctccatgaatcttttttcccactattattggaataaaggagaaaaacaaaacaacaacaacactggactaggtggaaggcatatagaatgctagccccaacactgagaagtcaagcatgttctccataattaactgtcccagaagagcagtttagaaatgtgtttaagtatagtcccaaagggaaagcttactttgcaactaaaaataaaggcctaactactccaggaggtcaacaatccagccatatctctcagggtttgcagctgttttctggaatgcctgaaataggaacaaacttaacaccactgcgttgatacgagccacacaccaaaatgagactgctaggatctctacttgaaaacttgagtaaacgagctagtcattgagggcagggccgtaagggagatttcatctcgtgctctttggtcactttcgcacaccgccaagcaaataagagcaaagacacctttcttaaaacacttaccaacctgctctcctcaactgtgccctgcaagctgtggcatctcctgccaccctgcctctagtttcccagactgcaatttccccagccccgttttcctacacacgtttccacaccctctcacgatcttttactctcttctcccttccggtcgttccagcgggtcccacctccctcttcttcccaccctcaaagaactgaccacctctgatacccctcagcgcgggacactcatcaccccagcatcctacgcgccttcccctccataactagtcccaggacccagtctttcccacgctctgttctcaagacccaccttaccctccctccctagaccttcgcatccttccatccaggaagcccccacaccacgccccacgccccctcctctgcaaggccctaagctctgctctccacccccatttagagttttgcctcctgcacttcgttcagccccatcaacgccatggactgcacctgccgctgattttcaagttacgttctacggccttctcacctggccggctttcctaaacgatccgcggggctccctcagccatccgttcagcggcgcacccaaccctggcaggagccgggtccgcctcccggaccgctcccccgttggctggctccaggccaataggacgcttctggagagcgatagggtctcggaactgtctgtcaaatccggaggcgtaaaccgggccgcgattcaagtttttaattggtcattacagctatcacttagcagtctagaggcaggtctgtatgctcccgccgagctgtcataggccggcgcgtaggagtcaagagcgcggaaagaacgtgccccaagcagtttggttgagggccgaggagtgacgtgtcggtttgcggacccacggggagtcgcagtgggaaggcgcggcccactgactcccgtcatgtgacaagaagcggaaactacgctgaaataggcccttgctccaagtcccagtaactcggaatgcggagccgctcgtctcccgtcttttttaaggtagaaattgttacctaatacaaggtgaaaggagaggagggaagcattttctacctatttattctcaattaaaactcaaacgcggactggtccagacagttcgtcttttgcaggatgtgcctgatagttgactcgagcttttactgtgccttggtaactgcgatggacctgggaaccttgacagagttcacagcccctggttttgtgaaagagcgtgcctaggcctaaaggggttgtcggggctaagctggaagcatttctactgccagctgagacagccaccgccgcggaggcacagccctccccagcagcaagcgggcttcctcgggagaccgggaggcagcccggccatgcttagtcagttcagccctttgttaaaataccggccagagagccgctctccctatcctaacttgcctctcttctctcgcaccccacgcgctccccgacccccaataagtttgctgagggcagagaaggggacgaagtttgagcagcaattccatcatctcagactcgcacgtgtacacctttatcctcaggcacttccactccctgcgcgcctcggtgagccaaggctacaccagagagagtgggaacgtctcgcagctcttcgaacttgttgcctctaccactcacgcagtttcctattctcccatgaacggaacccaccacttattgaaaggtcattatttaaatcactgcttcagaatcacatgcatttttttcaaaatccacatgaccaggctcgccccaggacgttatgattcaatagatctgcttttttttggttttgtttttagtagtaagtgttcgatgtaattttactttaacaaaaggaaactgaagctgagcctgaaggaattacagaacttggagtaaatgcttcttcaaaatacgagttttggtcgggcgcggtggctcacccctgtaatcccagcactttgggag

SEQ ID NO: 5655 - DNA, 6000 bp, Homo sapiens; identical to SEQ ID NO: 562

SEQ ID NO: 5656 - DNA, 6000 bp, Homo sapiens
ttttgagacagagtctcactctgccacccaggctggagtgcagtggtgcaatctcggctcactgcaacctctgcctcctgggttcaagtgattctcccgcctcagcctcctgagtagctgggattacaggctcgcgccaccacacctggctaatttttgtgtttttagtagagacagggtttcaccatgtgggtcaggctggtctcgaactcctgacctcgtgatccacctgccttgggctcccaaagtgctgggattacaggcgtgagccaccacacctggcctttttttgtatttttagtagagatgggtttttgccatgttgggtcaggctgatctcgaactcctggcctcaagtgatccacctgccttggcctcccaaagtgttgggattactggcgtgagccactgcgcctacttgctttttttttttttctcgaggtagagtttcactctgtcacccaggctggagtgcagtggcgtgatctcagctcactgcaagctccgcctcccgggttcacgccattgtcctgcctcaccctcccgagtagctggaactaaggcgccagccaccatgcccagctaattttttgtacttttagtacagatggggtttcaccgtgttaggatggtctcgatctcctgacctcgtgatgcgcctgcctcggcctcccaaagtgttgggattaaaggcgtaagccaccgcacccggccacctacttgctttcttagtcatgtgtctcatttatgtgtcctagctgggacccctggaggccctgcactggcccacaggccaggtcctcaggtcctctgaggggagaagagacattccaatggttatcccccgccttcagttcctggcctgtaatttacctcctccaaagagcctccctgacagacatatcttgccataaacacccagcatgtttccctacctgcctctctttttttttttttttttttttttttgagatgggtgcagtggcgtgatcttggctcactgtaacctctgctgcccaggttcaagcgattcttctgcttcagcctcccgagtagctgggattacaggtgcctgccaccgcgcctggctaatttttttgtatttttagtagagacggggttttaccatcttggtcagtctggtcttaaactcctgacctcgtgatctccccaacctcggcctcccaaagtgctgggattacaggcgtgagccactgcgcccagccccccacctgcttctcactctgtcattgcactctgagtgtttgctcaggggagtggttctaagtctttatcggtctgggtagaggagtggagttggcaggagttgggagatggcacagagcacagttcaaatagaccatagtaggcgggcctctgaataataacccatagtgcacttgcagcctacaaagcactttcttttttcttttgttattattattattatttgagacagagtctcgctctgccacccaggctggagtgcagtggcacaatctcggctcactgcaacctccacccactgggttaaagcagttctcctgcttcagcctcctgagtggctgggactacaggcgtgaaccaccacacctaactaatttttgtatttttagtagagacggagtttcaccagagtttgaggccaggctggtctcgaacttctgacctcaggtgatccacctgccttggcctcccaaagtgctgggattactggcgtgagccaccacgtctggccttcttttattaattttttaaattaatagagatggggttttgcaatgttgcctaggctggtctcgaactcctgaactcaagcaatccacctgcctcagcctcccaaagtgctgggattacaggcgtgaggaatcacgcccagccacaaagcactttcacattttttaattttatgtgatgttcacacagccactgggagtcagggctaggattatcccctcataaaggtgaggacacaggctaagagagtcgaaggctggctagacaaggggagagacacagagctccgctgatcatcactggactctggattccaccaaacctttggaaccttccagcctcaggcctccacagcttcacagaaactgggcaagtcttaactctctaagcttctgtcttctcacctaagcatgtttggtactcacctcccagggtggttaggaggataataagggaatgtctcggcctacacgtaagtgcaccatcaatggtacctaaaaacgtcaacagttccagacactgtctccagagaaggctctgtgggggatgcggacatgtagcggccaagttcttgttctccaggggctctgcaggtcccttgcagaggaggcattcaatcctgccggctgtggcaggacactttcctatccaagggattggcttcctccgatgtagaacagacactatgaaatagctaccaacccaggggttgccaggaggccccatgaaggtcttgcactaataatacttcttgctttttttttttttcttttgagaaaaaaagcctgtcgcccaggctggagtgcagtggcgtgatctcggctcactgcgacctctccctcctgggttcaaacgattcttctgcctcagcctcccgagtaactgggactataggcacgtgccactatgcccagctaatttttgtgttttgagtagagacagggtttcaccatgttggccaggatggtctcgatctcctgaccttgtgatgtaactagtatttcttatgcccttattttgtgctaggcacagggcctcacccattattggcactcggtaaggattcgtgggattaatgagaagttaacctaaatcttcaccaaaggcccctgagcttcccctcgattcacatacaagggactggggctctgagaggtgggctgtgatgcgcccctggaagacccacgagtgggcctgcagagctgatggggagggttcaggcagggccaggggcttagaggagctgagattaacgtcgcccccctacccactgaccctctgcaggcgctggggctgtggagatccggagtcgccacagctcctaccccgcggggacggaggacgacgaagggatgggggaggagcccagcccctttcggggccgctcgcgctcggcgccccccaacctctgggcagcacagcgctatggccgcgagctccggaggatgagtgacgagtttgtggactcctttaaggtgagcgccagtccccagcgtgccaggacctgaagtaccaggccgccccccgccggtctgtccctgccttgtcccaaggcacgcccggatctggagtcccacgacccctccccaaagccgtcctgttccttcctagctccagagcattctgggatttgtagtcacaagacttccccgcccccactccccagctcttcccccgcctggtgtgtgtgtgtgtgtgtgtgtgtgagtcacagggcatgctgggatctgtagtctagatcccactccaggcgtgtgtgtgtgtgtgtgtgtgtgtgtgtgtgtgtgtgtgagagtcacagggcatgctgggatctgtagtctagatcccactccaggcgtgtgtgtgtgtgtgtgtgtgtgtgtgtgtgtgtgtgtgtgagtcacagggcatgctgggatctgtagtctagatcccactccaggtgtgtgtgtgtgtgtgtgtgtgtgtgagagagtcacagggcatgctgggatctgtagtctagatcccactccaggtgtgtgtgtgtgtgtgtgtgtgtgtgtcagtcacagggcatgctgggatctgtagtctagatcccactccaggcgtgtgtgtgtgtgtgtgtgtgtgtgtgtgtgtgtgtgtcacagggcatgctgggatctgtagtctagatcccactccaggcgtgtgtgtgtgtgtgtgtgtgtgtgtgtgtgtctcacagggcatgctgggatctgtagtctagatcccactccaggccaaagctcctgggttccccgaattcttggaagaccaggcatgctggtatttgtgctccttgctggcacctgtgcgctctgtcgcccaggctggagtgcagtggtgcgatcacggctcactgcagcctggaactcctggcctcaaaggatcctcccgcttcaacctcccaaagtgctgggattacaggcgctcaccatcgctcccggccctttgattctcgaattgcggtctcatcttctgggtgctaggtctccagctctggcctttccatttagggccctaggcatcctctcttcccgtctccggcacggagttcctgggatctaaccagttcccattcctgggggcccatgcgtcctcgcgagcgtccctgaccgcccggcgtggagcctcctgggagttgtggccttcattatctcccccccgatctcacttagaggaaggctcacggaagtggagagcctggctcgagctgccatggtaatctaactcatgtaacccttttctccctccaccagaagggacttcctcgcccgaagagcgcgggcacagcaacgcagatgcggcaaagctccagctggacgcgagtcttccagtcctggtgggatcggaacttgggcaggggaagctccgccccctcccagtgaccttcgctccacatcccgaaactccacccgttcccactgccctgggcagccatcttgaatatgggcggaagtacttccctcaggcctatgcaaaaagaggatccgtgctgtctcctttggagggagggctgacccagattcccttccggtgcgtgtgaagccacggaaggcttggtcccatcggaagttttgggttttccgcccacagccgccggaagtggctccgtggccccgccctcaggctccgggctttcccccaggcgcctgcgctaagtcgcgagccaggtttaaccgttgcgtcaccgggacccgagcccccgcgatgccctgggggccgtgctcactaccaaatgttaataaagcccgcgtctgtgccgccgaggcttttctgtgcgtcgactggggctccggcaggccggggtagtgctctcacggatactttcaaaagaggccgctgtcttacgagggaaacttaggctctgcctgacatccagcgacagagacggaaggggtcgcggcggctcgcgggcctgggctgcgcggcccaggtccaagtccccagcacgcgcattgggaccgcagcgctgccggcagcccgatcccgcgctctgcaaaccgtgccgcggccccccagagagggtcactcgctcctatttgggtcagccctttccagcagctactgtgtggccggcccggggccagcgccgcccgggtacctcgcggggcgggagggagcggctgagccaggctggcagcagcgcggtcgctggaaactgaggcttcatgcggggacccggacagagcgggggctccgttccagaaagatttattggcgccccctataacccgggccggttcttggtgccgggcacagagatgcattgcgccacggccctgctcgcggaagctcccgagggcccggaatcggcagggcagtcagagagggcttcagggaggaggcagctagagctgcgaccggaaggtgaggtgagggtcatcccccccggcgcaaggaggagtggacccatggaaggacaggggagcagcagaggccaggcttctaggggctggaatgtcacacccagaagttagacattcagctggtatttgaggacctgggaactgacttggagtgtgtccctcagtggacaccagctagagtcaggaaggtgggagttggctgctgaggagcctagatacggaatacactggagtgagcagaactgggggatagggcagcgtcccacagaagaagtgaggaagtctggggccattgcattgaccctgagggaggagggccctactccggagcctgtttccctggcctccccaccccatctgtttgcctgaggctgcagcaaaaacaaagcaaagaagatactca

SEQ ID NO: 5657 - DNA, 6000 bp, Homo sapiens; identical to SEQ ID NO: 1625

SEQ ID NO: 5658 - DNA, 6000 bp, Homo sapiens
ctctactaaaaatacaaaaaattagcccagcgtggtgatgtgcacctgtagtcccagcaactcaggaggctgaggcaggagaattgcttgaacctgggaggcggaggttggagtacgctgagatagcgccactgcactccgacttgggcgacagagcacgactccgtctcaaaaaaacaaacaaataaaaaggtttgactgtagtgtcaaagagcagttagaattatctgaaaaggccattaaaatactcctctcttttccaactatgtatctgtatgaggctagattttcttcacatacttcaaacaaaacaacataatatatgtcagaatgcaaagactggtacatttagaggtcttctttttatgatatggagtcttgctctgtcacccaggatgaagcacagtggtgcaatctgcgctcactgcaacctctgcctcctgggttcaagcgattctctgcctcagcctcccagtagctgggactacaggtgcgtgtcactgtgcccaactaatttttctatttttagtagattcagggtttcaccatattagccaggatggtctcaaactcctaaccttgtgatccacccgcttcagcctcccaaagtgctggattacaggtgtgagccaccacacccggccagctaccactatatttttaagaatttttctttccttactaaaaaaaactgcaagtatttcccattacactgaattaagtacaaattcctcaatgtggtaattatggctgggcatggtggctcacgcctgtaatcccagcactttgggaggccaaagcgggtggattgcttgaggtcacgagttccagatcagcctggccaacatggtgaaagcctgtctctactaaaaatacaaaattagctgggtgtggtggcacgcacctgtaatccagctactcgggaggctgaggcaagagaattgcttgaacccacgaggcggaggttgcggtgagccaagatcacatcattgcactccagccggggcaacaagagcgaaactctgtctcaaaaaataaataaataaataaatacatgtgaaatattttcactaaagtagtagtctcaatcaagggcaattctgacaatttcttcagacattcctgatcgttacaacctgcagaggatgtgttatgggtatctaatgggtagaggtaggaatgttgctaaatatcctacaatatacaacagagcccccacgataattatctggcccaaagtctcaaagttccaaagctgagaaacctttctctagagccatactgtgccaaatacttacggtcaatttcaaacaaaaagaatgcaccaagttctcaggaaatgtttacctaccttgcctctaatacatactgttttgttttgtttcttttctttttttcttgagtcagagtctcgctgtcgcccaggctggagtgcagtggcacaatcttggctcactgcaacctccgcctcccgagttcaagcaattctcctccctcagcctcccgagtagctggggcaatgggcgcatgctgccacgcccagctaatttttcatatttttttttaagtacagatggggtttcaccatgttgcccaggctggtctcaaactcctgagctcaggcaatccacccgcctcggcctcccaaagtgctaggattacaggcgtgaaccaccacaccacgcctttgttttaagacagggcctcacgcagtttcccaggctggaaagcagtggtgcaatcacagcactgcagtctcaatcttccaggctctgatgtttctttgatttcagcctcctaagtagctggagtacaggtgcatgccaccatacctgcctaatttttgtatttttcgtagagacagggtttccccatgttgcccaggctagtcttgaacttctgggctcaggaaatccacctgccttgacctttgaagtgctgggattacagtagtcagtcaccatgctcagccaatacttatccttaaatctctgagtttcttagttccctaacctttcaacaaattacataactgcatagtctcattattggaaattaaacattagtaccatcattctttactttccaggttaactaccaccacataaatcatattacaagaaaataatataattttttcaaagccgtaaatttagttccttaaaaattctacttgctcttagttatctaggacctagtagacataaagtcaggtactggctgggcacagtggctcatacctgtaatcccagcactttgggaggccgaggtgggggatggcttgagcccaggaattcgataccagcctgggcaacatagcgaaaccctgtctctacccaaaatatacaaaaaaatattagctgggtatggtggtgcacacctgtggtctcagctacttgggaggctgaggtgggaagattgcttgagcccaggaggtagaggctactgtgaaccgagattgcgccactgcactctagcctgggtgatggagtgagaccctatctcataaataaataaacaaataaatgtcagggaccaaagtatcacataacatataaacagcaggaactatcttatctgggccccatatttcaggagcctctctattgactactgttaggtataactcctccatatttgtctattcattcaagtaaacacacttactgagggcctactatgtggcaagcaactggacaacaaagataagatgaaaatattttaccagcctaattaaaaaaacagctaaaataaaaatgatatgtgctataaatagaaatatcaaataagtgttatggaagcttgcagagaagagaatgccaagaaaagcttcccagaagagggtgatgcctgaactgagaaaatgtcacggaaaacataccctgttcacgctttactatttagactacggttctcttctgcactactagttctgagtttatgctttgtcatctatacaagaacaaagtaacaatcttactgatgtgtacagaaccaagtgtcaactaattcaatttcatcaaatctgaagagtcaaaaagaataattttacccaagtatttcccagtacctttatcctgtccaacctctagttttggtttttaaataccctaacttcctccaccaggtaaacatactgtaacccagttaactcgagtttcttttcgaatttgtaagaccgtcacagggaatgatcactgctctctttttgctctttattccagttagcttcttcctccaaaacggagttttatttcctcaccttattctactataatacttcactttgaattctgtacctgaaaggagccatgagttccgaggtacaactactacaaacggactcctacctggctttctaagtcttatcaatatttcctgctttctattccagtactgttataaatccctaactgactccgagtcctcatcagctgacacaagtcaaaaaattcagatttagaaagggaaacaatggcttgtagttttaccgatttgtttccgatacataacaacgctgacgttctttaaccatcttctaagtttagttctcaagctctaggttagggtaccactaacgaagcttccaccttacccgtgaacagagctggtagcaactaaacggaaaacgctgtgaagactacatctacgtttagctacctaatgtccatgccgcaccgacctcctaaagggaattcttaataatgggagactgaaatatccagggagggtgaggtagtagaaaactgtttagactgtcaaaaatctggcattggctaatcctgcctgttactccgggcctcggtttccccatctacaaaactgatgtaaggtagggggattgacttaaacaatttctaaagtccttatggctatagtaatccagaaactcaatctgtctcctcatctggctttacactgaacacgtgggaaaatagaaaagaaccttttgctccaccgaaccgactcctattctcagatattatcttaaaaatctcccaaacttcggactcaccctaatcctcggggtgcccacttcccttatggagaagccaaggcaaataaagcccagtcccacatgacggtcaaggaagtgcggggcagaccgtattcagggtttcaaggcgctgaccccggaaaggccagcccaccgtggggtccttacaccactgaatgaatgagtacaaccagacagacacccactcgcgtgggcagcaactggagacctccaggcctagaccccactgatgtccattctctcccagggcctccaaagccgggcctcccgggctccgggcccccgggtcctcagcaccgcccctctctcaggccagaaggtgcgcgcagcggcgctagacttcgaagcggagaggccctgagacgccccgcgcgtccgcccgcccggaaggggggagaaacctgccggtctcggccgctgcagctcgggctcccgacttaccgcggttcggtggggaaggggaagtgtcaggagtcccctgctgccacccgccgctcacagagcagcgcgcggcccccacgaaaccgtcgccgccgccgctaccacccctgccaccgaccgccgcttcgggcgcagcgcgcagagggcccgactgcgtcacacgccgcccggcgtcagaggctcgttgcggacgctccgccctcgccgtccgcgaattggtggacgcggccgccactctgggtcgaccctgttattcattgggcaacgcgtcttttgaaaccgaactgaagggggaaggggcgagagggaagaggaggggcagaaggagttcggggaggcacagggtaggagcggtgagagggccgtggagtcccgcccctcgccgccgcggttggcgggagcgtgtcgtgacgtcacacagggcctctcgaagtgggcttgtgaatggctagattgggaagcaccggcggggtgtcgggaagggtggtgacgcaacatagagactccgcccccttccttggagcgccgcgactcgggctgagggagctcgggccaatcagagggacggccccagaatggcatggtaactattcgaccctttccttgccccggtccgccggcgctgctgggaaggcttcctagtctctctgcccgcacttcccgcccagaccacgtgcggagcctgagggccctcttggaaggtctgtctgtccaaagagtttgcccgaggcttcttcagggccctaaatcctgaccctattctctcctgacccatgctcgccccagcactttctttccctccctgaatttctaggatggacattaggagcattagagatgccctaagggactggcccaccaaagggcctggtacaaatgaggattgttggaacgtctttcccagctgcacgtggagaacccctaattctttttttttctttttcttttgagatgaagtctcgcgttgtcgcctagggtggagtgcattggcgcaatctcggctcactgcaacctctgcctcccgggttcaagcgattctcccgccttagcctcccaagtagctgggattacaggcgtccgccaccaggcccagctaatttttgtatttatagtagagacggggatttcactgtgttggtcaggctggtctcgaactcctgatctcaagtgatccacccgcctcggcctcccaaagtgctgggattacagacgtgagccacctcgcccatgaactaatttttttttttttttttgagatggagtcttgctctgtctcctctttctcccaggctggagtgcagtggcacgatctcggctcactgcaatctccgcctcccaggtacaagagagtctcctgtcgtagcctcccgagtagctgggattacaggcactcgccgccgcgcccagctgattttgtatttttagtagagatggggtttcaccatgttggccaggctggtctcgaactccggaactcaggtgatccgcccgcctcggcctcccacagtgctggccttacaggcgtgagccaccgcgcccag

SEQ ID NO: 5659 - DNA, 6000 bp, Homo sapiens
agggcttggctccaaaagggtttgtaagcatcaaactccttgtctttagaacggaagaaggaagatgatgatacctaaaagaggtgttatcagaatttagacagagtaggagtgtgggaaggaacccctggcttcacaaagatgtccttccccagccaggaattctgggaatgatgagccatgggctacttgcctaccaaagtacccaacaacgtatctttagaaatcaccaaagtcacaggaaattcttccttggagtattcctcatccagtacgtattcctccagtctttccacaagtatgcactatttccctgcacatctacttgtactttggactgaatgtactcatttgcttactcattcaagacatttctttcagaaccattttatagcaaaaaaaaaaaaaaggaaaaggaaaagaaataaaagaaaaaaagacatttctgagtcctctttcagtgtcagaatcaatgtcttagaatatttagaatgggaactcaacatttttatttatttatttatttatttatttagagacagaatctccctctgtcacacaggctgaggctggagtatggtggtgcaatcttggctcactgcaacctccacctcccgggttcaagtgattctcctgcctcagcctcccgactagctgggattacaggcgtgggcaactatgcctggctaatttttttatttttagtagagatgaggtttcgccgtgttggccaggctggtcttgaactcctgatctcaggtgatctgcccgcctcagcctcccaaagtgctgggattacaggagtgagcccccgtgcccggaaactttttttttttttttttttgagatggagtcttgctctgtcacccaggctggagtgcagtggcgcgatctctgctcactgcaagctccgcctcctgggttcacaccattctcctgcctcagcctcccgaatagctgggactacaggcgcctgccaccgcgcccggctaattttttgtatttttagtacagacggggtttcaccatgttagccaggatggtctcgatctcctgaccttgtgatccgcccgcctcggcctcccaaagtgctgggattacaggcttgagccaccatgcccggctgggatacatttttaaataatgcaaacaataccatttattgaggccttatctgtgccaggtactatgctaagtgctttaaatgtattctctcttttaatgctcactacgaccctgtaaggcaaatgtggttgttatccccattttatacaaaagaaaattgaggttcagagggattaggaaatttgcccaaatttctttttctttcctttcttttcttttttttttgaagacagactttcactcttgttgcccacgctggagtgcaatggtgccatctcagctcactgcaacctctgcctccccggttcaagcaattctcctgcctcagcctcccaagtagctgggattacaggcatgagccaccacacccggctaattttttgtatatttagtagagacagggtttcaccatgttggccaggcgggtttcgaactcctgacctcaggtgatccacctgcttcagcctccaaaagtgctgggattataggcgtgagccaccattcccggcaggaaatttgcctaaatttcttttttttttttttttttttgagacggagtctcactctgtggcccaggatcgagtgcagtggctcgatctcagctcactgcaacctccgcctcccaggttcaagcaattctcctgcctcagcctcccaagtagctgggactacaggtatgtgccaccacgcccggctaatttttttgtattttcagtagagatggggtttccttctgttagccaggctggtctcgatctcctgacctcgtgatccgcccacctcggcctcccaaagtgctgggattacaggcgtgagccatcccgcctggcccaaatttcttaattaaattaaactgaattaaattaaattaataaataaatttaaactgaattaaattaaatctgcatccaaatttaaaccagggttctctgactcaaagtccaacacctctactaatcccccactgaagaaaataattcactcattcgtgcatcaaatatctaatgtgtacctactatgtgccctgccttagggacaccaaaataagtcagtagaagagagccttaaaaataattgggcttggagattaaagggcaagaaatcaaatgttccagagggcagttatgaagctactgtaactatctagggagagttaatgactttctaaagtccagcaaaggcaagggagtgtggttgtaaagtaggggtgttttggatggaggagttgggggaagatggctgcagtcagttgtttaaagtaactttactatttggccaaccatatattgattttcttcttccttcaagtatctactgagcacctacaatgtaccgtgtttcttccatccactatcttattccatctttacaacccaccaccttttttttcccccagtcggaggctccgtctgttgcccaggcgggagtggcatgactgtaatcacagctcactgtagctttaacctcttgggctcaaacgatcctcctacttcagcctccctagtagctgggaccacaggcgcttgccaccacacctggccttggttaattttttgtataggtggggactcactatgttgcccgagctggtctcgaactcctgggttcaagtgatcctcctaccttgaactccccagtgctgggattacaggcgtgagccaccactcccagtctcccattttttaaacaaacaaataaatcaattatctctaatcccttgccatcaccgaaaacccagatggctttaaactcatttacattttaggtaaaagcccagttcaattttgcattcatgtctcacaaaggagtagtggtggaggttttttaaaaattttttttgagatcactctggagcgcagtggcaggatctccactcactgtaatctccgcctccctggttcaagccattctcgtgcctcagcaaaccgagaagcagctgggattataggtgcccaccaccatgcttgaccaatttttgtattcttagtagagacagggtttcatcatgttggccaggctggtctcgaactcctggcctcaaataatctgcccgcctcagcatcccaaagtgctgggattacaggcatgagccaccagcccggccagtatacgctttgctttctgcgcacagttcctgctatgagactctcagtcactaaacaggtctagtttctagaaaatgcccacctttcactcttgtaatatcagttttctgctaatgggctaggccccagaaggacttccaagaagagcccaaggcacagaaaaccgagggtaaataataggatacaaagtgacaaggctttaacagaggcctgcccaagcattagctcaactcgctgtgaaagcttggcaaatgtatcactgagaagatgggaacatttgaaatacccgtcctttaagaataagtaggggttcggctgggcgcggtggctcacgcctgtaaggccagcactgtgggaggccgaggcgggcggatcacctgagttccggagttcgagaccagcctggccaacatggtgaaaccccatctctactaaaaatacaaaatcagctgggcgcggcggcgagtgcctgtaatcccagctactcgggaggctacgacaggagactctcttgtacctgggaggcggagattgcagtgagccgagatcgtgccactgcactccagcctgggagaaagaggagacagagcaagactccatctcaaaaaaaaaaaaaaaaattagttcatgggcgaggtggctcacgtctgtaatcccagcactttgggaggccgaggcgggtggatcacttgagatcaggagttcgagaccagcctgaccaacacagtgaaatccccgtctctactataaatacaaaaattagctgggcctggtggcggacgcctgtaatcccagctacttgggaggctaaggcgggagaatcgcttgaacccgggaggcagaggttgcagtgagccgagattgcgccaatgcactccaccctaggcgacaacgcgagacttcatctcaaaagaaaaagaaaaaaaaagaattaggggttctccacgtgcagctgggaaagacgttccaacaatcctcatttgtaccaggccctttggtgggccagtcccttagggcatctctaatgctcctaatgtccatcctagaaattcagggagggaaagaaagtgctggggcgagcatgggtcaggagagaatagggtcaggatttagggccctgaagaagcctcgggcaaactctttggacagacagaccttccaagagggccctcaggctccgcacgtggtctgggcgggaagtgcgggcagagagactaggaagccttcccagcagcgccggcggaccggggcaaggaaagggtcgaatagttaccatgccattctggggccgtccctctgattggcccgagctccctcagcccgagtcgcggcgctccaaggaagggggcggagtctctatgttgcgtcaccacccttcccgacaccccgccggtgcttcccaatctagccattcacaagcccacttcgagaggccctgtgtgacgtcacgacacgctcccgccaaccgcggcggcgaggggcgggactccacggccctctcaccgctcctaccctgtgcctccccgaactccttctgcccctcctcttccctctcgccccttcccccttcagttcggtttcaaaagacgcgttgcccaatgaataacagggtcgacccagagtggcggccgcgtccaccaattcgcggacggcgagggcggagcgtccgcaacgagcctctgacgccgggcggcgtgtgacgcagtcgggccctctgcgcgctgcgcccgaagcggcggtcggtggcaggggtggtagcggcggcggcgacggtttcgtgggggccgcgcgctgctctgtgagcggcgggtggcagcaggggactcctgacacttccccttccccaccgaaccgcggtaagtcgggagcccgagctgcagcggccgagaccggcaggtttctccccccttccgggcgggcggacgcgcggggcgtctcagggcctctccgcttcgaagtctagcgccgctgcgcgcaccttctggcctgagagaggggcggtgctgaggacccgggggcccggagcccgggaggcccggctttggaggccctgggagagaatggacatcagtggggtctaggcctggaggtctccagttgctgcccacgcgagtgggtgtctgtctggttgtactcattcattcagtggtgtaaggaccccacggtgggctggcctttccggggtcagcgccttgaaaccctgaatacggtctgccccgcacttccttgaccgtcatgtgggactgggctttatttgccttggcttctccataagggaagtgggcaccccgaggattagggtgagtccgaagtttgggagatttttaagataatatctgagaataggagtcggttcggtggagcaaaaggttcttttctattttcccacgtgttcagtgtaaagccagatgaggagacagattgagtttctggattactatagccataaggactttagaaattgtttaagtcaatccccctaccttacatcagttttgtagatggggaaaccgaggcccggagtaacaggcaggattagccaatgccagatttttgacagtctaaacagttttctactacctcaccctccctggatatttcagtctcccattattaagaattccctttaggaggtcggtgcggcatggacattaggtagctaaacgtagatgtagtcttcacagcgttttccgtttagttgctaccagctctgttcacgggtaaggtggaagcttcgttagtggtaccctaacctagagcttgagaacta

SEQ ID NO: 5660 - DNA, 6000 bp, Homo sapiens
gcccagggtgaggaaaaaaagtgtgaggcctgaggctttctccccacttaagccaggggaaactgcttgaagaacaacatatatcatggaaggctgaggtgggcggatcagctgaggtcaggactttgagactagcctggccaatatggtgaaaccctgtctctactaaaaatacaaaaattagccaggcatggtggcaggtgcctgtaatcccagctactccggaggctgagacaaaagaatcgcctgaacccggaaggcagaggttgtggtgagccgtgatggcaccattgcattccagcctgggtggttaagagtgaagctcagtctcaaaaaaaaaaaaaaaaaaaaaaacatcaacaaaaaaaaccccacaaacaaacaaacaaaaatgacataaacaccaaggaaagtctgttttctctaaatagtcacccaggctggaatcagtggcacgatctcagctcactgcaaccttttcctcccagattgaagcgattctgcttgcctcagcctacttgagtagctgggattgcaggtgcacacgaccacacctggctaatttttgtattttcagtatttttagcagagatggggtttcaccatgttgaccaggctggtcttaaactcctgacctcaagtgatccgcccgcctcagcctcccaaagtgctgggattacaggcgtgagccactgcacccagctactgttgtcttatttatttagagacacggtcttgttctgttgcccaggctggaatgcagtggcacgagcatggttcactgctgccttgaccttccaggtttaagcaatcctcccgcctcagcttccttaatagctggcactacaggtgtccgccaccacaccaggctaattttttttttttttgtaaagatggggttctatgttgtccaggctgatctcaaactcctgggctgaagtgatcctaccctctccgtcttccaaagtgctgagattacacacgtgagccaccggcctttccttgtgtcttacttaaaagtaatactcggccgggcgcagtggctcacgcctgtaatcccagcactgtgggaggccaaggcaggtggatcacctgaggccgggagtttgagaccagcctgaccaacatggtgaaaccttgtctttactagaaacatgaaattagccaggcgtggtggcacatgcatccaatcccagctactcaggaggctgagccaggagaatcgcttgaacccgggaggcagaggttacagcgagccaagatcgcatcattgcactccagcctgggcaacaagagcgaaactccgtctcaaaaacaaacaaacaaaaaaagtaatactctactatgcttcagctaactttggacagagcacacagggaggggcaaggacgctttaaacagtatctgggaagtggggccacttacctgataggcatttctaaggaatagaatggattcttgagggcaaagtctgagtaaatctcataaatctttcggagaagagaatctattccagcttgcctaggatctgctagaaccacaaacttgatccctggagagagaccaagaatggttaccaaagcgtagacactggagcaaatagtgtcatcctgtatttgtacagcactttcaattttgcaaaacactttcataagcctattttaattttattctttttaccacataatgcaggaaaggcaagactttgaatctaccgatgagaccagagaagtgaagtaactttgttatgtcacccacctgattaagaccaggctttgagttctagctctgccacttactaacagttttggagtccctcagcagaaacattgccaggcaggggacaaagtcaggcagttttcaataaatgaagagggtgaagcaatgacactggcaatccaaaggtcatatccattttgctttcaaatttcattttggaaaaacacttaacaccttccaaagtacacgcaacaggaaatagcattaaggtgagttttatctgaacacaagataacctctgctgaacatgctgggtggcatggacaaaatcagtttcagattaaatattggttttgtattcacaaaacaaacaaacagatgtgtctataaaattgtgccaggaaggccgggcgcggtggctcatgcctgtaatcccagcactgtgggaggcagaggcaggtggatcacctgaggtcaggagttcgagaccagcctggccaacatggtgaaaccccatctctcctaaaaaatacaaaaattagctgggcgtgtggcggatgcctgtaatcccagctactcaggaggctgaggcaggagaattgcttgaacccgggtagtggtggctgcagtgagccaacatcgcgccactgcactctagcctgggtgacagagcaagactccatctcaaaacaagacaaaacaaaaaaaccccacaaaaaattagctgggtgtggtggcgggcatctgtagtctcagctacttgggaggctgaggcaggagaattgcttgaacccaggaggtggtggctgcagtgagccaagatcatgccactacactccagcctgagtggcagagtgaaactgcatctcaaaaaaaaaaaaaaaaaaaagaactgtgggtcgggtgtggtggctcacgcctgtaatcccaacactttgggaggcgggcaatcacctgaggtcgggagtttgagaccaccatgaccaatatggagaaacaccatctctaataaaaacagaaaaattagccgggtgtggtgacacatgcctgtaatcccagctatttgggagcctgaggcaggagaatcgcttgaacccagggggcggatcatgcccctgcattccagcctgggcaacaagagtgaaacatttcaaaaaaaaaaagaattgtgccaggaaaagcacaccccctcttcttgcttaccaaaggtgtctttggtcaaccccctcctcccaccttctccaccacactcctctggcccacctggagatgcaaacttatcagtatctcttccccaccttctccatcacactcctctggcctccgtggagatgcatacctgtcagtgtctggtagcagtgcaatttgaatgtgtctgtctccagcatctcaatgcctgagcttccctgttcaggagacagctgggagccgatggcaaagagcctatatgcaaaggaggcaaagttgctctaaggaaggagtgcttctcaaacttccactgaagtgtccctatttgctgaggagttcacattacagcctgggacagtcaggagaagtagtgtgaactgactggcagtagtgtcaaaatttctaagttcatttgaattctgtgaatattttacattcatactttgttacaagacattttacatctaaaactttgggtaaaatgaatactctaggaatatgtgccacgcttactaagcttgtgtttaagcaaaggccggcacatctgatatcacaattgagagcagaaaaagtttaaaggtcatttagttaaactggctttctttaaatatgaagaaactaaggctcagagaagagaagttgactttaagtaagatgacacctcggccgggcgcggtggctcactcctgtaatcccagcactttgggaagccgaggcaggtggatcacctgaggtcaggagtttgagaccagcctggccaacatggcaaaacccctctctactaaaaatacaaaaattagctggtcgtggtggcacgcgcctgtaatcccagctactcgggaggctgaggcaggagaatcgcttgaacctgggaggcagaggctgcagtgagccgagatcccgccactgcgctccagcctgggtaactccgcggcccctccccacccagcaaaaaaagatgacaccactgccgttattacctaaaatctagatctggatcggttgcgtttttcataacaccagaacgacgatttaagaaaaggtagacaaattacaagcgctgccgttcaggagacgggggacttacgagtggaacatggaggccagcataagcttctcattagaagtgaggcggggccggccaaatcgaatggacaccgggtaattagcagggttacccagatactccagcacctctttcccgtcggccgtgtacctgccattcacgtccatgccattgatggccagcactgcatgacccactgcagaggtgaagctaacggtcagcgaaggtgcagcccggggattccgccgaggggacaagggacccgacacaaccccttttcccccaaccccgcacctacaaccagcccacttctacagcactggggccctcccacccccgcacccgccacgggcccgagcctagcccacctcggatgccgtcccgctggccgaaagcaaccaacacacgctcatcgtgtagcttgagcagcagatccagcggataactgaaagttttctcagcctcagcccgtggcgcgtagctgtccaactggtaaatcaagccgccagctttgttcaccacatacacactaaaaatcgccatcgctgccttgccgctcggaaactggtattcagcctctacccgacggcccctccccggaaccgcatcacagcacttgccgccggccccaccccagcctcctcctcctcctcctcctcctcccgcgccccccgtgcagccacctgctgcacttgcgcactgggagcgacacgctcgggcataagtagtgccggaaagttagctgccgagacctggtggattgcttttcgtttatcagtgcaggaaaacagcgctatagtatgcgtcacaactagcgcagactccggcagtatttaggcggtgcggcttgggaactagaatccacttcctgtcttccgcctcaggctagagggcgagcgcttcgccgtgggacttcttctgcctggctccgccttttgccccggaagtactcacagcggacggtggtttttgggcccgtttctgagcagcgcttcctttttgtccgacatcttgacgaggctgcggtgtctgctgctattctccgagcttcgcaatggtaagcttcaggggtgtgaagtcgccggcgttcttgggtttgaggactcagtggggagagccttcggcgggagcgctccttggcctgccggcctcggttgcagggcgggcgcggttattgcttggcccatgtgctctggtggtggagtttgcgggggctgagggcgcagtattaggggactttggcgctatttgaggacctggttgcattcccgctgccctcctacagccgcctaaggacgacaagaagaagaaggacgctggaaagtcggccaagaaagacaaagacccagtgaacaaatccgggggcaaggccaaaaagaaggtagaaataagacctctctgaaagagactaggggtaactctctcgtaatcctctagtaataggtaacttgtatagtaagtggtttttcaggtgtagatttctagagtcaaaatgtgagagtttatcttcccgtcaccactcgttctttttcccattaggatcatgaaaatgggtctgttgtgcgaagtgtctgccgctgtgcctgctgtgttatttttaactgatctagtggggctcggcccctgtttgaaggccaaaaacgtgtcggtgttttttttttgtttttgttttagtaatgtgtaatttatccttgataacggtggaacagatttctctgacgcagattactcgagagggaaagggtgcttctgccagaaatactaacttgtttctgttttgttttggtgagcagaagtggtccaaaggcaaagttcgggacaagctcaataacttagtcttgtttgacaaagctacctatgataaactctgtaaggaagttcccaactataaacttataaccccagctgtggtctctgagagactgaagattcgaggctccctggccagggcagcccttcaggagctccttagtaaaggtgaggggtgtatcctacatgtgtgtttttgtaggttaaattgtcttgac

SEQ ID NO: 5661 - DNA, 6000 bp, Homo sapiens
ggtccttcaacaccccagtcggggtgttctgggaccctgtctccaaagtccagcccctccccacgggagctccaattagatactcaggtgtggtgtcaaagtgtccgctggcaaggcccctgggctggcaaagtgagacccagaggcaagcccactgctgcccaccacaaccatccagcccagccgggccctgacatacctgggctggccacaggaaagagaccaggcggtgctcagggtccctgaaggctgaccagtgggcaggcaggtggtgggtgcgaccaaggaagccccaagctctgcaaaaggaaagatgggcagagtggagccctggcttccaccctcagctgtacagccagagatgctcccagagaagggcagggaacccccacctggggccaggtccctacagggcagaggggcagtcggggtgggcaggggatacaccaccagactcggagaagaagaccactgaggagtagccccaaccaggaaagctctgaatcaatgactgagtcaccaaattctgctccttcagggctctgagacagccaggcagggacacagactcacactcacagagacacggtgtgcagagaacacatgttcaaagacgtactcacagcacggacatgcagagacacaggccaagacacatgcttgcacccacacagacacgcagcagtgcctcctccctggggtcctggacccctggaccagcctgctgtctgcttcctaccaggcacaagcacccctaccccaccctgccttgggctctgagcagacacccaggctcaggaaggggcctcacgccctccctatggagctgccagcaatgacccgcaaggccctcctccaccatgggtgccaggctggggagtctgtcctcctcctggcactcagggatttctggccagggagaggccccaaacccacctgggcagccaaacgcagtgcccactactccctgccctgctggctcaaccccgcaacacctcgcccctcagaactagctctctggagtgaggtaactgtccttccagtagcccaagggcaggagggaaccatagagcctccaccccaaccctggctgagcgagagccccaaaagagacatccagagctctgcaggttggaaaagccctggggactgagctgcaaggagatctcagacacccacaaggccagacggaggtccaacccaaagaggggcctgcccacatgataaagcagcctgtctgcagcagcctgggtgccatgcccgtggagcagcctctctgagccccagcagcagggcagcagctcagtcctggcccagcccagacctcggggtctccacacagctcagcaggggcagctcaggacagacagcagagccaagcccacacaccctggccccccaggcccacgggctctgaggcagctttgaggaggtagggaggcccgccaacacaaacagcctatgctgtgggcttcctggctgcctcagcccctgcggggccccagtgcccgtcccaagccctcaccctggggggtcccaagcaagctggcactccctcatgcacacagaggagcagggactgggggctacatacagagtctgggtgggaccaggcccctcccacccaaacctgagccctggaggctggagacaccactctgatacccccagcagccccaggggagggacagatagtccagaggtcccccagtctttcctcctgggaccaccgaggctaaccccacactccaggccttccctgtaatcctttcctgcactgttgggtatttatctgctgggagtcgggggtgaaggcaacagacttaggaccctgggtggggggcaccttcccacaccccccaggctccaggagcagccgcacctcaggtgccatcccaccacagccctggccctggcccctgcaacctagacccctatagaacagtctgggggggcacatcaggcctgggcagctgcatggcaggcagtgacattcccaaatatcaccagccccgacatatgagtggtgaggctagggtcagttcagtctcggccccatctacaggccccaccgctcacagcgccggtctcccaggaccgtagagaggacccggccccatctacaggccccactgctcacaacgccagtctcccaggaccgtagagaggacacggacggcgtgggtacggtgggcagtggccttggctgtgtgcaccgctgaggtgtcgggcacgtgtgctcgtggcgccgtgtgcacccaccccatcccacagcaccctgggggtgagcacacatctgtcccaggcatggacagggccagagagcacaggtgtgggggcgaggctggggacagacaccttcaacaccctctcccagtcaaggtcatgcccagcctcagcggcaggagggatgcagccctccgggcgggcagtttctgatcccacctgagctttacagacagggaaacgtgggctgggatcccagaccagagtgcaagttcagctgaatcccagccagggctcagcccgtgctccccctcccagccctcctggtcccgtggctggcctgtttccagggcaacacccagggtgggaggggtcagcagctaaaacttcaatcatgggtttcccctggtcctttgccctgaagtgatccctcctctagcaggaagcagccgggggagcccaccctctgctccctgtgccctgccctgaccacaggaggctccacaacgcccccttctataaaaccagcgcctcaccctcctggccccatcccagacccccccccccagaagccaggccgagtctgcgccaacactccacacccaggagagaggggcccccacccgcccctgctggcgggcacagtgccctgccccgccaccaggctccctcccacccccgcttgcctgaggagggccaggcccaggctccccagggtcctcaggtagagcccagtcgggactgaggacaggcctgggcccccaggggcctccgcacatatgtggtgggggctcgggggagatgcacagagcctgaggctggggcagtctccagatctcaggggctctgctgggaaatggagggataggaagcgcacacactcggaattccaagaatgtcagcttggcccaagccaggatttggagagcagctcactccccaccaccccttgctctgagtaaacaactcctgcaggcaggaacaggggcgggacaggccctggaccctcctccaagaagcctccaggcccccacccactccccagggcccaccctgctaacatccgggacccccctgcccccctcacctccacagccaccagcagcctcgcagctgaacctggctctgaccccaggccaccgttactcagggcccctgtcctgcccttctgcccagagcaggatgtgcgtccactcatcctggggggagggggtcagggaagggaagtggcctcggctcgtggctccgcacgtggctgggtggggtatggcaaatgccactggggaagctgcccagggccctggccagggtgggagcggaaaccccaagcgtgcagtggatctggctagcaccactccggacccagaaaacccttcgtcctcctcctctgcaactaaggcagacgcagcattgccctgagaaagcggcagctgatgcctggaacccaacacaggtcccaccccagccagaagccccaggccggcaaaccagcccagagccccccatgggtgccgctttgcggcccacccacccccacagcccacctcgcacctccaaggagccttctttgcctctcactgcacaccgaccccccatttcctcacccccaccccaggggcacagcaagaagggtgctggtgccagcccccccgcactccatccgagagacacgggctcctcgtccctcgtcgtccgtaggccctgagctccagggcaagccagagctgaggccttcagggggtcctgccagtgcagcctccgggagtctgcccagggatcccctgtgccggggtcttccaggttcagctcaaaaagcacctcttccacgactccctccccgacctccctcccgggtcccctctccccgtgctcagaggcgcgtctgagcgtcgggagctcgggacggcgagcagccagcagagccgggacccgggagggcgcaccccgaccccattcccgggaaagagcggaaagaacgcggacaggagcccggggcggggagctgccggcgggggctgtaattgcgcagctgaggccagggcggcgcccctaggggctgggccgcgtccagaatgggacccccgaactcagcgccgagagccccggacaccccgcgggcagaggccgaggcggaggaacccactactcggcgcggccaggaggggcggcaggaagacccgccccggcccccgcccgccctctccccgagcccccgcgccggaccccacttgttgctgcgtgtcggctctgggctcgaactcgcgcgccccgctcgcgtccggctccagccgctcccggtcggacacctccggccacgggaccctggccgcacgcccccacaacccccaggcgcagtacctgcgccgccgcctcccgctcgcgccgcccgctcccgccgcgcagctgtcagtcaagcggacacgagaaacgcgaaccgccgccgcagctttacggccctgctcagacgccgtagcgccgggatgcaccaagacggtgggcgggggtgtgcggtctgctgctgccgcggccgcgcgggcccgggagccccgggacgcacaggcccaggagccccgggacgcacgggaagcccctatcgcggcggaaactgcggccagcggtggcggggccggtggagggacggccggaacagcggagaacgagcggagccgattctcccgcaacagtggacgcgcccggggcggggcctgggggggttcttcgcgtgcggccgggccgggccgggcagtctgggacgcgccgccgccatgatcatccctgtacgctgcttcacttgtggcaagatcgtcggcaacaagtgggaggcttacctggggctgctgcaggccgagtacaccgaggggtgaggcgcgggccggggctaggggctgagtccgccgtggggcgcgggccggggctgggggctgagtccgccctggggtgcgcgccggggcgggaggcgcagcgctgcctgaggccagcgccccatgagcagcttcaggcccggcttctccagccccgctctgtgatctgctttcgggagaaccttatcccctgaagtctggggaagagaacggagttgggcttcaaaccagtggtgtcctggggattctaggtggcctggcgggtcgcaggcgtcttgtcacccgcagtaaagcccttggcctccgccctattcccatctctgcccccaggcccaccccatgtcctgcaaacctcgctgcaggacgggcgggcgcggcggctgacatctgtaatcccagcagtttgggaggccgaggcgagaggcttgcttgagcccaggaggtcgagaccagcctggacaacctggggagaccctgatctccagaaatttattttattttatttttcttttttgagacggagtctcgctccgtcgcccaggttggagtgcagtggcgcgatctcggctcactgcaacccccgcctcctgggctccagcaattctcctgtctcagcctcccgagtagctgggactacaggcgtgtgccaccacgcccggctaatttttgtattttcagtagagatgggatttcgccatgttggccaggctggtctggaactcctgacctcaggtgatccacccgcctcgacctcccaaagtgctgaggttacaggcgtgagccaccgcgcctggctctatctttttaattcgccggacatggcggtgcacacctgtggtcccagctacttgggaggctgagacgagaaaatcgcttgagtctgggaggcaggtggaggttgcagtgagccaag

SEQ ID NO: 5662 - DNA, 6000 bp, Homo sapiens
gaggtcaagagattgagaccatcccggccaacatggtgaaacccagtctctactaaaaacacaaaaattagctgggcgtggtggtgcgtgcctgtaatcccaggtactcaggagactgagggaggagaattgcttgaacccaggaagcggaggttgcagtgagctgagatcacgccactgcactccagccaggcgacagagcgagactctgtctcaaaaaaaaaaaaaaagaaaagaaaagaaaagaaaagttattcctagccctttagcgattcaggaattcagagttcaggccgggcacagtgactcatgcctgtaattccagcactttgggaggcagaagcaggagaattgcttgagcttgggaggcagaagcaggagaattgcttgagctcaggagtttgagaccagccttggtaacaaagtaagaccccacctctatttaaaataaaaattaaaaaaagaattcagactgccactcttaccatgacccagacatgaagggagatgctgagggcaaagtacacagctgtcaggatgatggtccctttgaacttatggaataggaggttgaccaggccagcctggaagacgaaggtgttgaagaacatgaggaaaatgatgatgatgttgaagaggactgcaatatcctggatgctgtagacataaaaaaaagtacaaccaatgaaggcctgtgtgaggacccaagagcaggtactatgtcctgagggacaccacgaggcctgtcctttgttgtgagataggcatctgacatcttaaaccctcacagagataacatgggttttgggacctgaatgacatgaagctaaaattacctaaaattacccactggccccatcagttgggtttgcagtccatagtcaaggctttcctgctctaatactcttttttatttttaaaatttcttccatacatagtcctatagaagattctctgatactccttatttttcgagacagggtttcattctgttgcccagactggagtgcagtggtatgatcacagctcactgcagcaacttcctgggctcaagtgatcctcccgcctcaccctcctgagtagctgtgaccacaggtgtgtgccactatactcagctaattaaaaaaaaaattagctcatgcctgtaatcccagcactttgggaggccgaggtgggcagatcacttgaggtcaagagtttgagaccagcctggccaacatggcaaaaccccgtctctactaaaaatacaaaaagtagctgggtgtggtaaatacatagtggggtgtggtagcgcacacctataatcccagctactagggaggctgaggcaggagaattgcttgaacccagggggcggaggttgcagtgagctgagattgtgccactgtactccagcctggcgacacagctagactccatctcaaaaaaaaaaaaataaaattatgttttaatagaaacaaggtctcactatgttgcccaggctatctgacactcttaaacatttttttttttttgagatggagtcttgttctgtcgcccaggctggagtgcagtggcatgatcatggctcactgcaacctctgcctcccaggttcaagtgattctcctgcctcagcctcccaagaagctgggattacaggcatgcaccaccacgcccatctaatttttgtatttttagtagagatggggtttctccatgttggtcagactggtcccgaattcccgacctcaggtgatctgcccaccttggcctcccaaagtgttgggattacaagcgtgaaccaccacacctggctttttttttttttttttgagatagggtctttgtcacctggttggagtgcagtggcatgatcatggctcactgtagccttgaactcctgggcttaagcaatccttccacgtcagcatcctgaatcactgcgattacaggtgtgtggcaccatgcctagctaattttaaaaatttttagtaggtagagacagggtcttgctatgttgcctaggctggtcctcaaactcccagcctcaaaagatcctcctgccttggcttcccaaagtcctgggattatgggtgtgagccaccgtacccagcctactaataactttaagacactaaatcaccactgtcagggcctttgaattgcgtgggttcagctttccagagtgccttactgcacgcacatgaagagcacaagctggatgacaggagtcttttggagcagttctgagaaggaattgacaaagaggtcataggacagcagcaggaactgcagagagagcaccaggctgtagttactggtctggagcatcttccttctgttttctcgggcccccaagggcacatcccacagttcccagaaaaccgctcctggctgtctccctaccactgagggagaggcttctagttcctttgaatgagagctgtttcccttgctctaaggcaagcacctgttggagcaaaaagataagcaaggttagaaatgtattaataccataaacatttactgaggacctactgtgtgccaggtaccactccagttgcatgggatactttagtgaacaaaaccaacaacaaaaacccccaagaagtcatttattctaggaccttcaccagcttttctccatgcctggaatcttctcaatgcagagctgtctctaaccaaaggaatctagtagtattactgagaagaatgactgcctggtcatgtagtagcggtggtaacaaaaatggcagcaaatccttatacattgcttacaatgtgccagggagtgttctacaagcactaacattatttaaacctcacaaggtagatgacataatacattattaccttccccattttacagatgagaaatttgaggccaagagaggtaaaataatttgtccaaggtcacgtcgttagtaagtggcagagctagtattcagatgcaggctgcacgggtccacagtctgtgctcttaactactggactaagctgtctcttacataattgatagactagtatttaactaggcaggaaaaatgccagcaaagaagtgtgaagtgccctaggcagaaaaagcagagaggaaacaggggtctcctggaaagctttatctttagggttatggttgcaacacagtggcagttgtttcttttcatctattccaagacccacaagttgctctgggggtgtcctatgacccgctgctgtgccaaatctataaagaaatttcaaaatgctctggagtgttagcgattaaattagcatcggtaaaatgttttgcaatttataagctcttttcatatttctaaccttacgtaatcctacaaccatcttgagaagtagccattacaatgtatattatccccattttacacagaggctccggaaggttaaggcacctcctccacctcagctggtgaagtcccaccttattggacatatgttcgcggtttcctcattcattaaattttagagagagagagagtgtctcgctctgtcgccaggctggagtgcagtggcatgatcttggctcactgcaacctccgcctctcgggttcaagcgattctcctgcctcagcctcccaagtagctgggactacaggtgcgtgccaccacgcctggctaattttttgtatttttagtagagacggggtttcaccatgttagccaggatggtctcgatctcctgacctcgtgatcctcccgcctcggcctcccaaagtgctgggattacaggcgtgagccactgcgcccggccgcattaaataacactgatagctactacctaggtactcacaccacgataaacttgtcaaccaagatcgtttcctttaatcctccctacaagtctgcaaggtgggaattattcctattctacaggaaaggacacagaagtcagagctcaaggcattcctccaggtctcaagtcagcagaacccggcttcataactgtgacgccaaacccgtgctcttaaccactactcataggccaccatccagggctgttttgaggatccgttatgcagaaacgcccatgcctgtctctacgtacgacgatcccctccagtttagggcagtggagactcacaagctcatgaagctctttaattcgtccaccgctacctgccgccttccctttgtacctagggcagtattcctcacgcttcccaatccacttaaaaacgaggcttccttggcaaacaacaacaaagcataaaacccaagcccaaaacaacagcaccaaaaattctgacttctggtcacttaacccactcctcgtcaatcactctcacctccaaactccaacgtcggttgtcatgcggacatcgtcccggcttccggaagccggctttaaattccggaagtaaatggaggaggcgggccccgtctgcgccgtgcggcctgctagtccccggctttctcttcccgctctatggccagtctggccgccatgttggagctttcgctgttcggggcccggcctgctccgggccctcccagcgtcgccgctagctgacttagggctcccgcccacactgcgcacggccttgctgagggccggctcgtagtgggaggcttcgcgttcacctgaacatttccgcctcctctggatgggggatgagaggcggggctgatgcatcgcagcagtcctggaccctgacttcggacttggagaagaaacgccgaggaggaacgggagttagggggttagcagcttggcgcgctgggagccggccacccctggtctccggacttcacttcccaggaggcctcgcgcgcgactggaagtgctgcgagcctataagaaggcgaggcggcacccgccgctctgctctggggcggcattgccagccggctgtaggcattcagggcagtgtcttctgcatctcctaggaacctcgggagcggcagctccggcgcctggtagcgagaggcgggttccggagatcccggcctcacttcgtcccactgtggttaggggtgagaaggatcccggggctgggagttcagggacctgggttcgaatgctggttccgctgctatctcgcttcgcactgtcgcgatccccttgctcggcctcaattttctcttttagaaagtgggcacctttctccgcgctcttccttccaacgcggtggttataaaggcacgaaagctcttcagaggacgcagaaagcacctggagctcctcaccccaattttcacccattgttagctggcacgagcacccagcagaggagtcagggatcacccctcgggtgcctggaacggttctttggacacctgagccggacctaggcacagcctgaagtcggggtctataattattccggtgctaaggggtaacttgttcacctacctccttggcaggaatattgagcccttcactcctcatgttccgactttaacagaagctacctttgagaataaggaatcctcagagctgagagggagtggacccgaattcctgtaccagctcggccacttaccttggctaagtcattttcttgttttgggccccagtgtcacagtgtttttgatttgtaagatgagggtttagggcttgtatcctaaatctggtcctcaagattcttgaagtcccccagtccatcggggagggagagcaacaaactgattttctaccccttcatttatttgtagttctaaattataaaagtaacactgcaagagtttggagtagagcctttttctttttctttcttttttttttttctgagacagagtctcactctgtcgcccaggctggaatgcagtggcacgatctcggctcactgcaacctccgcctcccgggttcaagcgattcccctgcctcagcctcccaagtagctgggattacaggcgcccgctaccgcgcccggctaatttttgtatttttagtagagacggggtttctccatgttggtcaggctggtctcgaactcctgacctcatgtgatccgcccgcctcggcttcccaaagtgctgggattacaggcgtgagctaccgcgc

SEQ ID NO: 5663 - DNA, 6000 bp, Homo sapiens
aaggtttgatttattcttttatattgtcaacatttatatgtacttttaaagattctttttcatgtggttgtattatctcaactttttaaaaaatccactaactactgcatgtcttatatctactcactcatggtcgattgagtccatggtccactgactctcactcttggtcgattgtttccttgtgtgttttgttattcattatagcaagcatatctttagcaggacttgctttcttcttgaaaagcctaggcaatctagatgcttgatactagtctttcataatgattttgtgttttactcttataggaacctcaggagtattttccatgttgactatttctaggctagttaggtagggtataaaaacaaaaaccccaaaaacgatattctcaaggggagtgttcttttcttcttactgttaaagtttcctgttctcactgtatgctggtgggcatatatttctagcctacatttttatttaatggctttatgcagggcacaggggtatctcagttccagctctctgcctcatctggcaccaagagtttaccttctttctgtctcatatggacatcagattccaggcttcttcgtcactgggacgcataactcacagggcaaccacatcatcacttcacaatctatactcgcttttaatgtctttgttcttagcacatggtagattacccttttatttttcacaaaattgggagatgttttaaaatcatttaaaatcttttatccagtactgccaggtgtctgtaaccataaatttttcagattgtctcagtcagctgaattgccagtgctttagtttacagtttactgtttcattattcataatcaatcaattactccttcccaagcagaaagtttagttggactgtgttttcagatcctgagattttagaaatgcttaacttttttaaatgtctgggattcttccccaagttcagcagtgatgaactgtaaacatacctttaaagttctaaataaaggaaatctgaaatgcctcctgggaccttggcaggacatgggcctttcttgctaatcaccattacaaattgatcacaatagagaatattaattgatttgctattgaaagttgaataaagagaaaatctgagccattttcttctgaacaccatttcaatttattactattttaactattaaggccttatttaactattaaggccttattgcacataattgctcacaaataagataatttaccataattttcagttttactactgaaaactgaagccccataaatataaataaaaactgaagccccattactactgaagccccattactactgaagccccataaatatatgtaaaaaatttttctaaataagaaaactatgaaacagaaatttttggcaagagtcatagaatttattccacagaaatgacaacttacaaagacttgggatcttataagggaaaatctcaatgatttgagaaatggcaatattcatatctaaaatgtactagtgattgccactttcagaaatgatacacctcccactatgaaattgtataaatcacaagtcaaaagcatatggaagagttgatttctactctaccagagggagtaattttctttagctctttctcatacatcataggtgtgaagtacttttgtttcttggttaaaatttttctgttagttgattattcaactagaaaaacttaaaatcttgtcagagaaaacagtggatgaaatgtaactatagaaccttttggaaataatagattcatataaaaccaaacccaaattctagagcatggctcactcttacatgtattatagtacctctgacatcacgcagagggtggatgttatgaattgaagcacattaaaatatttctgttcatcactctgctgctcagttctatttattaagaatagtccaggattcttgaactaagggaatattcactaaatactgcatgttgaggacagcctgggtaacatagtgagaacttgtagctaaaaaatgtaataacaataattagacaaattaggcagtaagccacatttgaagaaagcactgggaagagttttcaggacaacttggaattattactttatttagtctctctcactactgatatataaccacaaggtttttaatcaaatcattttttgacagacacagcgacaagtgattatatggattacagaatgaaaaaaggttttgttcatggaacagtctaatttttaaaaagccgtataaatttttagtcacctagtttagccaggaggtaatgttgccaaacctataaccctcagacatcggagatctcaagtttaaccaataaaaattccatctatgtcttaaacttacaccttcaaagtacattttaaaatagcagcatttcagaatatccaagatttatttatttttctttctattcttgttttttcttgtcatatatcaccttgctattcagagggtggtccacggactagcaaccttgtcatcatctgagggatgtcagaaatggagaatcttgggctgtacctaagacctgccttctcaaaatctgcattctaacaagatttccacatgatttgcatgctagccattaaagttggaaaagtctgtactatgagacataaaaatatcttctaatttaacacatcaagtgtaagatttctttgagggatgatgaaattgtcctggaattagatattagtggtggctgtacaactttatggatatattaaaaatagtgcattgtacaagttaaatgggggaattacgtggtatgggaattatgtcttgaacttttaaaaagaaaaacatatacataattgtaaatgctcttaacttgcacagcacacagatgaatgaaaccagttctaactattctcctttatctttgagaaaagttagatgctccctttactgcggctcacctcttacttcgaaagggcaccgcagcagggcttgaggctgggcagccctgacacagcacccatctatcaggagggtctgccaggcgcctatggggtggaatcctccctccaactaaagctgtttatagagctgagaacctcgggaaaccgcttgcgggtggatgtgacaagtcaggaaacttgactacccaatcacccaaaggggcaatgggacagaaatgctatctgcccgctgcacatgtggtcacagcggtgtcggggaagcggagtcttttcttctggagtccactctgcttactccctacctcccctcccgccacccacccagctaaaaaaaaaaataccctagattcataaacaaaagcttgcagttacccacagcccaatacaaacgacccgacgccctcacttctatagcccgtgagtctcccagcccctaacaggctcgtctccccagacgccccgggtgaaaaggttcgcgccgccggtggagagtcctattggttctatttctgtcttcactccaaggccccaggaccggggagaggtcctggtctaactttggctgtcccacggtccaaggacctcagcgctcagcccgaaacgctaagccaagcgtggagaccgccgggcgcacccagcacccaggcagctccaacccttggagttctagtcatctctcccccacataggctaagagtcacccgggcgcacatctgaatcagccccctgttcagatcccgcctgttacgtagcgatcctgtctcttgtagagcgcaggatgaaggggtctggagaaatcgaccacccatctaatcacctgcaatggtggtgttactatgcggtctcactctcgtgggcaaacatatccatgcgtacctacgaggagcaaacctagacaaccccgcctcccccactccccgcgcgcccctccactcactcaggtcccagccctggctctcgcggacctcccagcaccgtcctaggaggtacacacgcgggttcaggacgcgcgcggacggactcggccactcctgcgagcgcacaacctccctccgcgcagcccgcgcccgatccgccccgcgtcgccggcactcacaagcaggggtagtagccgtagcaaggcagcggggcttgcgggcagccgtcttctcccagctccgagtccatgagcagatagtcctggctctcgttgcgccgcgcagcggctccggcagcgccccggggagaactgcccctccggggcccgaacgccgggctctggctcatggcgggaacgcccgactggcctgggccccgctcccgggggagccgagtgggcagttccagcggggacccggtgcggagggttcgcgtcagcggccgaactggacctgggcagaccggtgcccaggggacgacggtgaagcagggggtgcagacgcccgccgcaagtggctcgcccactggcccggggaaaagtcaccacttaagggggtgcaaagaggatcttgacctgagcaggtcaggccgaggagaccccgcgaggatgcgtctggggcgcccgggcagagagggcacaggcggggccgctggtggtagcgaagcgtaagagcggagagcaagggagacggagctgaagagttactatgtcaacagagactctccagccctcagctcccgccttcatcccccgcactctccgtcaagatccccacctttaaagggatccgagcgacgttctagaaagcagccaaagcctgtcctgtagccacaactttcaggaggcggtatgagcctgaactaggaggagccaggcacgcactctttttttcccctccactatttagttggctcatttagtaaggataccaactgcggacttcgtaggaagcttcctttaagaaccactctcaaagagccaaggaaacctgttccttaaaagggacacgagcctcttctttctccagactgccttcattttctttggtcattttctctcttaccctcaactcataaagttattatgactctgctttaaaaatgaacaacgttctatgttccaaacgccagatgttcccagttcctgagaaaaccaacaaaaataggcaagcattttccaatgataccgataaagaggccaacaacctgcttacttcagagaaaaaattttccttccgtcactgcgaatgcaagaatgatttctctgccagatgtttcccacgtttccaagctgttttatttttaagacttagttttaaattctgattaatatgcatacgtgtgagaagtaaaaacttgtcaacaaggatgaatcagtatttgtagacctttaagcagtagtagccaattaagaatccattcattaagtcaacaaatatttaatgaatgccaactgcgtttcaaatcatttcagaattcggaggcaaagaagcagatgaggcacctgtctgccctcatagagctttcgtggcagaaagggggaccaattaaataagcaaatgaaaaaatatcaaggacaaatgctacaatgaaaataaaacaggttgatgtgatggcagctggtgaatgactacttcagatgagatggttaaaagaggcccctccaaggaggtgctcgttaagttgagacatgcatggcaagcagccagccatgaaaagatcagaggcccattgcaattggatgaaagaaagccagactgaaatctgtctgcaaaggtgcctttgcttcccatgaacaggtggacaacaaaatgaatgttggaagtgtgggaaaatgcaattgatttgatagaagggaaaagagctcacacatttagaaacttctgagtttgcctttaaatttagaactgaaactcagagagagcagaaaccactgtgtcctgaggatccagcttcgtatttgacacaggtgtgtagggtgcatgcatgcatgcttgggtgggtgagtgggtgggtgggtggatggatggatggatggacggatggatggatggatggatggaaggaatatagaaaaaataagaaaatgctcttggccctggaaagaacattttccctggggaaacaaacaacctgcat

SEQ ID NO: 5664 - DNA, 6000 bp, Homo sapiens
aagacagaatctcagtgaagcgcagattggtatgttaaggttcagttatgatccaaagcacctggcacataaaagcggctcgataaatatttattaacaaattaagctttaaaggagaagtacacagctccatgttgctgatggggttataatgttatcctaaggaactatgattccacaaagatcctggagcttccagtggggaaggaggccaataacagccatttaggaagcagcaagacacagagagagtaaaaagttagtctggcctttagagccccaggtggttgatttcattagtgtgtccttattagtgctggtctttgaagggccattacatccacgtcatttccagtcctctacagatccgtctccaagggagtccaaagccttcaacctctattccatacatcactggcttctccattaccaccatatggctttgattactgttggccctcttgtcatatactacatgtctttgtcttccctatgtgatcatttaccctttgatactaggactttgtcaatcctgcctaaacttgacgcccagcaggatgctaggcacacagaggtcacaaagctctgatcatggtggtcagcaggtaccatgcacatgcgaccctgctgatgctcccttgagttgtttatatgcttgatggtttatacaccaatgcgagagtgattaagacaatctaggatccttgcctttcttgttaagcctcaattcactcacttgcagaatgagaataatagaaaaacccactctgctttgcagggttgagaggattagatacaaggtctctttacttatctggtacgtaaagtaacttatgtatctccaaccacctttacatatctgaaaaggtcagattgggctggaagaatcagctgagctcaagcattactacttcttgggaacccacccaaagcctcatgcccatctcccatcttccaaagactggccaacagggtcttcctgtggttgcttctatcacaaggatgatatcctcatgtctatttcttctgtttcttcctacctgaccatgaactttctaagggccaggaacatgcgtttatcaccattacactccagcatctagtacaaggactggcacacagtgggtactcagtactcagcaaatgtttgctgaatgaaaacagggccatgcaaaagcatggaactgtctggactcagcagattcaaagttcagctgctgagaagtcagagaaaaccatgtcctgggataggctgggtagaggcactgcacattcttggcaagcctgtcctgtgtcactgaaaaagcaggctgtcgagggagcccaccaggaagagcagtgcaagagaagagatgagatgagaccaggtgagtcagatcttgtgaccatggcctcaggaagggatgcccttctgtgtggacgctgttgccagcaggccaagacagaggaactaacaataacagtggtgggtgattgtcacggattatctcattttatcctcacaatgatcctatgggaaaagggtgatgagccactttacaggggcaactcttgaggcctcagtccctgtagacttcaaagcctcaggacaggctcacaattaagcattttataaaaccacacattcttaaggttggtgaaggccttatatctcctagttcacctcccctccaagagatgctcaaattcctacaacattcaaaatcccaacaagcttcttgcttccttcccatgctggagggtgcaccatctactccatccttgggcagctctgtctactaaaaacgctttcttacagattcctcatttctacccatcaaccccacatgttctctttgtatctacccagaacaaagtcaatcacaggcacggaaagccctccagttatcgggaggcagttaccacctcccctccccaggatttagaaagaacaccacagaaagagattgcataggctgctcaatgtgcaatttgtttcatgcaggttaacaaacgcttctaattgataacggaaatcagagggagaagacgcatatcttgtttcagtgagggtgatccctgggagtctggctggggagaggggataagaggaggtgaactgacaccaaaatccacataaaccttaacagtcttcaaagaaaaacctataataacgccagagggggcttctgagatcaactcaattctttgttgtataaaggaggaattgagaagcagagaagtgacgcaaagaagcacagtgatcagtcttggaacctgccacctgtgtccctttgtcccacgctgccatgcatctgctccaagacgctacagaagccaccctgtgatttcagaacaatcctcccataataccaccaccatctccagtctcactttcaccacatccccaagagggaaggggaggaaacctatcattaattccattgtacagagggtaaccatgaggcaccgaggagaggcaaagagacttgctcagcgtccccaggcaaattaaatttattcttggaactcaaagctcagttaagactctttgctcattgttgacaatgagctactgaaaggggccatggagtatcttcctctggaagtggatttcctaataaatggaagagcctgctgttcagttttgtacttttttatggttgctgggtgtgccgacacagagagatcttcaaaatcgtgctcttcttttccttctgcctccccaaccagcgtgcttcaagggaaggagcactgtggagagtgtcaagagcctgggttcctctcctggtggtgccctggccggctctgtgtcctggagcatccctcctaccccgtgagcagcagtttccccatctataaaaacaggggcaataaattctgccccatcagtaacctggacgctgtgaggctgagatgactaagcacaagcctgaggcagagaggccactcccacaataggcaactgtccctttgcttctctcacttccccagctacctgcctcctccgcagccctgctacacagaacaggtgaaacaggaatgaaggtctcatccaagcaagggagaaaaaggataaactcttgtaacatcatcccagcagtccctgacatctgcattttcccaagagcactcacagttattagcatatttcaccatttattaagtcccccgtgccatgcaccctaaaagtgttcttaagcatcttctgttgcatttcgaccttacaactacccattttacaaatgacaaaacttaggctgggattttaagggatcaccagtaagcagtggagccaggagacaaccccagttctaatccagtccagtgcttcccaaactgtaatgtgcccatgaatcacctggggaaatggatgaataattagattctgattctgcggggctagactcaggcctaagctgctacacttgtaacaagctccaaagtagatggactaaactcttgagtgtcaagggctagattttaattctattaaggtagaacctgtgccactgaatctccaaggcttagcactggacctccccatagaatacactcaataattatgtactgaatgagtcaatgaatatctggcttaaaaccctatgcgttaacccttttctgtatcaagttccattgtatcagctgatcctcccaacaaattcctagggtatgatcattcccatttgatagataaggaaacagagactcacagtaagtaacctaaggctttacagcttttgcgcagccaaggctggaggtagtctaccttcagatcctttgacctaaccacagctgttccaaaagatacggcgggggagggggggacaatgacacccggggataacaattacagaccaccggttggagaggagctgacccatcccagcatgtgaccggctcacagctccagaggtcaccagagagctctgagctgctccctgggggaaggggcagccaggcctgtagcacctcaggagagaaacaggaaagggagaaggaggctggtcctgggcatagtgccaggcagcagtgggcaggtggtgaagggacccctgacctcccgggcccaagcacccgcttcgggaaccagctctggacagacactgtccagcttgcggggtgggagagttagaggcgttcaggaaaatcattgcctagcgatgaatcaccgggcacatgaccccgcaggggaggggaggggagggtgcggaaccggcgcgggaagcggtgggggcttggggagggcaagcctccggctcgggcccccctccagcctcgacttggggagcaaagggaagcccctctcccatgcagcacccctcctggcagcaccccgcctgcggcgaaactcacggccttcagctgctccagacggtccttcatcctgaagcccaggcgcccggaggcaggtagcgcgtcccaggtgagcgcgtcccaggtgagcgcttcccaggtgagctgccggaagcggcggccgggcccgccggggcgaaggagctggaggcgcaggcggcggcgggcggcggccgctagctaggaggagcgtccgaggccacgggagcctccgccgcgcagccccctccgcccccaccggcgcctcgcgctccaaatccggctcccgggccggcgccggcgcagcgctgatccgccctggacccgcccctacctggccgcgcccctcgctccttcttaaagggcccgcgtcccgccaccgcccggccgcccggggcgtctccaaagcccccttccctaacccgagagccctccagacacgcgtggagtccggggagaggcccctgcaccggcggatcctgccgcagggccgaggaagagcaagagcgactgtctggctgcggtcattcgctgtctgtgccgggctcctcgctaggatccagttcttagccgactccttgctaggcggggacaagctcccgaaaacaaataagacaatgtgatgtgggctacattgggtggcagtcgagtgttctaaaaatatcccgccaggaggaaggcattccgagtagcgggatcccgcgcagcctcagggctgctggcagtgaaagtggggggatggaggaggtgtccagaggaaagacctggagatctggagatacaggacggtcagggtggtcagagaatttggatcttttgcttgttggaaatcgggaccgctccgagaaacgtaagcagctcgatgttgttagtgccagtggagacacttggcactcacaatttgcagacgtttgggaaagcatcgtttctcaagaggaccccgttcccgtgtctgtaaatcagagatggtacccacttcgtagttcgctgtgaagcctgtgagcgaggaggggctttaaaatacagaactttgcactggagcgctccccgtcctcgcagcctgcttggtgtgcaggtggttcccaggcggcttctgcttccgaaaagcagatcgtccctttatctcgagtcttctccccgcctctccctcttctccctaccctatttgtcttcttgggaacaaatggcacattcatcagagtggagatccataaacgggactggcgagccgaagatttaattctgaagaataggatctgctctgtgctttcaggttaaaaagctgtaaatatctttgtaattctagcagtactttgccctcttctgccatctgaacgcgtgctccctgctgacctcatcggctcccataaagatacggtgcgtatggcagaggtcgggctttgagccggccccgcgggtctcggccgtagttctctctcgcgtccggcacacttccttctgcccgctgtgctcgctgggcaggttgtccccgccttagtaccaggagggcttccgcgccccctggtggtcatactaggaaaggcgagtagatcagaaatacacactgtcccacctccttcccctaacacatttttggggagtttgggggttgtttgtttgtttgtttgtttgtttgtttgttttttagacagagtctcattctgttgcgcaagttgagtgcagtgg

SEQ ID NO: 5665 - DNA, 6000 bp, Homo sapiens
acagaaggcagagctggtacgactgtcccagacactgagcctggtgccccggctgcattggctgctggtggaggatgctgagggtcccaccccgctggtctcagggctgctggctgcctctggcctcctcttcacacacctggtggtcctcacgcccaaagcccagcggcttcgggagggcgagcctggctgggttcatccccgtggtgtcgagcagcggaacaaggccctggactggctccggggcagagggggtgctgtgggtggggagaaggacccaccaccaccagggacccaaggagtcgtctactttgctgacgatgacaacacctacagccgggagctgtttgaggaggtgagcaccaggatggggatgggcaagagaccaggtgcggccagcttcattcgttaccttggttagcagtgttgccgttggctgctgggtgaggggctggaagcagtggggcagagtgagccaggtggctctttctgctgctcccttccccggaccacccctctgtttcttctctcccgacctccgttagatgcgctggacccgtggtgtctcagtgtggcctgtggggctggtgggcggcctgcgattcgagggccctcaggtacaggacggccgggtagtgggcttccacacagcatgggagcccagcaggcccttccctgtggatatggctggatttgccgtggccctgcccttgctgttagataagcccaatgcccaatttgattccaccgctccccggggccacctggagagcagtcttctgagccaccttgtggatcccaaggacctggagccacgggctgccaactgcactcgggtaagggaatggagatgggcatagaaacctggctcttggatggacaggtgatgggggaggtacagtgagaccctgggaatgggtggtttaaccaggagggactctccagatctctgatcagccttgctgactctactgaaggggaagctgggaactagcgggggaaagtggtctcctgccactctgccccgagttctgggaacccatgtggcacagagaggatgaaggaataaggccctgtttgttgtttttttttttttttcagacagagtctcgctgtgtcacccaggctggagtgcagtagcgcaatcttggcttagcgcaagctccgcctcccgggttcacaccattctcctgcctcagcctcccaagtagctgggactacaggcacccgctaccacgcccggctaatttttttgtgtttttagtagtgacggggtttcacggtgttagccaggatggtctcaatctcctgacctcgtgatccgccttcctcggcctcccaaagtgctggggttacaggcgtgagccacgcgcccggccaaggcccggttttagaggcactaagtcttcctccaccctgccctttacactttgaagcctatactgtatatgtcgatagggttagagaatccattccaggctcggggacccagaggcctggctgcagctgggcctggctctcactgcatccctcctggcacaggtactggtgtggcatactcggacagagaagcccaagatgaagcaggaggagcagctgcagcggcagggccggggctcagacccagcaattgaggtgtgatggcggccccaccccaactaccacctcttttcaggcacagaccttgtgggactgggccccaggcctgcccaggatgtggttttccaagtcctgacccttggagccagaagtggcccctctgcccctccaggcccagggcatggtcctgctgcttcacccctcccctagcctgccgtgtggcactgcccacaggctggggacaagcagcccttgtgttgagtcaggttggccctgtctagggtggaacagaaggacagatggacccaggagggagggcagctgagtaactgggtaacttattggggctgggcatgcactggggggctggaggagctgggctggacccttcccacctgagcatgctgacccccttcctacctccagaataaagaatctcaacctggaggggcctcttgttttcctttgcttcttacattgggttcttgctttctgatccttacagatgtgggctcctgttgctgcacaggtcgagccagggtccaaactttggagtcctagctgctccatcagacagaaatcagttctcccaggcccccatccccttgacaagaaaaagcaattgcttccatccaaaaactttattgagtctatatcagaatcagcctccaggccttctcatgtcactttcccatcactctgttctttgctgttccctggtggttctgactacaagggctaggccctaggacatctggttttctttcttaccccagtccagctcgctgactatccttagcccctctaatcctacgatccccccaacctggagccttggtaaggagttgtgaggttttcagacttgtccatccctccctcttcctcaccccaagctccaggcctctaggcctcagatagatcctccttgggaggtgcttctcctggtggggcctcctcaggtgctggcctgcaggcaacccctccctgtagccatgctgttttcagcatatctttcagcccactgggaaagagatagccctgggtctctcctcccgcatcaatgacccctccaagcccctccagtgctgtttgcaggtaccgcaggccaaggagcaccagagcctgtgggggaagcaaggggaaagagtcagggagagtcagcggttccaagaggcccagggttggaggcagggaggagtcccgggtgggaggaggtgtcagatgctttgctgactcacctgcagtaggaaggtgacagccagcatgctacccagtgtgcctgccaagtcctgcaagtgctccagcagcacctcatggcacccttgggcccagaggttttggttgggttgtcggggatcgaacagggggtgggcgtaggagtctgaaagacggttttgcaggcaaggccggggtgagtgggggttgcaacaggagaaagggaccccatcagtcaggtataggccttctacattgctctggatccggctgcaaagggagggacagaggggttaggatgtctggagatagaggcctgggggagggactgaagggcacaggtgttcagaagggaaaaagaatagtaaaacatttactgactgctgtactatgtgccagccaagcataattcacatcttcacaacaactctatcagataagtactattatttccattttacaggtgaaggaatgggcccagggtggtttggtaacatgccctgggtttcacagctaataaatggcagagctgtaaccagtctctcagccactatgttctacttattgcccctctgagcgaggtggggattcaaggcagcaggagggagcctgtccagggaggaggaggaggaggaagggagacgcaaatcactcactcagccacatcccggtcaccgggatccaggtaacggctgctgacccactggaccccaaaccaatccttgtacccgtggcgcccgcagcagtggtacctcagttgcagctcatccaccagccttttggcctgacagtgcccaggcacctctgtgtccttgtagtgagccaaggcagtcaccaggccctcctccagcgcctcatccagactcccaggcaaagccagggctagcccgaggccgacgaccaggagcccccccccaccagccgtgccagccaccagcagcgggcccaggacccctcgccagggagggtatagagctgcattcagacttgcccggctggctcctacacccactagtcctgtgcccagagccaccgcgcccgctgccagggcagcctggggcaggacagggaactgacaggagggagccaggaaggtgccaaggtgccttagctggaccaggaggtgcccactacagaggaggatgacgccaccagccagcgccagcagccaggagaggagccagagcccttgtgccaggcggatgcggggctgcaggggcagcaccaggggcaacaccggcgccatctcccatctctgcccaagggaatgcagaggtgtcagggatggaagctggctggggcaggatgctgagtcagcccggcccggcttgagctgggctaatgccaccctgaccccaataccctgagcatcctcccatcctcagccctaataacccgcccccctgtcagccccaatacaagatgccttggccttgccccttacgagaaactccgcccctaggccgagggcccgttttgtgaccccgcccctgcccctcgcggaagtggtggggttggtccgctcaaccctgaggggttaggggctggggggcggagatatcggggcgggcgctcccttccccgtcccctgggaatccgggggcggggatccgggaagggcctggagccggaggccgggagtaggccagggggtcagccggctagccccgcccccgtactgagcggcgaggcccggacagggaggggttaccaagcggcccggccccccctcgggcccgccccccctcccgcgcttcctggcggctccgcgtccggcgcctgtttgtgctgcggcgctgtggcaccggacggccctgccaccccacccccgggagccgagagcggccccgggagagtccgagggcccgggggggtctggagactgcggccccgggcccacagcgccccctccaggccccttccccgcgcccgacagcgccccctcggggtggtggtacggcgcccttcgcgcgcgccccggggtgcttccccttcccctctccccggccgtggcccccgcggcttagacgcctcctccgccgccgccgctcggagcaacccgggggccggatggacggggccgcggggcccggtgagtacggggcggggcgggcggcgtgccccttcccggagcgcccggctcgtcgggttatgccagagctggacggctgtctggaggcgtccccgcgtgctcctccgccccaggggctccgagcatcctccacagttcctccggtcgccctccctagttgcttgggtcttgctgtcacttcgggcttccccagcgtcattctacgccccacgtaactccgggcccctcgatgtttccctgccccctgcgttactccgggcctcttctcgtggtatttcaggtctttttccttctgatccccactgccccctgagaccttcactgtgactctgctcaccactcacactctctcctgtcactctggatctcttttcttgtactctgggtcctcagtatgactccattcccgcaccccgttctctctcctggtgttcccccggctcagttactcagctttcgctggagacctgagcttgctgggggcgcgtggggagggctgcggtccctgccctcaccagtgcggcgcctctctctgtggctcccacgttcctcggcagtactccatatttcccccccggtactccatggtactcccagtctttgcggaggctgagacggcagcaggaagggagctttgccaggtttctcgcctgccctgccagaaggaggcccttgatcctttaccaccgtctcctcccctctggacgagcattcaagcctggggctgcctgaaaggggcagtcctaccggacacatgtaaagttgtggggagacagaatcccctctacgctttcttcaggtgatgggtacattctgagtacctcttgcccttttcccaggtgacggccctgctcgggaggccctccagtctctgagccagcggcttcgggtgcaggagcaggagatggaactggtaaaggcagccctggcagaagcccttcgcctgctgcggctgcaggtgcccccttcctccctgcagggctctggcacaccagctcctccgggggacaggtatgcatgtcatcacaccccatttttcctcctccttggggcctctggggcttcaggttaattcaacatctctccagcagtct

SEQ ID NO: 5666 - DNA, 6000 bp, Homo sapiens
cttggcttcccaaagtgctgggattacaggcgtgagccaccgcgcccggacccaataagcccatttctatctgcaaaccacactggctaaaagatatgagcaaaggacactggggcaaaactgagaagtgccacagctcccagcaaacttctcttgcccattatgcgaatgtgcctacagctccacggcttgggaaacctggaaaaaaggcaggtagggctccctagaggccacgctttagagagaggaaggcactcggatttccaacaagagggaagttgcctgcaggggccactccttactcctcagaaaaggactagaactgagagcaggattgttcttagagttagagccacctgctgtgccttgactggctagctagggaaaagaagaggatgaaccccatcccacctcccaggctcttttatttggcccaaagacctctagaaaaggggacaagactgaggcaacatcaagaaggaggtaagacgtggggagtgaggggtgtcgttccagggccactcacatagttgggtgcaatgtcctggatggtgtgttccactccgtcatccactaccaccaccgtcacccctcgcccagtcacattgcgttcccacacacccgtcacgttgatgtccctgcccgggctccgtcggttattctgtaagagagacaggatgggaatacagtgacacatagcacagcccagagggagatgaagttatagctagcagccccttttcacccttggcctccaccaaagagccagacagattgcagaccaataggtcaggtgggaacagagtcaaggaggagcaggtgagagctctgccacagccttggattctaggaaagtttgtcatcagtcatgggggattcgggataaaatggtagctagggtgaagggttggatgatacacttctttttttttttttttttttgagacggagtcttgctctgtcacccaggctggagtgtggagtgcagtggcaggatctcggctcactgcaagctccgcctcccggattcacgccattctcctgcctcaggcttccgagtagctgcgactacaggcgcctgccaccacgcctggctaattttttgtatttttagtagagacagggtttcactgtgttagccaggatggtcttgatctcctgacctcgtgatctgcccatctcggcctcccaaagtgctgggattacaggcgtgagccaccgcaccgggccagatgatacacctcttatgccaatggtagtatcgtatcacttatgtcatagtgtttaccatgtgtcaggcatggttctaagtgctacacatgtatacattcacttaccctaaccataactctatgaggtaggcactattacaatctccactttacagatggagaagctgaggcacagagtttaagcagcttgcccaaatgcacatgctagtaagtggcagagctggaccatgagcccaggcagcctggctgcaccatctgtgccctgagcactgtagaacaccggcctctagaagacagtagaagggagggagagcctagggaaacaccacagaaccgggaaatggtccctcaggcaaaggatggaggtgactgaagagtgatatagtcaaaagcccattaaagaactggactggaacctacccacctgaaactgcaaactgcaggactggactcaccaggtgccattgctgcgggtacttggggtcgttgaagtggacgctgcgcttggcccgccttagcagcctctgctctgagtgccagcgcacagcttcatgcccagccaacacagcctccacctgctgccggatggcctccacctccagggccggcctgtgcccagcaggctggacaaagaggtagtgcccctgaagctctccgatgcgtccagcattcaccagccctgctgcctgggccaaggcatccgcctgctgctccagagtctcttcctccccgtcaccttccaggctttccaggtgcacagcccagctcggcccccctgtgccctggccatcaggcccacctgtccctgccaggcccatgacccagggaaccagtaagaagagcccggctaattccagccagaggcaggtgggcaggcccaggggggcatccaagtgtggcactttctgcctccccttcggcatcagagcagtggactgcagacaaagaaaaaggatatggaagagatcaaagagctggtaactgcaggaatctgagagggagatgctgagccatccatgtgttccccctggaagtccctaagccatgccttttaaattgtgaaacatttgatcttctctttttgttcacatttatccctgaccaacagggataagcccccaggtggagtgtgggccagcactaacaccagcggatggcctcccacagcaagacagccaatcctcacgacaccagctaatccagcaggaggtccagttgctcacaggcactgcgagcaacccctgttgccacccacagggctcaaagcacacatcgcttccacaaactactggctgcatcgtgactgttctttagcagagacaaccccttcacccctacatttagaggggacataaatctttccctagctgactcctcagtccagttgtcctcaaggctaattccccataacagggccccgtgcccacctggattctacatgaggttgagctcctggtctggctaaccacgtcacactcatgttgtgcaaatggagaaaaggcatcactttcactgtgagtagtgttgactcagcaaaggctacagacctgtgggatccaagaacagaagaaataatgtcccaccaatcccagggcaacaagctgaggttagataaactccaggaccagggaccaaagaaacttcattaattgtcatttccaaagatctaaaatcggtcatagactggagcagaactggtacggtgaggccaaatcagtataacacccaaaaaacccacttcctgtgctatcgtgccaccctcttttcattttgttccccagaggcctagcaaaaaacagttaccaaaatgcctcttgaaagagtaggtaataacgtcctagaagtccaggtggtagctaacttcttgatttgtatatcccagaaggataccagggaaagtgaaaggagggaggcggcgggggcgaaacggggaaagccagagagtgcaaacaaaacagaacaggcaccaaggacaagcgggcaaccaggagagaacgaatgatgagagaacctcactaagcagctactcctgtactgagctcaggaggctggcttcaaggtgaggactcagactccagactgggactccaattgcctgggtttgacagaaccagggaattggtctcaggagccctcaaaaaaaaaaaaaaagagccaagttagaactgggggacagacaaatggggtggcaggacatgtgtgtacctatggtggctgggctcctttaaaagcctttgctctccactgggtccaccctggggcagggcttagtactcagatacacacccaagcggctctacctcaaagcattccagaaaaatgggaattttactgaaaggcttcctggaaaggagaacttatgccacctctcctttacctctaaaaatcttcatactacatttcttcctctcgttttctcttaggtttccaggcatattccctctcaatccctccctgcccccgggagcctcaattctcccaagatatttaggtgtcttccccagtctgcatactctactaagtaaacaaactaacaaacaaaacccttgttagccagacagtggccccgctaggcagactccttcagactcagtagatcccaccacagatgtcaggaagaaagagaagcaggagctccttctgtctactagtggcaaagcagcatttttatcccccaggcttctgggaaaggaaccttaaatgccttctgaaagcaggtctcaacctctcccaacggctaggcctccctttacagctcttaattgacaaggaagaagagaatgggcagcctggagtccaagatcctgctcccaagctactgtcctcgctgttccacacccggctcctagaagccagcttgggtaccgggtcagtttcccgattctccctccgtcggcctcgatcgctccgtgcaatgtgcccctctcctcattagcacccacattatccaggaattctgggccctggggccccatctccttggtcccccacgccaggacctcaggcaccctctgtgcagctccctcatcctcagacgccggcttcccccacttctggggccccctgaccacccaggtccagccccacacctagttcccaactcaccggccccgccgcagctgccgccgcctccctgcggaaactcgcggcttcccgggagccggaggagcagtgacagcagcatcacttccgcccgcggcgcagccaatcagcgcggcgcctgcggcccggcgacccccgcgggccacagcaaccggcgcccggggtccggctcccgcgggcggcctacgcaggcaggggccgtgcgggcgctgggggctgaacccgcgggctccgcctccccgagtcctcggggcatcttccacatggtccctcttcagaaggctctccttcatggcgtcctctgtaaagggcatttcggttccgacctttaaaagccactcgttgctcttctccttctgaccgccatggccccgactgtccctgtaatcttcccagaggggatcctgcccacccaggtcgccttccttctcgcagtcggctctcccttcttccccgcgccccgggagagtccacttgtatctcaggggtctcccgcagcatccccgtgccccggcggcgccagctgtcgccgccagagggcgccgtcgggggcggcgcggcgccaccgcggcctctcctctcgcggccggagcctcgccccctccgctcgtgccgccggaagtgggaggtgccgcgcgcgggccggcgctcgacccctccccccgtggctcggccgccccctccccccgctccgcccgctcaggtgcgtcccgtccctcccccactttcctcccgggggcgcggcgcgggaggtgtgtgcggggcgagcgtgggtgggggttgcggggcgagggccgggcatgggggtcgggtggggggcgtggagggtgctgtgagaaccgaggcgggggtcccggcctagaagtgggacgggggggtggctggcagcggggtggggggaccgaggggaaggggtggaggggggtctggtccgagccagcggccagcctagcagtcccctgtggggggtggccaaggccacccagcgccgcttccccccattgtccccttcccgtctgtcccctgttctcgcccgaggacccgtggctccggcgcccctgcttcgctggtggtcgccccgggttgcggagttctttttggtacactcgaccctccagccagctgttcctacccgcgccacgggctctctagccacggagttgcatgcatggcccttgtcctggggtttcgttcaccgggcgcagaggaccccccagccctgggctatgttggagacgggatgtttgcacctgagggagcagcaatggcggtttgggcccattttctcccaggagctttgtataatgagggaaactgaggcacagagggtctgtgggctgtgactgaggtgttgacacagccccatctacctatctgccctatgcgctcttcagtgttccgggggggaatacgtgtgatgctgttaaaataaaagcaagaatgcaaactaacccgatgttcatccccacctcccaagtattttgattttcttttctcctcataaggtcataagtttgctctgcggcataaaagatgaccttttgatttttaaaaaaggcgtccgtcccagttcccttacttgtgttaccatgttttttaccttgactttttcacgctagagaacccaggattcttttttgcaccactagtcactctgaagagtctg

SEQ ID NO: 5667 - DNA, 6000 bp, Homo sapiens
acaagtggcaacctaaaattaagtatgtgattcatatccaggatgaggcaagttcccttaggatcaacagggcctgcaaggcaaaggtttcctttagttgacctggatatgggtttattgcagtctgtgtgaccacctgtgtaggtgggtaaggagatgagagggcaacacgacatttgcctagtggcctataggcttactcacctgtattttttcaggttgaaatcatcagttgattcagcaaattttttatttatttatttatttagagacagagtctggctctgtcacccaggctggagtgcagtggtgcaatctcggctcactgcaacctttgcctcctgggttcaagcgattctcctgcctcacccccacaaagtagctgggattacaggcaccccccaccacacccggctaatttttgtattttagtagagacagggtttcaccgtgttggccaagtgggtctggagctcctgacctcaggtgatccgccctcctcaccctcccaaagtgcagggattacaggcatgagctgccacgcccggccaattcagcaaatttatgtgggattccacctagaactccaaaccaaggtgctctgaatatgtattggtagtataaacagaatccacagccctatcctggattataagctcgttagggaggtagcaaaatacatgacactgacctaagaacacatgaaaagcaaagaaacatgaatgcaaagtcatgtcatataagctgtttaaatcctgagtaagatgaatttaatttgcatctatcctactgacctataatccgtgactcacttgtctctctcctccagtagacatgactaggcatgacccatatagtactgaactttgtattcccagcaccttaccaaagtaggtgctgggaatacaaagaggagacaccccacaaatgttaaataaaacacttaatgaatggttctaggtaggtggggttgatcaaggaattatcttacaagtggtatgggttttttggttttttctgaggtgcagtctcaccatgttgcccaggtgattctcctgactcagcctcccaagtagctgggattacaggcactaatttttgtattttagtagagacagagtttcaccatgttggccaggtgggtctcgagctcctggcctcaggtggtccacctgcctctgcctcccaaagtgctgggattacaggtgtgagccaccgcgcccaacctagtctttttatagaacagttatctctgtagccaaacttacatcatattatttaattttccttgattcgggggaggggggagggatagcattaggagatatacctaatgctaaatgacgagttaatgggtgcagcacaccaacatggcacatgtatacatatgtaacaaacctccatgttgtgcatatgtaccttaaaacttaaagtataataaaataaaagatttacataaaacatttttccttgattctgtattaaaggaaagatgacattattttcaatgtctgcaaaatatttcactgatgggcatttagagtgtttccatttcccgctatcatagatactgctttaatgaatattttttgtttataaatagttttctttttttgtgtgtggatatagaatcttgctttgttgcccaggctggagtgcagtggcacaatctcggctcactgcaacctctgcctcccggattcaagcaattctcctgcctcagcctcccgagtagctgggactacaggcgcacgccgccacgcccagccgatttcttttgttcaggctggtcttgaactcctgagctcaggcaatccgcctgcctcgacctcccaaagtgctaggattataggcgtgaggcaccccgcctgacctataaatatttttctaagaacatttccttaggctatattcctaaacatggaattattgggaacatttttatttttctattttttttcatctcttcagtattcaaaacattcctaaattctggccgggtgcggtggctcacgcctgtaatcccagcactttgggaggccgaggcgggcagatcacgaggtcaggagatcaaagccatcctggctaacatggtgaaaccccaactctactaaaaatacaaaaacaaaattagctgggcgtggtggcgggcacctgtagtcccagctacttgggaggctaaggcaggagaatgccatgaacctgggaggtggagcttgcagcaagctgagatcaggccactgcactccagcctgggcgacagagcgagactccatctcaaaaaaaaaaaaaatcttaaatttctatataagttgtcaaactattttttccagtttaatcaacttacacttctaccagcagtatgagagcttttatcccactgcacagtcacataggaaaaatggtttatgtaaaggacctctcttctgttatttaatacccatgaatttcttatatagttgtaatcagcgaacccatactactttgggttctgcttatttcacggggaaggattctatatctatcaatatagttcacattctagccatttaaaatcattctttaattcttcattgtgttaacagatcccaataagcttggcgattttcttattgtcaggactcgggtttatttccagtttttgctattaaattggctatttctgcatctttgcacagtctcccctactttaccaagagtgaaactgcttgatcaaagaatagaaaatgttttgtagctcgcattagacactgccaagttgttgggcaaggtttttaaaaaaggaatattggctgtacagaggtgcagctgtgtggaccatcattcctgagcagggtccaatagcctggcatcttacctggaagtcaggacatctaaacttccctatgggaacttggtaagccccttccccatttcgaacctcaattttcttatctataaaatgaagaatttggatggaatgaattaatccttttctaccagaaatctagccatatttcacctagtctattctgtatcaccctctcctgactcctacgtgctcagaatctagctcagtgcttgggacagttatgtttcctttccctttgaagtgcccaaataccagtgtaatgagaaatatggcagagcctgagagttcagagcacaggccagggtcaaatctcagccctccacttacaagctgtgtgacaaaataacctcccccgggctcagtttcttcactgtaaattaggttaattgttccaacctcatagggttgttaggagaattaaatgagttaaggtttgcaaaacgctaagaacagtgcctggcacacagtaagtgctttataaagtgtttgttgaataaataaaattttggacctaaactctgggtctcttcaggactgcaacagctttgtaactggcaaccccacttttaggtgcgttcccactcctctaaaacccagagatctaaatgccaaatctctctgcttaaaaagtctcccagggctcctaggcgcctccaggctagaacagaaatgcctcagcttgaagacccaggcttttcaggtgaaacacctaagggtcaggagacgctaggatcatcactcaaggatcccagtgaatttttccaaaatacaataaaaataaaaacaaaaagaggcaaacagggttataaaaattgtggggcattttaaatgtttcattgaacaaattaaagcattaacagccctcccccaaccaccaccaagcccaagagaccgtaaatatgctgttcacaagataactgcaactttcaagggctctcaggctgctacttcgggcagcacaattggcggcacgacgtggcaagcaggcagtagtttccaaccctggagggtcagcgtctggagaccccggccaaggcatccacagcctaaagatgatgtccgcgaccgcccgggcagcctcgtgcacggaaaaacctcaaccccggccccgcccacccttcctgcggccaccccgcagccctggcccctcagtccattcactcctgcagcgcggccccgcacccagggcctgcactagaaccgctgttcctaccgcggcgccccctgggagccaacgccgcgatgcccgcctgacgtcaggaagtcgaatccggcggcgacgcctttagggagcccgcgagggggcgcgtgttggcagcccagctgtgagttgcccaagacccaccgggggacgggatctcgctccccgcgccacgaggctcggccaatgggaacgcgcgctgcgaggcccgccggtctgccctgcggtgctgaaaacccggcgcgcaggcggctggctctgggcgcgcgccagcaaatccactcctggagcccgcggaccccgagcacgcgcctgacagcccctgctggcccggcgcgcggcgtcgccaggccagctatggcccccgacccggtggccgccgagaccgcggctcagggacctaccccgcgctacttcacctgggacgaggtggcccagcgctcagggtgcgaggagcggtggctagtgatcgaccgtaaggtgtacaacatcagcgagttcacccgccggcatccagggggctcccgggtcatcagccactacgccgggcaggatgccacggtgagcgcagccaggcgggggcacaggagagggcgggaccggaggctgagtgcaggggagacagagttacgcactccgagccaaacaccgactaattcggaggaaagcccggaggcgcctgatcatacctgttgcccggtgattgggtgtcctgcggatgcgggatgaaaaggcgggagagaggcctggagaagtggagtctggggagtggggatggaggccaacaacacgcacacacaaacaaagggtcccgcctccctgccgtgcattccatctgcagccccgagcctcaggtctctgggcggggacagaaccccgagctgggtaggctaggagggaggagagcaaggatgcaggccgcctggggagggagggggtcagtggccaggggagggagtcacatcctgtctcgatggctaggagaggcagcgcagccgcgtctggacctaggtgccggtctccactcgccagcaggagcggagagggagcaggaaaggagcccattctcgaggatggggctgaaacgggaagcttggggagaccgctgccttggggacccctgcgtcgtgtgaagactggaggacgcggaagggacagcgctggccggggagggcaagcggccgctggcgtacataagggattgggaatggcatacacttagcgaggacccccagagctgttctcgaatcgccggggaggccactgagccgcaggccagcgaggtcttcagctattccgcggagcggaccgctgtttacgctctggggcggtaggcccttcgcggggtcctgtcccttcttcccttggtctcactgcggggtcggcgcgcgccccagccccaggcctgctgcttccctttctagaccacagccctcagagctaaggccccggcgcctctctgctgggttggagtcctggggactcagtcctagggactcgaaagtcggggcgttcccttcaccgcgtttcccccttggcggccagaatggcgtcccctccccttgcatccccctctgatcccgtgccctgcagcgtgatgccctccactgtccctatccactaccctggcgtcccagagtgtgccgcgggtcaccaggttcccataacgtcgcagcagagcttagacgctgcggggcgaagacccgccccaccctctgacgcgaccagcctagtgggcgaggccagagcttgcgcgggtcaaccagagtgaccactcgggagccctgactgcggccaagggcgcaggcgtgtcccggcgcatgcgcagacgaaacaggcaccaacgctggagcttcccgcagtgtgatttggggccgggaatgccgcggcggggacggcgattggtccgtatgtgtggtgccaccggccgccggctccgccccggccc

SEQ ID NO: 5668 - DNA, 6000 bp, Homo sapiens
ttgagacagagtctcgccttgtcgcccaggtttcacaccattctcctgcctcagcctcccaagtagctgggactacaggcgcacgccatcacacccggctaattttttttttgtatttttagtagagacggggtttcaccatgttaaccaggatggtctcgaactcctgacctcgtgatccacccacctcagcctcccaaagtgctgggattacaggcgtgagccaccgcgcccggccaatactgctctttactgcgctgagatgtttgtgtaaagtcaatcataaatgtggcctacgtgcacatcaaggcacagcacctttccttaaacttatttatgacacagagtcctttgctcacatgttttcctgctgaccctctccccaccattaccctatagtcctgccacatccctctggctgagatggtagagatagtgatcaataaatactgagggaactcagagaccagtgctggtgcgggtcctccgtatgctgagcgccagtccccgggtccacttttcttcctctatactttgtctctgtgtcttatttcttttctcagtctctcgtcccacctgacgagaaatacccacaggtgtggaggggctggcccccttcaggattacaggcgtgagccgctccacccagcctactttttttaaaatgccctcttttctagtagattctatgtcactcacaagaggttgcaaactcacaatcaaaggccacctttggcccacgggcatattttggttttttgtttgtttttgagactcactcttgtcccccaggctggagtgcagtggggtgatcttggctcactgcaacttccacctcccgggttcaaccacttctcctgcctcagcctcctaagtagctaggattacaatcgcctgccaccgcacccacaccacgcccggcttatttttgaatttttagtagagaagggttttcaccatgttggccatgctggtctctaatgtggggaaaagcaagagagatcagattgttactgtgtctgtgtagaaagaaatagacatgggagactccattttgttatgtactaagaaaaattcttctgccttgagattctgtgaccttacccccaaccccgtgctctctgaaacatgtgctgtgtcaaactcagggttcaatggattaagggcggtgcgagatgtgctttgttaaacagatgcttgaaggcagcatgctccttaagagtcatcaccactccctaatctcaagtacccagggacacaaaaactgcggaaggccgcagggacctctgcctaggaaagccaggtattgtccaaggtttctccccatgtgatagtctgaaatatggcctcgtgggaagggaaagacctgactgtcccccagcccgacacccgtaaagcgtctgtgctgaggaggattagtataagaggaaggcatgcctcttgcagttgagacaagaggaaggcatctgtctcctgcccgtccctgggcaatggaatgtctcggtataaaacccgattgtacgttccatctactgagatagggaaaaaccgccttagggctggaggtgggatctgcgggcagcaatactgctttgtaaagcattgagatgtttatgtgtatgcatatctaaaagcacagcacttaatcctttaccttgtctatgatgcaaagacctttgttcacgtgtttgtctgctgaccctctccccactattgtcttgtggccctgacacaaccccctcttcgagaaacacccacgaatgatcaataaatactaagggaactcagaggctggcgggatcctccatatgctgaacgctggttccccgggtccccttatttctttctctatactttgtctctgtctttttctttcctaagtctctcgttccaccttaggagaaacatccacaggtgtggaggggcaacccaccccttcactctaactcctgacctcaggtgatccgcccactttggcctcccaaggtgctaggattacaggcatgagccaccacgcccggccaaaaaattttaaattcaacatttcaacgtgagtaaatacacaattctggacttctggattcttttgaaaactgactatctgatcacacagagacaatattgtcgcaaggcaacaatcagctggagctgtgaaagggctgcccagttcaccagagtcccaactcagttcatttcacttacctacattacttagctgatttctgtacgtgagttggagacccctaacctaaatcccctcttttccacttccactgccattatacttgttagcattgaatcctcttgcctaaactactatggcaatctaattaatgcccttgtctccatcttatcccccaatgtcttatcactttcctacttaaaaactctccccggtttttttttcttttctatgtataattcaaatgatttagctttgcattcaaggtcctgcttatctggctttccccaggaaatactttccagttttatattctaatactccccttttgcccatctttcatgaattgtagctacacacttccttctttttctagcaccaagcttgtgctccagttgttcctttaactggaattcccctcccaagtctttctaccctttcaggcccagacactctataaagcatttcccgactgccattcccacacacaacctccccagccttgtctgtctactctgggccatcttgattttccagtttatctgtcccacattttttttttttttttttttttttttttgagacagggtcaatctcagtcatccaggctggagtgcagtgcagtggcttgatcacagctcatttgcagtctcaacctcctgggctcaagcaatcctcccaccttagcctcccaagcagctggggctacaggcatgcaccaccgctcctggctaattttttctattttttttgtagagatcggtatgggtttctcactatgttgcttagactggtcttgaactcttgggctcaagagatcctcccgccttggcctcccaaaatgctgagccaggccgggtgtggtggcccacccctgtaatcccagcagtttgggaggctgaggcaggaggtcacctgaggtcagtagttcgagagcagcctggccaacatgatgaaaccccgtctctccgaaaaacacaaaaattagtgtggcatgatgatggcgggagcctgtaatcccagctactcaggaggctgaggaaggagaatcgcttgaacctgggaagcggaggttgcagtgaacagacatcccgccactgcactccagcctgggcgacagagcaagcctccgtcttgaaagaaaaaaatgtttggccgggcgcggtggctcacgcctgtaatcccagcactttgggaggccgaggcaggcggatcacccgaggtcaggagttcaagaccggcctgaccaacatggagaaaccctgtctctactaaaaatacaaaattagccggtcacagtggcgcatgcctgtaatcccagctactcaggaggctgaggcaggagaattgcttgaacccgggaggtggaatgcagtgagctgagatcgggccattgcattccagcctgggcaacaagagcgaaactccgtctcaaaaaaaaaaaaaaagaaagaaaaaaatgtttataaagtgtgcttgtacacgtagatgtttaccacaaacgactgaactaatgttgtccggtctcagtaaaacagtctatagctgactgcaaccatattgatcaggcaggagttgcagcaggcagcaccgccggagctctttagggttccccatcaataaaatgggggttgtcatcctacctagctcttgggattttggtggattaatcgattcatatagtgtgcttaaaacggtgctccataaatgttagctaatgttggcccgtagtagtccaagatctaaagaaaacgcaccagaaggcaggacatagggaaccagttaggaaaaaatcagatcctgtcttcagtgaagcacttacgtcctgacatactttcccgaaatggccccaccaaaggggacctcctcccgagcttagcccgggatccagtacctgagtcgtcccccgcgctgagaccctggacaccagcctccgaatgtgagccaggcaactggcgcggaatcgacacgacggcgatcgaggcttcaggaggctgtagctccatggaggcggatcctgcacacaggtttggggtgtgtgggcaaggggcagctcagaacagggttagagggtaggcagtcgtgaccgtcagtccaggatcgccgtgaggcagtgatctcaccgctcctgccacatgcactgggtgagaaaaccaagccgcaatgcggtcggtgagccagcacgctcccgtaggacgcatgcgcgcctttttcgcgccgcaagttcaggtggcgctttgtctacgccctccttccctggaactctctacccacaactccccggggtcgcatgcggtcaacgtatgcgcgtgcgctcgccgtagccccgcccccaaatcccgtgggcctctgcggcatggtatttaatcgtctccccggggagattcgttctcatttttctactgctcgtggtaagtggcttcgtggtctttatagctgttactcttttgtactttgtctttttcttttattttcttttgagcgattgtgcgaacatagcatagcacgcactatgccttctgtgttgtagctgcctggccagggcgactggcggataaggtcttgtgcgtggcctcgaggcttaaaagtagcagtggggctttgtgaaggacaaaatggcgatggcgggccgtgtaggtcccccttcctatgatgaggaccttttcacagacctgtactgagctccgtgaggataaataactctgaggagatgggccctgcaagcctcttgcttagccgtctgttcagaaaatagcgttttcgaaatgccctgagttgacctaatgtcttattgggctcctgtctgcaggatttacgcgcacgttggaaccgaagagagctctgttgttgcagtaagttcttacggccatttcttaatctctgctctttcgttgagtgtgtggaagttgctacggggatgattttacgaactgaactctctctttctgatggattagtggagaaaacagaaaattctgagtagcactgtactgtacgcaacaaatgtcagggccctattgatttgtctgaggtgttagtgaagggtgttattttttcagatgttcagcccacaagagcttactggtgaaggaatgggacaagacccatctttatgcaaagccagcgttacagtaatgttccaggtaggtgtacatggtttatgctcttacagaggagaccttgtagataaccactccatgatgaacacaaaatgacaagcatatggctgaactttcaagtgatgtcatcttactactgagaagtgagagagaggtcttaaggggtctttgaatgactatttttaggtacataaaatgctttcctctgttgtctacagcatctcataatctatcctggggaattcagctgcctcccagggtgaatacaggtaattatccaaattggtgtatgtcatctttgtaaatgttcaagaaaacaagtggccggcggaacaatgttttttggcgccttccatcttgttcctcttgaaatgattttctggggagggagatcgcaacccggtactacagttcttgtaagggtgtgctgttaccctcatccatatatcgatcacgttactgtcagatgatttgaattgataagctgatgttctgtgaggtacaaaagttaatagcatgttagagttctgatggcagttgttgtttatgaataagcttcattccatcctaataccttaaaataactaatttgctttcctttccaggtattcctgatgacagtctgcctctatcttacagtaagttgtttttcgaattctatgggcctattatctaatagataacttagccattttgata

SEQ ID NO: 5669 - DNA, 6000 bp, Homo sapiens
ggactggtcaggggacagcctccacacactggcatccccagtgatgtcaccctgcctttggccccagttatgagttaagagagaaaaaataactttgtcattttctttttttttttgagatagagtcttgctctgttgcccagactggacactgtgcagtggcacaatcttggctcactgcaacctccgcctcctgggttcaagtgattcttctgcctcagcctcctgagtagctgggattacaggcgtgcaaaaccatgcccagctaattttttgtatttttagtagggacagggtttcaccatgttggccaggctggtctgaaactcctggtgtcaagtgatctgtccacctcagcctcccagagtgttgggattacaggcatgagccactgcgcccggccacttttttcagtttcttcagaggaaatatatttctgtttgggggacttaagtatctagtagccatttcctgagctgtgtacatttcctatttgtttatgctaacatgagtctatggggccaggcacagtggctcccgcctgatgccagagcttcaggaggctgaggctgcagtgagctgtgattgccacactccagcctgggtgagaggaaggctctgtccttaaaaaaacataaacaaacaaaaataaaataaaatgaatctagggacaaagtgagggatttccatcttcctgccactagcggccgagacagaggcaggtggccatcgccttgggagccggcagtgtggcgtgcttagccactttgtgcagggctgagcaggtaggggatggagccagcagaactgatccgaggaagttacatcaactctctaaatctgtcaaggaacacccccctctccaaagtggaattactagacagaacttagggaaaacgtggggtgaggccgagtgctctctgtgcagcagcaattcgggcctctgggtgctgtcctggaggggcacgcagcaggataccactgtggaggatcctctccctgaaagagaaaggggccgtgagcaaggcctgacagccaccaggatgctttcccgggtctcgctccacactgacaggaaccacccctgctttattttcctttgatctcgtatttgtagaaagcagcaaacatataccgtgggcctgccactagatagctcccgtgcctctctaaccatccttcaatgaggctaggagtctctgcctttcagaacctgaggctggagacagcgagtaccgggggcaccggggtgggaagtgaacctgggccagacccagctggccctcagggaaagcagcaccctggagcccaccccaacagctgctctcattgtctgtggctcaccgtctgtggcttctccgtatttgccacacatatatgactagatgaaaaccttttctgacttaggttgtaacaaatcttttttcatgattgatgagacatttgctttcctctgaaattttatccccaaatatccctccaaaaataaggattttccaaaccagcaatgcagctgtccagtctttttatcatgcaacctcttgggccttctcccacccccacctgagagatgacaggaagcccgaggagtgagtggagtctctttcctcctttttgattctgaggttttgcatctgaagacgcctctgactcaccctggatccacgctgacctggagcggactaattgtctgaaaagggctcaggccagttgcacgtgtgatatgtgcacgtccctccatgtgtagatacctcaatacacatctagaattgggtggaaacctctcataaaaggaggctcaagctgcaccgctgggcggcaggcaggacagcaacctgaacacagcctctgttctatttccccttcagcgccagggagggcaggacagaaacctggcgttggtgagattttgtggctgatcccacagcttcttgggcagatctggggccttctgtgccagagtttgtggaatctcacacaggcaagagttttaagccagtaaatacaggacatcggcatcagagactcagaactgggctcctggaagaggcaccacaggatggaagcaggaagccaagtgcacggcagaccacgccgcatcgcgttcccggcaggccactctttaaacccgatctgttcttttccaggccttagctaaaccaggccacctaaatacctgtcattatctgtgatgatttcgcattaattggggtttttgtcccttctgttccttttcttaaaggctggcttcttaaacacttccaatgtgtctgctagttgctcactgttatagattgaagttatggggcttgggggaaaaactgtataaaagccttaagtgatgtaacattttaataattaatatgaagggcggctataaccagatacgctgttctaacaattccagacctgcaggagctcattctgaccgaacgtagccttggctttcaggacaacattttttgtcagtgacttactataatcacaatgtggctacgaatagctgtgtcaggcagaagttaaacatggaagtgaaagagaacaagtgttttccctgatgtaatggacaagatgtgttaagaaatcttgttttggtatacacttagtttttttagagacagggttttgctctgttgcccaggctggagtgcagtggcctgatcacagctcactgcagtctcaacctcctgggctccagtgatccgccagcctcagcctcccacgtagctgggaccacaggctccctgaggtaattttttttttttttgagacagaatttcgctcttgttgcccaggctgcagtgcaatggtgcgatcttggccaactgcaacctccgcaccccaccccccccaccaccaccaccgggttcgagcaattctcctgcctcagactctcaagtagctgggattacaggcatgcaccatcacgccaggctaattttgtatttttagtagagacggggtttctccatgttggtcaggctggtcttgaaccctcgacctcaggtgatccgcccgctttggcctcccaaagtgctgggattacaggcgtgagctactgcgcctggccttccccggggtaatttttaattttttttttgtagaagggggtctcgctctgtcgcccaggctggagtgcagtggcgccatcacggctcactgcaacctcgacctcctgggctcaagtgatccgccagcctcagcctccagaatagcttggcccacaggggtgcgccaccgcctggctgatgtttacagttttttttttatagagggggtcttgctatgttgcccaggctggcctcaaatgatcctgcagcctcggcttcccaaactgtcaggcttacaggcctgagccactgcgcccaacctaaacttaatttttaaccaaatgaaaatacacaaaacaaacctggttactagaggctgtcctgcctatggagtagccattctttattccttcaaaacaatgcacctaattactagagaacacgcacgaaggtttggcacttcagcgcccgcgtatgggagttctggctgtacccacagacagcagaaggcggctcctctgcaggatggccgatttactgctttggtctgtcccttcctcctctcggaggcgagtctctcaggcaggacggctgaggcaccggcgcccgcgattttctttggcgagagttccaaggctaccgaaaccctgcgcccatcccgcccacgtgtcttcacaaaaaccacgcgcgggacaagagctgccggggactggggcccccagagccgctccgcacccaccctgcccggggccaggcgcccgcgcgcgggggagctcttcggggtgcaggacgcccgccacccaggccaggccaggccgcgcttctcgatggggtgacggagctgtctcgctcacgtagagacggtggcacggccccgtgagcgcaccgaaagcggaaaccggattgtcaccacagggaaacgccgcgcccgccgctgcaagcccggaagcccccaccccgcccgagctcacctcgccgcggggccgccatcttacccgccccgcccgccggtccgtcgcgatcccggcagcctctcggcccgcgcgctcgcgctccttcggccattttcgcgtctcctgacgaaggggcccgaccgcgccgcgtttcgggagcggacgtccgagccacggccgaggcccgattagtccgtccggcaccgctcgggcactttcggaagggaagaggtggagaaccgacgttcgggagcattcggcctcggggacattcggctcgtctcggctcggcctcgggctgactcggcttccgccggcggcgggaacgggcgaaacccgcggcactaagctctctctgagaggcagaattgcgccggccgccggcgagaatctgcctagagccgtccagccctgtcggccggggacgacagccgcctcagcctgtcaggacagtgaggagagcaggggccgagtctctcggaagccctcgtgaggactcggacctattcggactgattcggcttcccacttcggggaacttcgaccctcctcggttcaggactcggtctcggctcggcggcttcgtgcaggttcggctcctactcgggcagcctctgttcgcctcggctccgctccgcgggcggactcggctcggctctgctcggcggctggctgccttttcggtccctattcgggcggcggcttcgggcggcctcggcccagctcgggcgtcctcttcgggccccgcttcgggctccgcgaccggcgcttcgggcggtcccggacggcgccttcgggaaggctcggcggagtccggatggaggactcggactcggcggcaaagcagctgggcctggctgaggcggcggcggtggcggccgcggccgctgtggcggcggcggccgcggccgcggcaggaggcgaggcggaggagccggtgctgagcagggacgaggactcggaggaggacgcagactcggaggcggagcgggagacgccgcgggtcacggcagtggcggtgatggcggcggagcccgggcacatggacatgggcgccgaggccctgcccggccccgacgaggccgccgctgccgcagccttcgcaggcaagtgcgcccgccggcctctcgcctcgtccggttcccgcgcgcctaccccgcgcgcctgccccgcacaactgtcccaggtgaccagcccgccacacctgtccctcacacctgctccacgtgaccagcccgctccacccgccctgcacacctgcccctcacacctgctccacgtgacccgcccgccccacccgccctgcacacctgccccacgtgactagctcacccctcacatctgcctctcacacctgccccacccgcccctcacactttccccacgtacctgctccaggtgaccagcctgccccacctgccacaaatacctgcctcgcacacctgctcgacgtttccagccttccccacctgccccacgtgatcggcctgccctacctgccccgcacacctgccccacatacctgccccaggtgaccagcctgccccacctaccccaaacacctgccccgcacacctgcccctggtgacctgcctagcctcacctgacctggccctgccctgcacacacctgccccctgccccccttttctttgtggcagccccgcctcctactggtcccccctgtgcagctctgcccctgccctgccttcgtccatcctggctccccccacctgtcctggagaagccctggggtgggtgggcacctgtggtcaccaggaaccccccacttcctgagggccagttcaggcatgacctgagcgctggggagccaggggtgggcagcctgctggaggccatgatgccagaggtcagcgtggctgtgtggtggcccaggggggctgcggagccacctgtgcaggctcccctcccagtcctccctcttcctcttgcctttttccctaaggacctgctcctcctgccccgcttcctgtcggg

SEQ ID NO: 5670 - DNA, 6000 bp, Homo sapiens
tggtggtacttctccactcctttgtagtttttccaataattcaattgctctacaaatatctagagttaaacacacacacagataattttctccaagggttttctcaatgcctatgtaacagtggggcagttaggattcattcctcaagggcaaataatatacagacaatcgaggggaaaaaaagcattgaatttgcacatttggtgggaaggagactgtgtgtgtgtacacacatggagggtgagaatgtaaaatgtaagaacactaaattttacagtagataggaaaaactactgagattacagaagcataaaataagaccttggagaaacacaggcaaattgaacacaaaataccaaatgtcatcggaaaggactgtgactcaaatgtgaccgatacatgaacattgtactgcttcagaaaagctagcaatattgtcagaaactagtcaataaaaatttacctaattattattagtaaccaaagcactgaacagtacaaggcactataagctagtaaaatcactggtcattcctcgaaagaaacatgatacataggtagataaccactcgagagcagatgcagttagtggcagggacacatttaaaacaaccataaaaatgcaaaaaacaagcagtacaaatgaaataaactgattttttttcaacttaattaacactgttaattcaaacaagctccaacacttatgtttacaaaaaagaaaaataaaaacaattagctttatcaatctggtctcaataccacctgtgtgaccttgggcaagttacatgatgtccttatgtctcagtttctttcactgtacaatggaaataacagtaccttccatataagggttatgaggaagagttatgagttcagttaacaactgaaccacaaaatacataaaaaagggcttagcaagcaaaagtgttatgttacattggtaccaattaatcataagaaatattggctgggaatagtggcttatgcctgtaatcccagcactttgggaggccgaggcgggtggatcacctgaggtcaagagttcaagaccagcctggccaacatggtgaaaccccaactctactaaaaaaaatacaaaaattagccaggcatggtggcgggtgcctgtaatcccagctacttgggaggccgaggcaggagaagcgcttgatcccaggaggtggaggttgcagtgagctgagattgtgccactgcactccagcctgggtgacaagagtgaaactccatctacaaaaaaccaaacaaaacaaaaacaaacaaacaaacaaaaaaaaccctaagaggttgtatacatttatacaaatgtatgaagcacattagggaattctcactgagaagtgtgaggataagtgttttatgaattgagacattttagaagattcaggaagtcagctataacactgttaactatctctacttttatttttccaaaaactgttttggtatactgtttttgtacccctggtactacaatgcccagtattctattattgctttgcttccttttgacttaagtagaagttcctgatttcgttacactcaaggactggaaatttttctttatagagttagtatggccttcttcgtgtttgcagatagaaaactatgaataaatgtagtaaagaaagatatttatttatttatttgagatggagtctcactctgttgcccaggctggagtgcagtggcgcaatctccactcactgcaacctctgcctcccaggttcaagcaagtctcctgcctcagcctcctgagtagctgggattacaggagtccaccaccatgctcggctaatttttgtatttttagtagagacagggtttcaccctgttggtcaggctggcctcaaactcctgacttcatgatccacccacctcagcttcccaaggtgctgggattacaggcttgggccatcacacctggcagaaagattatttatttatttatttgagatggagtctccctctgttgctgaggctggggtgcagtggtacgatcttggctcactgcaacctctgcctccagggttcaagtgattctcgtgcctcagtctcccgagtagctgggactacaggtacctgccaccaggcccagctaatttttgtatttttagtagagacagggtttcaccatgttggccaggctagtctcaaactcctgacctcaagtgatctgcttgcctcggcctcccaaagtgctgggattacaggcgtgagccactgcgcctggccagaaagcagatttttaaatttgaggtaaagaaagcttaaacttaaaaagttaatcaaatgcaatggaagcaaatagaccttcaccattctgatttcccatcaccagaatgaccgatacatggggactgttggttcatcaattattttgatttataaagttataatatataagccatataaaaatttccagtgaagaaaaaaatggaaaaaagtaaaatgcttttgactaaatctaaaatgtacctactatgtgctcaaatttgtgtttcattaaatcatagtttgatgatttagaaggcactctaaatcatcatatgtgatcaggcactgtattgtaattgtactgtaggattttctactttaggatcgttgggagtgtttgttaatagagtctgttagaattctaaacaagaatcagaggtgatgtaatctgactttcttaccctgctaaatggcaaccactagtacagctgtcttggtaacagtgggggattcattaggaccttcttcagataccacagatatcaagatctgcagatgctcaagtctctgatataaaatgatatagtattggcataaaacctatgcatatcccccctctatactttaaataatctctagattacttacaatatctgacgctacgtaaacagttgttatatcacattgtttagggaataaggacaagaaaaaaatgtctgtacatgttctatacagacacgatttttttctgagtattttcaatctgcagttggttgaaatatggaacccatggatatggagggctgactgtaattcatcctactaagaggtggagtcttctactgaagaacagaaaagaaatctgtaacagcaaaaaacaaagccaagactatcaaaactaaatgccacagaagttccacattttgtgttgcatttaaaaatacaaagaccggccgggtgcagtggctcacgcctgtaatcctagcactttgggaagccgaggcgggcggacttcctaagctcaagagttcgagaccagcctgggcaacacggtgaaaccccgtctctactaaaatacaaaaaacagccgggtttggcggcgttcgcctgcagtcccagctactcgggaggctgaggcaggagaattgcttgaacccgggaggcagaggttgcagtgagccgagatcgcgccactgcactccagcctgggcgacagagcaagactacgtctccaaacagcaacaacaaaaacacaaaagaccaatacgttagaatcttaactagctttcaaagaaaaaacttactcctgttaacaccaaacagatttgctcccatctataaaacacagtgccactgtgctcaagaggaagatgtcagagacttaggcctaactcggcaagtcttcccagagtagctagtcctctaaaatgatgctttaataggcttaacggaaacaatctcatttacagtgaggcttccaaatggtgaacacggtaaagagcaaatcagcaacattaagtgcacatttgtttgtgggaaggcattaggaaagaggtttttctaagtacagtaattctaaaaatgtgttttcttagggaacaatagtaatatttagactaattgcaaatgttaatatgtgcaatataatttcagtctccatcctacatatacatttttttttaccaccagtactcaaaatgtttatttgtacttctcaattcctatcaatgatttctaatgctggtgtatgaaaagcatgcttgaaattgtttgaaataaaggacttagggacagagtggaatgctggaaatctgtaaaaggactggaaacgctggaatgctggaaatcatggtaggcgcatagccagttattttcgtaggcttctctatctctaattactcagcagaggtggttttattttccttgacagtctgctctaggaagcaatcagccaaccagtttgcaattgtagggtttgtaagaaatgaaaaacactgcacctgcaagtgttttagcatctaccactattcggcttacttacgtaacctccttcccaagaccaagtcagtaggattgtttttaaagcaacctctccatttctaggaggggcacaaaagctagcaaataccccaacccgaatacaagcgaggttgtggagaaagtaatgaaggagtttgtgtgcaaacagcggggaaaggaggttctgttgaattgtaccgtgtgtccgttctcgtgctgtacaggcaatgagtgtagtctgtgcgaaccgggtgtgtgacgtttgcttttcgggtgtacgggtctccgaatgctgcttctgctgtgctcaccaagggagcgcgtgtgcggcgtgtgtctgcgaagcgggcaggttgtgtttagttgtgctgtgccttggaacagtccgtgtgaacagaggagggcttacggttaacagacaaaataccgtaagcgcccttcctagagccaggcacagagacaacggcggcctctggcgccggcacaagggacagcgtggcccggatctcagagcctgggtcactcctcctcccctccagcgacacagcactcccccaacccttccgcccacctccgccgagcctcggctgcactcacctctctccagccgcacgggttcccctagcgccgccatcttctcccttaacctacagacccacaggaaatgacgacagaagggctgaggtgggggggcggggcctaggggaagccggaaaagtgagtaccggctagtatcgcgagatcaggaaggtggccgagtgtgtcgccgcggccatcagggtaagggtacctggacttgcggctttttaggtcggcctggctccgctccttccgcggtgacgaggtcccccggcctcctagggttgggaagagctgctttcctgactctcgttccctgcctcaggcttcccttatcccaatcgcttcgaacccttggctcagcgtagaggagtcaagcctggattctagtcccaccttgcccattagcagctctgtgacctgggactgttcacttaccctctctcagcctcagtttccgcatctgtacaacgagaggtcctatctcttaggtccttacaatttttaaactctgggattcggtggcaattaaatgtgtaatgacatgttgtcagttctcaatttgtgacagcattgctttaaatttaaaaatccacggcttgaatcttccctccaaatctgttaaggggtggaaagtacaaagagcatgaaacatatctgggtgagggagagaacaaggtgctttggtgcaccacaaagtaacaattttataagcagctgattcttataaaatcttaagtaaatgaaatattgtgaagcaaataatattcttaatgcattacagatttttgagccacttctgaaattttcgcgaaccaagaagaattttagtacttggatttgactaacatttatccaagcccttagtctgtactgatactgtggtaggtgtgtttacatccagcatttcaacacttcatgatgggactgttttaataacctgtttgcccctggtccaccctttccattcacctttagtattttcttctccaaatccatcatggatgccaccactatgctcctttttctccccttgaattctgatttcatcatcacaagttctgttcagaaactttcaatggtttctctcctgtttcctatttctaaagccttgcatactctgaccctaactcatccaactaacttcatttctcattaccacta

SEQ ID NO: 5671 - DNA, 6000 bp, Homo sapiens
tgaacggtctttttaaaaaaatatttcttccccagccaggtgcggtagctcatgcctgtaatcccagcactttgggaggccaagacgggcggatcacctgaggtcgggagttcaagaccagcccgaccaacatggagaaaccccatctctactaagaatacaaaattagccaggtgtggtggcgcatgcctgtaatcccagctcctcgggaggctgaggcaggagaatcgcttcaacccaggaggcagaggctgtggtgagccgagatggtgccactggactccagcctgggtaacaagagcgaaactccatctcaaaaaaaaagagataataatcttcttttccccctctaagaaccgtaagcatccagtaataaatgaatgaatgaatgaatggtcttaatgagctacctttgcctcaaagcagacttttccctttgtcactccgtaagtactccttgccccagaccaaagggtggggaacttctctgagaaaagtggctgccctccatagcggtctttgctcacttgaaaatgcagatccgaggtatctgtaaagaaagaagcaatcagtttactccaatgtccaatacttgtaagccgccaacagagcataagtataccagttgttgtagtggatacaaagtctcatagaatttataggctatgaagttttaatctccaaaatcacttttaggagattagttaaaaaccacagtctgtctgccttatacatacacgtgtccaggttcacaagagtttgatcctcctcctcatcttttgcctcttcttcaggaggcagtggagactttgagctatatatgtaagatagaaaagaaacacaatgtaaacaaagccctcttctttgaggggtgtgtgtgtatgacattatgtccattttaaactgtcagtgaatatcaaatcccagcagacagctttttccaataaatgagaaagggcaataggagtttccatggtagatgcaatctaaaactcatgcctataaaaacctattccattttgaatccaccctccttccagtctctccagtcaataccaggtataccaaaatcagagcagacactcccttcaacgaaagggactgtttccctcaccggctgtggtaagcctcctctcggaattcatagtaagctcggccatgttcatccttctcatcccgctgtctctttaccccccgccgctcaccatctgagcctgctggttttgacttttcactatcctggtcatctcctacaaaaacgagggaaagaaaatcagcagttttcatactggagtgtagaataagctcacaactaatagacactaacagggaatctgagaatctgtctgatcaaaacagccaggttattcccactacattcacataacattttatttctaaagatcagctttctgtcattggctgtgatttaatttttttaaaaaggggcattatgggctaattacagtcaagcactagataaaaattggacaatttttgcattctaaatttatccacttaaatcaggtcaaacttgcagatttccccatcaatatgacataaaaaatatcctctaggtctctaagaaaacctcaaaggttaatttaattttgactcttgtcagatctagatttaaggtaggcagttagtacatattttgtaacacttttccacaccttcatgatacagagaagcctcaatttcttttatttccctttcctgcactgaaatacacagccatccatggctttattcatgtggcaaatggactcaagtgcattatacacagctgtatttttatcagggacttctactgaaagttgcaagagcaaaccactaagtcacaagagatccataaataataccgcatctagactgcacatttggggcagaaaggtgttgttgtatatttagcaacttctctgcaagaggaaaaaacttggagtttttccctaggcttctgtattttgcaacactaggaaggtttttaataataatttctttaaagcagtcttttatccttcaatatatatttttttgagacagagtctcgttctgtcgcccaggctggagtgtagtggcgcgatctcagctcaccgcaacctccgcctcccgggttcaagccattctcccgcctcagcctcccaagaagctgggattaccggcacccgccatcacgcccggctaatattttgtatttttactagagacaggggtttcaccatgttgaccaggctggtctcaaactcctgacctcaggtgatccacccgcctggcctcccaaagtgccaggattacaggcgtgagccaccacccccagcctatccttcaattatttttttatctgctctttgggatatacataagtcaaaggttatgtaatgggatttttgctccgggacacaggacaaacaatctgcaagttgcatgtgattgttgtacaatgggttccgattataccatgactctccatagtggcctaaaaatattactaacaaaagaactgaggccacccactttatagtaagacttatcctccctactcggacacacactgttatggatcagttctaaccatccaatcacttcaaaagaaaggagaaaggtcactaactccctggggcgattctacaacacacctcttccacaaggttactcaacggacccaacagcacctcagtcattaccattcaggaaccgagggacctgaaacgtaaaagactagcaccaggtgttcagcaaatctacaaatatgcctatccacggactcagtgggacaattaaaatttaatcataatccaagcaagataaaaaccctagccaagtaacgttaactaactctaaatgaactagattaagatttttctcttcactggttaactattaaactcgacactgttacactagaggctctcccttacagctcaaagaggagcaaggttggattttcagattctctgtggctcaagctctggtaacatgcttttaatggaacggactttgacggacttcgatttttgcttaacatttttacggcgaaaaagttaggtcaggtagcccaaagacctgaccctctaactgtgggcctagttctccgtgtaatccccaattgcttagcactttctcagctaagaaaaatataacaagcaccgtgggagactgttccacaggtagctcacaagtagttcgcatgcaaaatcactcactgccatccactatcaccaaggaaccaagttaggcaggaaccttcctcctgcaaagagtagggccacgagaggcggcctaacccctcagaaaggtgggtagagaatgaaaggagttccatcaaatggcactttgaggcaagcgagaacaaggactcggaccctgcggtgcagggcggggtgctagatcaggggcgcagccggcaggttggagccgggctcggctgccagctcctcaccctgttcctcggcggccttgtcacccggcacctcggatcccggcgtctcgtccccgctccgctcctcgggttcgtcttcctccctcttgccgaggccctgctcttcgccaccatttaccccgcctgacccggccgtggcctccgccggcttctcggaagcatctggctcggccgcggcctccatggctgccgcctccgggggctccggcggcggctgcgcggcctgacccaaggcttgagcagggggtggctcctcgtcctcgtcctcaagcagcgcctcctcgtcctcctcctcctcctcttcgtcctcctcctcgtccccgcccgggccgccgcccgacgcggccacaggccgaggctccgccttgcaggccccgccgggcccggccccgccgccgccggcctcgtcctcgagcatctcggcgtccagcgcctcctgcagccgctgcgccagatccaccttgaggccgcgcgagtccaggccccgccgctgcagctccgaccgcagctcggtcactttcagccgcttcacctccatcgccgccgccgcctcctccgcctcccgccgcctcctcccctgcgaaccgtcgaccgagtccgaccgcgcaggcgccgccgccgccgcccgcctccgcctcacgcgccagcactgagcccgcgcgagcgagcgcacgcacgcaggagcggaggccgcgcacggtcccgctgcgcagtgtttgcttctccttcgtctcccctccccctttcggctcacggagcccaaaacaacgcagcagggagctgtttcccctccaggcccttggttccccagccgcgggcaggcgcgcgcggaggacgacggagttcctcccgcttcctcccgccctctggcgcccccgggccaatcgccgccggtgcttttatcgcgcagccgcagtggagtccaagacgggcaaggctggctgcagctcaagtgcctcgtagcacggaagcgtgtgcgcgccggtctttcagtacttccagccggggagttctgcgcagccgcccggagctccccgatgccatgcccctcccaccacccttacttccgtctgacttccatttgctgtggcgttttaggggtcgctagcctcttttccctactgtctgtgcttgcagcagtaacgacaaaaaaaaagtcattagagaatgtgttgcaacatgtaagcctagtagcaattgtttttctggctaggaagcaaaagggctccccagaacgaagaaatactgtaatccgggccctcctttttcctcaacgcctcaacttctacccagcaacagaggcccttgaacccgccctttttctcttattggacaacttgaatcgtcatttgccgttccgattggtcatccgtgatcgtccggatttttccaattggcgaagctgccaggggaattttttttttttttttttcccaggttggtccgctgaggaggcggggtcgtttctgcgggattatttttccggagcctcttctgattgggtggtgtggcgcaatgcgcgcgaccctcaagataccaaactgtacgcatctctgaccctttcctctccttgctcctgctggtaaaccgaagcccaggagacttccaggtttgggcatctgcagagggcgaggaactggtcacggcgccgggtgggcttgcagctgtgacgcttatgtggacacctcagtgtcgctggtggttcacctcggcttcccagtttatttattgacgtcaacaaataaatgttgaataaggaagaagagttagaattgcttgaagccctctggagttttagcactagtcccgcccactcccttctacttccaggtcgggggggggcgggtccaatagaaaggcggaagccagtgtcccaggcgttctcacgcccgcaacaattcctgagtagggccttgcttgagttcttcggaaagtctcatccacccccacatcgcctctttaggaagtcacttaatgttgggcttcattattcccacatccctttccttactacttgcctgcacttcttgagaaaaagactgcagaaaggagaggtggggctttcagtagaaacaagcaaaccgcaggtccctgtggggggactctccaggaagaagggtaatttcctgcctccttaaattggctgctactgtcagttattttgctcccaaccccagagcttcacttgctccttcacttcccagttccgcaagaaccgtgggcgacagttatggagaagcgtctgcaggaggctcagctgtacaaggaggaagggaaccagcgctaccgggaagggaagtaccgagatgctgtgagtaggtaccatcgagctctgcttcagctgcggggtctggatccgagtctgccctctccgttacctaatctcggacctcagggcccggccctcacgcctgaacaagaaaacatattgcataccacccagacagactgctataacaatctagctggtaagaacggggctaaagggtggctagagagcattaagacaggaacatgaacatctgtgaacattgggggaaaaaacgctgacttttttt

SEQ ID NO: 5672 - DNA, 6000 bp, Homo sapiens
tttcacacacacagcaaaaatttacaagtgggacgataccatccatttaagaggacataaaataaagagggttgttggtataatcacttggtaaaacaatttagtatgaccgagtaaagctgaagacgcacatactctgtgaaccagataattcattcagttatatttgctgaacgattttctctctcttctttcttgaaaatgatacgggttgagtcacagtacatattccatgacccactactgagctgtaatccagagcccagcctctggtctggaaaaaaaaaagaaaaatcactgccctagagttgccccttgcaaactttttctctcaggacccctttacactctaaaagatctagtgaaaagaatggcactattttacatttctgcagatctctttaatgtttgctttaaaaaaagaatgctggattctcttatctagttctgcattcgctctgttggatatgttattttgtttgacttattaaagatctagtctaccacaaacgtggtcattacagaaggatcttgtagactctgagagggtcttggagatctccaagggttgtgagaccatacttcgagaactgcactctagagaaacatttgccatgtacagcatataacaatgaatacaagattgtttctaatatctggcaaacaaatgaacagcaaaacccattaaatccaaagcccattaagatactgtcatttactagctagagaactttgactcaacctctctgtgcctcattttgctcatttgaaaaaggaaatattaatgccaatctcagaaggttattgtgaggattaaatgagttaatgcatgaaaagggtctttaaggattatgccttgccaggtagtcctatataaataccatacattataatcttaaaatacgtggtagtgggtgggtgtgggaaggagaaagaagacacagaggaacatgaaggtattcattttattattctcaaaaagtaaatcttatatttaatattataaaatgtatgatagccataaaacatttttaagggaaattaatatggagctactgtgcagcttggtcgaaggaccaaaagtcagagggacaaatcaagagattaggtcattaatcaccaaggttattgtgaaaatattacaaggctgacatgaaagacattcttgtgtatttcaacacaatgctgcccatacctccatatggaattaatttcattatgcccaatcatagttgctttcctgccttttccaccagtcgaagtttatcaattccagagcaatcactcaataaacgttacctagaacctaactgaaacctatcgccctacttccatgctgttcacatttgagatttacatggtcactgcttcccaaagacggttatttatgaatctacttgttaaaaatctttgcctgtaaagcatctcaatgtacttataactagctccgtatgagtttatcaatgtcgaaaacagttgaatataacagttgttaatcttcataaccgtgaaatctgaatacgagttgtgttctcagttcatggtatagttttaacaagtttttttttttttaaatgttgcctactgttaagatcagctgtttgataagctaagtgcttttccaacgctgttggaaatggcagccttatttctgatgggacatctaagcaggacgttttcttacgcaccaagaaaccaactaaatttagtcatttttgttttgagaaacagtaacttccaaaatagacattttgatgtagcagattgagttatggttgttatactttgatttgtggaggttcctagatattcttagtgtacccttgatatttagaatcctattaaagctgagcttagcacaaaaaaaatatgctttcctaatgaacagtctttggtatttctgtcaagggtaccgtataagtattaacagctgactatatcccagtgccaatgctcacctaggtgtccttggcatagtgcagctcaattaaacgtttatttaatattttattttatggagacagggtcgctctgtcgcccaggctggagagcagtggcactatcatacctcacttcagcctcagtgatcctcccgcctcagcctcactagtagctggtattacaggcatgagccacgcacccagactcaattcaacatttgtaagagtattccttgttcggtctccaagtgcttaacttttgagagccgtgaaaagccctcttctcccaagtttaatcacatctcctataaaatctcatccatctgctgacacttccaatagttttttacttttttcttttactgacctaatcctgaataaccttaaattgctgctttccttacttctccttaacttccccagacctctctgcaaacttctaattcccattcggctgaaacactgtaatacttctagtcccattattacaaattctaacaagtctccaaaagctgaaactgacttctccaaggtgaccaggctttcttagcgtttccaactctttccccctagatcctagaaaataactttaccctgatactcttctagttccttccctcaccatccttcttttttcacgtttttacctacgtttccaattcacctcatccagctctacctccgtattacttcttctcattccgaactatctcaagtttcctaaaagcacctactgttctagcacatactccaaaattcccgcactgcctttttctcctttctctactcttgggacaagcaatcacaattccttcgacacgcaactagctccatcttcccttctaggaaaccttctctagcctacccaagcactgttaatcactcccctctagattattctactacggtagcacttcctaaactatactgcgcagtaatcactaattacgtgtagtttctcttcagtgtttttctccttcaaagcagggtttctattctgttcatttggaccctaacagtataccaggcatcgaacatttgctaactggagaaataagagctccaacatttacttcctatcaaagctttccaatgccgcggttttcaaaaacctaagcattcgacactccaatttgagaaataccagtgaataccagtaactaaactggatggtgacatttgatgaggcgaaaacaatatttaaaatcaattccccctgtcgcctctccaaaagggcatttccacattgaagttccagtaattctaggtgacaggaagcgcgcgttctggctacgagcatcacacaacgaagttaatgtggatgggagtgggaggcactgcagggataggaaacagcataagcaacgactagtaagcgctcgagagacggcggactactattctgcaacgtctcttaaacacactggcgcgcctcacctgatctggcgagtttcctagaggggccgctgaacccacgtgaccaaaagagctacatttttgcaggccagggagtgggcagttatcccagccggcccttgggaatgttaggcaaccggggttggttgctacgccaaaaggtgaataagggctggggaacaggggcggccagcccagtttcactgggagccagagggtgcagcttcgacacagccacagtgaatggaagcttggggagcgcggggcaatctaggcattcccgccgacctccagaattgcgtcagaagctggactgacagcgccctgaaacgtgaggaaactcaaagaggcgcttagggccgacgtggggcccactcgcgccaactgcttcttaccgacaagtgagaaccagaagccgcagagacagacgccgccgccatctttcagcctgcccagggggtctccgcacttcgggggcggtctaggttctcgtgctcttctccaagactcgggagccgcccaccagcggggaccctaggctgaacccctgatggaaaagggcaagggtgctggtgctgggcttggaaacccctgcaacacaccccctcagggccgcctacgctcacagcttacacagaaagggcaacacgtcctaacggacgtctttcctagccaatcaaaacagcagacgtctttctgtagtaggagagaatccgcctcttccctggtgacgtcacaaggtagcgcgtaacggggcccgctggggcagacaacgccggggttacaggccggctctgcggggattctacggagggtcgggcctcctccagtaagaagcgtgggcgagtagtggtgtcgccagtggcaactgaagggagtaatggagataaaacaaaagcgaaggcgaagttaaagcactccacgagttccctcggattaaacgccggagagagcgtgaatttgcctcggggacgcctctccaggtgaagtatttaccttttggccaataacaaataggattaggagggacttaacgatttagtccaatagaaagcaagggaaaaaaagttgcggcagagaacgagcctttcgcgaacatttgctcaattggattggggcgctctcagccaaacctgggactggctgttagaaatagccgcgaccgcagacctttgggcggggcaggttcaaagcggatttcgcgcgctgagagctccgggatgtcattggccggcgacatcctccctttgtgggcgcttcctgcgtcgcggaagttgggagttgggaggagccatcgaatgacgcgatagccttcgcagccaatcagggatgggaaagggaggccgagaaggaagcggatccacggccgcacagctaaacagcaaccccctacccgcttcgtctccctccgccgctatcggggcctaagcgggagcggctggcacggcgtcactgggtgggctggggcggaagtggaggcggagggagacggtggcgtcgtccgcggggccctgggctctcgcggcgaggccctggtgggcgcgaggcagggggagggggaggaggaggagcccgcggcccgggcggcggcggctctcgggttctccgtagggccccgcctcggagcgggcggcggcggaggaggagactgaggagcaggatggcggcctcggccctgtacgcctgcaccaagtgtacccagcgttatcctttcgaggagctctcccagggccagcagctctgcaaggtccgtgggctccgggaggcgggcgggatgggtgtcctcggccgtagccggagggggccgggtagccgctgcactgcagcccctcttcgccggcgcctcaggggtttgggagtctggagccctcgcctccccactcggggacccctttttctgggggcttgaacattagctgggaacggaccctgaaagggaggcagaatcgtgcccttttccaggcggcccaggagggtgccgggccccgtcagcgtctgggggtctcaggagtggggttgagtgaggcagccacctgtctatgccgcagagacccaggggtggagatgttttcatctcggttttctgcctggtctgtcctcttcttccaccaggaggcaggggacggtttttgcactttcttgctaggaacccgaagccgcaaagctgatggcatccttcttccctgtccaggaaagcgaagcgactggtttgggaacagaatgctctgatttggagctcctcccatcccattaaagcctggatgctgtctgtgagcaacggtgcaaaataataagtagtttcacatttaaccaatccttgaaataggccctgacagctttcttaatttgtctgtaatatacccccacgtctactaaagacaaagacacctgtgccttccctaaggaattatattgtgattggccacttatatgataaagcatccagttctttacgttggggccaggttttataaatgttttagactttcactaggttgggtaaacagttttctaccagaaaagtgagatttgggactttcagaaagatactgactaatgtattgtcttattacaggaatgtcggattgcacatcctattgtaaaatgtacttactgcagatcagaatttcaacaagagaggttt

SEQ ID NO: 5673 - DNA, 6000 bp, Homo sapiens; identical to SEQ ID NO: 3211

SEQ ID NO: 5674 - DNA, 6000 bp, Homo sapiens
gacttgggaattttaagtgctaagtaagtattgagtatttcttttgaaggatatattttaataacaaaaagatacttgagtgctgtgcaaaagttgtgcccagctggagagaaagcaggaaggttgattttggctgaccagtcattacaaacagagctagacctagtcagaggttaaccacttaaggaactaggcaacacctccccctagtgccaaaagtaacacatcattagctttaaatcaccccaaacacaaactagagcactccaactactcttaagttttaagtcagccagcataagtcaatgaagacttaaagataaaaactggacaaaatgaaaggcccagaaaacaaaaggtaaaactatatctaggccctcacagatactggaggcctcgtaaagccataattctggtgaatcataacttgcctgccccgtaaagtcagttaaaatttttcagtgccagctgggaacttatccctagaaaaatgctaagctgcagaaaagaaacaagggagagtgggagagagggaagaaaaaccccaagcaagccttattctcaactgtttattttctttgtttctgttttttttttttttttttttttgagacagagtcatgctctgtcacccaggttagagggcagtggcacaatctcagctcactgcaacctctacctctgcggctcaagcgattctctaccttagccttccgagtagctggaattacaggcgtgtgccaccatgcccagctaatttttatatttttagtagagtcggggtttcaccatgttggccaggctgttcttgaactcctggcctcaagtgatccacctgccttggcctcccaaagtgctgggattacaggtgtgagccaccatgtcctgcctcaactgttttcaaagccaaagctatttttactaataaccaggggttaatgacatatggtcctgtctgagtctgaaataatgaaaagttagtgaaaagattagtgctaaccacttgaatagtgagttcatttgctactcaaaagacaggcattgcatttcattactgataacagaataaactgtaagcactgaataaatttggaaaatttatagaagtaacataaagatttatttgaacattctttttttttttttttgagctagggtctcgctctgtcacccaggctggagtgcagtggcgcgatctcggctcactgcaagctctgcctcccgggttcaagcgattctcctgcctcggcctcccgagtggctgggattacaggcacccgccaccaagcccggctaattttttttgtatttttagtagagacagggtttcactctgttggccaggctggtctcgaactcctgacctcaggtgatccgcctgcctcagcctcccagagtgctgggattacaggcgtgagccaccgtgcccggcctgaacattcttgtatcatataaagtaacttcctgatataaaacctttaagaatatggccaaatcgcttggttaatatgacaccacttacagtggaacatagaggttcacaagaagttctcaagaacacacttaacaaatatgagactgaacctaaatgcgtatcagggaagaacagacagtggcatcagagaaactaaacatactcaaaggctgccttttcttttttaaagtcaggttggaatactgttaactgaatgaatttaatcttgctttctaactctttgatggctatttagctatgaaatcagatacacgtgaaagctcctaccatttggaactatttttcctaaattcctatcccatccatcttccaccgtggttacaaaccataaaacatcacaattctatgggaaggaacacattcatcctgctgtaatacaactgcatcccaactgcttcatggcacacgtagaaaaagctatttgtcaggtctgctgggataagcagagaaggctgctggtggctagtcagtcaggatcccccagtcatcacaggcctgcctgactgcccaaggactgaacaggtcaatatcttggcacaactgtaacttcttcatttacaccaaatgggaaactctgactacatagctcatttccacttcttcttgagccttctgacacttttaaacatagcttcccatacttggcaatacatcatcaaaacctacaagttgtaaaaattataacccagacaaacgaggcttgctaaccttccactgaaaagcaagagggagaaaggtccctcaccaaaacttgagggagtacagcaagatagctatgggtagtttaggtgccacaaacccagtcatatgctcccatgaaactctgcctacatgggtcttagtgttttggctgtatacctttaggcctgcaggcatcatgcacgtagggcctcactctcactttttcaaatggaagtagaatttcacatttttgcttcaaatgaaatacttaaaaagaaaactatgcatttgatgaacattctgggataacactgacaaccacagaaacaaatgtgacaggtaattcagtaatccagatacttaccaatctttctgagatatgttcttattataaatatgcccagaattttctttatagggagggcagatacatttacatctgacatcctcgaaattctgtaaccaaaatggaaacagtatagtgcgttgacagtttatcatcaatatttttaaaaactgtaccatatacattttgccaagcatcctctttagaataccaagtattctaaaatcattcatttaaaactttaacagacacagtttttaaaagccacagtcctttatggtaatgccaatgaatcattatatattacatgtagttattttgaaataatacctaatacatgatctaagacttattaaccatatttatgggtcacatgacaatcaaattatgttaatgttattaccatctatctgccactagaaagacacatggtaagcagatagttgtgcctgtaaataagaatattcattactaaaggatgggaaagaaactaaaaattattcacaaaaaaggtcacaattctacctatcatcctttcaccctctggtagaaggcactgacattgataaaacgggttgggccagagtcccgtagaagggatgaaatgttagaggcacccacctacaactagaaaggaagtacacacaggaagtagcctgactctgagatcagtttagtatactcttcccaggaaactttgcttctaattcctggttgacagacagaacaactaccaacaaaacaagtttcaagaggtggaggaacaggtgactaagtatctggatagagaaaagaagagatgcttcctcagcaaaggggaatctgtttgagaaggaagtggcttatcattccccagaggaccttgcccactcctcctatatacagtgatatgtctggcagagctattgacaattcacaaacgtattcagcaaccacttagtgagcatttgctctgtgttagatcttgtgctcaataaggtggattcagataagcataagacatggtttctgcccataaccaggacacaccctagtaaaggagactgaaaaataaatacatgatcacaatacataaagttatgaggcaagatatgcagagggtgccagcaatgttttcaaagtcaggagacgtgctgctgtccctgtttctggtaggaggtagagatggtttcaaaaagaatctctgaatcaaaaacatttgcctgcctgtaacctttccccactcctacatttaaagatattataaattaaagctcttatttttaaaaacgcaatgtcattctgttttcccatcatactaatgtgaatcccttctgttctcccccaatgatgagctagctcatcaaagaggaagcacaggtatgcatggagctagggcaggtctggagagctggggcaccagagaacagtatgagggaactagaaggtcaagaaatcgaaccagggaggccacaacctcacctctcttgcagtttggttcttcccttacccactaaattatcaggaagagagaaagcaagaaaggcaccaagggactcgtggagggagttaggtgagaatatgaagcaggtgagagatgctccgtaggccctattgggagggaagtaggccaggaggggcaagttcccaccacaggaagggaagtgttcaggggtgagctgagctgagtcggcccttgacagggaaggctctgtcagatgggggcttcctatcattctggcttggggcatgcggggcctgtgaggctggcggagggcgcaggtgggctgtcaagagcttagggtggaaagttaaaggctctcggaggtgaaaaggttgtcaagtgtaagatgcgtgcagccggggctgggaagggaaatgttaaggcggtggggggctgctgtccggactgtgggcactgtcggggctggggacgaccgtggggcgctgcctgccaggctgtcggggctgagggcgagagtgccgccgggcagtcgggaggggcggggctggtggcggcgggggtctgccggagctgtgaggccaggcgtatggctgtcaggaatgggccaaggagcaggttggcagacccagtttccgcaaggccggtggtaggggaggagcttccgtcaggagcgaggctgggcgggactcaccttggcggcgtctgacagctgcgccagcagcagcacggaaagcgccaggcacgacaggctgagcaaggagccaagccgaagaaggcctccccacagggtcgccatcgctgggggcccagcggtcccacagcccggagcccccgcgaccggctcccggctcgggctcaggctcaggctcaggctcaggcacaggcttgggacccggctggggatcctccgcccgcacttccgtctggacgcgaaggcgtcaccgggcgcgccgggtcagatgcaaaaagcatccgccccggaaccggttaccagtgcgaagggccgggaggctgggcagtcctggtgcccgccttggcctagccccggccccgggacggaagggggcctctggggtggcagcctgggcccagtagagctttgcatctcttggatatctttcccgggcgcagaagctgcggggcttagggagtcgccattgcgctggaaagtcctcccgcccacggagaccccagcaaactccgagtgtcacacagtcgcctctggcgacccgtgcgggccggagccgttcgcgcacaggcagggcgggtgctgagcgtggaaacggggctggaattggccgagccatgcctttccgggatgcccaccgccagtcaaagggttgggggtggtctctgcaccttaagtactaacctgccgcccacgcgcctcctgaccacagcaccccgtcggctttctaattctgtgagctgccctcgtgggcgtggcctccctgtggagctccccatgtgcctccccttggtccagcctgcagctaggaagtgggtcacagcgacggggctgggctgggccaggccaggctccgggagatgtggaattggcgaaacaactgccccagtagtatcctccgcctaggactccaagaggtggcgaattggggcactacgcccgggtaaggcagtgcctgttcagggctgccgacctgtctccccagggctgtcattctcagcaagtactttaggagtgccttagatcggcacattctcccattgaaatatttttgttagtggagacaagggaggtaatggcaaggacacggatcatcacagcccctagggatttgttgaatgacctttggcaaatcacttcccttctctgggcctgtagttcttggctgaatatgagggaatggatttcaaattatgctccatgtaatacccgtgtttttacctctgtaaacagatttttttgttttttttgagacggagtctcgttctgtcccccgggctggagtgcagtggcgcgatctcggctcactgcaacctccgcctcccgggttgacgccattctcctgc

SEQ ID NO: 5675 - DNA, 6000 bp, Homo sapiens
actagtagtactgaacttgcttgaggggtggggcctgttctaagtatttaacacctattaacacagggaattaaccttcatcctcttatggacacagaaatcaagtcacaggaagattaaataatttgtccaggacttcacaagtagtaagagagagagatgaaacccaggccgttggcagactcgcctcccaaccccgctgctttattttctaaaacccaaggccagcgtcccacctcagttagcaggtaaatgcaagcaggtaccaccttgtgggcagtgggtaagaccctcgggaatggtgatccgggagtcttgtgtgtgctctggatgtgagaatgttggtgggaggtgagggggagcaccgggtccagggtctcaggttctaaccctgccactccccatgaccacccctccagactcctgctcagttccctttcctgcagtggggacagtaaccctgcctgcaccactgccctcctgcccacctgcccacaggtagggagaggatggtgaagggagcaggaggctgggcagttcctgagatggaggggtgggtgtggggaggccgatgcaggaaatcagcctctggatgggaagcacccagcaggcctctgcccagtgctcccagagccagtccaacctctgggatgggcaactcacagtgggcttgagcctcttcctttctggaccgccatgtcctagatgtaccccaggaggcagatgactgcgatgctgccccttccatccgggtggatgtcgttgtcatggccagcctgcaggcatcgtgggggagtgaccgcacatcctttttccctcagtggccagcctcagagaagggaccttgggacaacctccttgattggggaatgggacctaaagggctttcttccctcccccgccccccctgccccccaccccggagatggagtctcgctctgtcacccaggctggagtacagtagtgtgattttggctcactggaatctgtgcctcccaggttcaagtgattgtcctgccttagcctcctgccaccacgccccgcctatgcccggctaattttttgtatttttagtagagacgggtttcaccatgttggtcaggctggtctcggactcctgacctcaagtaatccagggctaatactctttcaggaatctaattttaaaagagcacaggcagggaaacgagagcccttccaaaaatgatggagagcaggcagaacacttgcaggtgccgagaaggaccctggagtcactgtgttgcttggcaaagtccctgctgccctcagggctgcagcctgtgttctgggttcctctggggcagaggtcagaggtggagagaaccagaaaagcctctacttatggtgactcagggacctatttcctcttgtgaaaaacaagactggcagactgtggaggtcctggcagaggcttcaggccagtcatcttcccctcagaggagatacgtcggaggctccatcgctgaggtcagggccagggccatggttcccactccctgacccgtcagccaaggcacaggccccaggatgagctgggctcacacctggtacctgcagtctcagagccaaccacactaggactttggggcatggttcaggaaggaggaagccacaggctcccagcaaccagagctcccagcccatcctgtactccagggaactacccgcctggatgcaccgcccagatgtcagtgttcaaggtagctgggacaggtggtgggcacactcccaagagctgcctagagtcttcacacaagatcccaaatagaccgattcccaaaggcccaaggccatgttacccaagttaaatctctttaatatcccaatacaaagtactgatgcaaaaagacaatgagaaaacccaggaagttggggggtggggggtggggagaggttttataaataaaaaaccccgagcagcttttcagaggcagaggagctaagagaagcagcagtccaaagtgaggaagggagtgtgtggctcctgggacctgccccttgtcccctcactcacagctgctcgtaaacacccctttcaaaaggggctgcaccctttggatatctgcttctttctcttggtccctgggacgcaactagctctggcttcaatcccctacaaaaattcctgagatctcggggaccccagccagcccttcccctgcagtaccccttggtggggagggctggggagccggtgagagttcatagcgtatccaggagcataggtcaggagcacaggggagcctctgagtcccctgcccgctccaaaagcacacaaaggggaaggctgccgtagagcttggggtccgtgaggggctggagcagaagcaggaagagtcccacacccagggcatagcctgccagcaggggccgcctctgtgggtgctccaaggccgcgcaaacagctgggaaacccatgtaattgcagaaggaatggcagagaaccggcccaatcaggtgtcctggggaaaagagacagcagctcagggagcagccctaccacctcctctggcccttccagggctagtgaccctcatcccctgaaacaggagatcaagatcccactaccccagccatccacccacacaccacggcctctgctcctttccacctctcagacctcaccaggctgagggctctggctcagcctgtctcaaggactggagtagaagaacttttgttcctagaacaaacagtattcccattctcccacccgctcctgtgggcccccagggacccatgagggactgaggaccaacctgtgcggatgaagaggaaagcagtgtaggcaccgaagacagctgtgtaggagaactggaacgctggagacggggaggccacgagtgaccacacctgcacgcccttcctgcccccacactacatacccatcagccaaagaccgaccatcccctccccccggggcagtagctgcctgccccaccacctacagctgtcctgcaccccaacttcccacggtcagtggcctctccaatactgtggccctcagttcccaattccttctccagagtggccattagcgacatcatcatacaccctaacccaggccagctagccaggactcaccagcagacaagaagatgttccccacgctgctctggcggaaacgcagctgctcaataatatggtgaaaatgggctgggaaaaaggtgacaatcacatcacagtcattcctcccagcctcccttctaggactgcccctcacctcaagcccccttctgagctctcatgctgaaaacacaccaggactaatctggccagactcaccaactccaaaaaagagcgggcaggtgaacacagcagggcccaggcccatgcacggtgctaacatgggcagcatacaggcccggaacaccagctcctctgtcagcggggcgatcacttggttccgcagccaacgcatgtctgtgaggcagcgggcccaggagcggggggctgcagagggaattcaggacaagctgtgagtgacgggctgtcagacagtgagaccccagaggctccaagggctcctctcccacaactttaccctggccaaactcaggttaggcatcaatactgctgaggacgggggtgtggacccaacataaacccaatgtcttgagatgacctgaatggaaggcattagctgaggcaagggcatcctggaagtaaactctggagacaccaaaatttaagcaagactagctctggttggggaagcaggggacagtgctctctgatccacaccaaatactgctgggggttcccagggaactccttggacgttggcaatcaacccttagaggccacctagctctatgtttccattttactgatgagaaaacacacccagagagatgacatttcacgtgtccagatcacaccctgagcccgctgactccctgccccaatgtcctggactgcctgtgcctacttttcccttcagcctttaagactcacccaggacaaccttcagcccatctgccaggtcacaagggcaatccatagagagctgcatcagtgggcccaggaaaagaatctgagggcaagaaaacactttcaccataacccaccgcttttgcccagacctttgcccatgctccctgagactccaagcttgaaatcctctccagccacgatttccagaccatgcataccggaggaccctggggccatctcaaaagtcctgtctcccatcaaccaaaaaccaaaaacaagagtccacggcactgcccatcaggctgataacaaagaccagaagaaaaaatacagcaggagcactcaccatggtcagcaacaggggcagcagcgccgctgggaaaatgccctccagcctgaagcccatcagggtgagcagggatgtgcctggctgagccacaggaaagggggcatcagttttgcttcctcccctaaagacccctgagctctcaccgccgttgccctttgccccgcctccttcgcacctggatgcctgtgagttccctccagagcagcacgcacaggggtgagagactggacaccaccaggacgctggtgaagcgtcgcttgatgaccgcgggatggtccctacggaggggacagtaagttcagggggcccgcggctgcccatgagcacggacccgcccccggctcgcccaagctccgcccgcagggcgcggattccggtcgcgcgcagcccccgcacctgggcagttcgctcttccagacgtagaggctgcccacgtaggagcaggcgaggctgaggcaggagaacactgacacccagcagcacagcccggggcccaggccgcccagcgccgccgactcgggcggccgctccggccgcgacaccgacagcagtcgcagcccatccccgcccagcgccgccattgcgccctgacccgcggcgcgcaccagtgacgcagtcccagggaggtgtgggtgacgtcaggccgcggcgcggctccacgccccgccccgccccgcccgggcccgacgcggaagcagacgcggaagaggacttggtgagcgcgcggcagctttattaaaccacgggataacggctgcccgcagcctccggatcggtgggcgcttgcggaaggggacccggctcagggcccagggctgggactcagccactctgacaggttggagacctcctgcagccacagcacgtcctgcgggaacaagggggcccggggtgaggacctctcagcagcggcccgtggcctgcacctcctgctgagcccttccctgcgcggccctcgcccagttacctccaggcggcttccgaggctcgccctgcccggcgccagggccctgccgtgagcctcgcggtgctcccttcctctaggagtgaggggggccgcggtggcttccgggcggcgcggggcggcctctgacgggctcggggccctggcagagcgcagagctcgcatctcctctatgcgggggctgcccctcttgagcctcttgttttctgcttgcccgctggtatctaggagaaaaacaagcctcttcatcttactttcatggccctgtgctaggagcacccttggccaaggggaagcctgggagaacgggcgccgaggggctcttcccaccgcatccctgtcagcaggtcccatccacaccaaaaccctgcagctgtgggcgcttctggagcagcccgaggctgcagagacgtttcagggtctccctattctctcacccaggcgggagattgtcccgagccctcacttgggggactcaggccgctcagtaactttctgtatagattcttcctggagtctgcactgacaagctcccctccctgccagcctctgtcccccctcacctttctggcctcagttctgtctccctttgttgctcacgttgcattgagcagtgcccataggcagctttcctactcttaactgattcatttgtcaaattaaagcgagtttagatggatagattcttccccagcaggtcttggggatgcagatcaatgagcttttccct

SEQ ID NO: 5676 - DNA, 6000 bp, Homo sapiens
ctggcctcaatcagtcttccccattcagccttccaaagtgctgggattacaggtatgagccaccaagactcatatattggaattgtgtcaaaaggactgaagaacaaccaacttgaagaagttctccctaaccaaagacgaataatttgaatttcaataactatacttgattaaaacacagctaatatatttaaatccatgcattcattaagattttaaaaaactcagccgggtttggtagttcatgcctgtaatcctaacactttgggaggctgagacagaaggatcgcctgagctcagaggttcgagaccagccttggcaacatagcaagatcttgtgtctactaaaaattaaaaaaaagaaattagctgagtgtggtggtgcacgctgttagtcctagctacttgggaggctaaggtgggaggattgcttgagcccaggagtttgaggctgcagtgagcaacgagtcatgccacagcattccagcatggcgacagagtgagaccctgcctcaaaaaattgttttctttttaattagctgtgtgtggtggtgagtgcttatagtcccagctacctgggaggccgaggtaagaggatcccaactgataggggcgttggtgggagaaaaagtaggtttactgatttattctgaaagccagcaagactgagaggacggtgtactagcgttctaaagtaccattttaagtcagtacaatcttaggctctttctatgttaagggcagggaagagaaggagggtgtggtcaagaagtaccccatggcagacatctgggcagcagcgagggtctgaggaggttgggaacttctttgtccttggtccagtcacaatgctcctataaatctttaagaaaacatagttgtttacatacttctttaaccccagactaagttttaaaaactacatgattgctgtttttatatattactcagtgctctaaagcttatggcagcaaaaaattagaagtccaaatgcccatggctgggcacggtagctcacgcctgtaatagcactttaggaggccgagacgggcagatcacctgaggtcaggagttagagaccaccctggccaacatggtgaaaccctgtctctactaaaagtacaaaattagtcagatgcagtggttcatgcctgtaatcccaacattttcagaggctgaggcaggtggatcacctaaggtcaggagtttgagaccagcctggccaacatggtgaaaccccgtctctactaaaaatacaaaaagttagccaggcatggtggcaggcacctgtaatcccagctactcaggtggctgaggcaggagaatcacttgaacctgggaggcagaggttgctgtgagccgagattgtgccattgcacacaacaagagcgaaactctgtctcaaaagaaaaaaaaaatacaaaattagccgggcatggtgatgcatacctgtaatcctagctactcaggaggctaaggcaggagaatcacttgaacctgggaggcagaggttgcagtgagccgagatggtgctattgcactccagcctgggccacaagagaggaactccatctcaaaaaaataaaaataaaaatgcctatcttcaggatgaataaacaaactgtggtatatttacacaacaaaatagtatacagcagtgaaaaagtgaattaactgtgaaacatgaatcatagtaacaggttgagtgaaaaaagcaagtaacaaaggacaacaaatcatatgatgccctcttcataaaagttcaaaactggctgggtgcggtggctcacacctgtaatctcagcactttgggaggcagaggctggcgaatcacctgaggtcaggagttcgagaccagcctggccaacatggtgaaaccccgtctctactaaaaaaatacaaaaattagctgggcgtggtggttggcccctttaatcccagctactcaggaggctgaggcaggagaatcgcttgaacctaggaggcagaggttgcagtaagcagaatgccactgcattccagcctgcgcgacagagtgagactttgtctcaaaaaaaaaaaaaaaaaagttcaaaactaaggaaaaccaaaagatatattgtgtaggcatgcagatataactttttttttctttaaaatacagaattctgggccaggtgtggtggctcatgcctgtaatcccactttgggaggctgaggtgggaggatcgcttgagcccaggagtttgagaccagcctgggcaacacagtgagacccatctctatttacaataaattaattaattaattaatttaaaaaatacagaattctggcccagcgtggtggctcacgcctgtaatcccagcactttgtgaggccaagcggggaggaaagttgagctcaggagttcaagactagcctggacaacaaggttaaaccacttctttacaaaaaatacaaaaacttagccgggcatggtggtgtgctcccgtagtcccagctatgcaagaggctgaagtgggaggattgcttgagcccaggaggtagaggctgcagtgagcagagattgtgccactgcactccagcctgggcgacagagacagaccgtgtctcaaaaaataaataaataaataaatacaatacaatacaatacaatacaatacaatacaatacaatacaatacagaattctggatggtggtggccccttgagttttgcaatgggtacatgggtgtttatcgtattaatttaaaagttataaatatacatgaattttaagaagaggatccatgcaaggttcaatgataattgtatatcattaaccaaagattttaattaatccattctgtcacctgaagtcggcctcccccgccccctgccaaaagtaaacacttttctaatcagggccagccactggagaaactgaaatgagtgggcggggtgctaactctattttcacttttctcttcctgtttcttcagagcctgggaaacaagtcagaatttccaatcttttccaattcccacatgatttcctaatttaagacgaattcagagaaaataaaaaagtctttctccatctggagaagactccgccccctgcagtggagcatcctcctttggggatgaggcctggggtgggggtgcgtcagccccagcctccacacggacgcgccttgggcttggtcttgggggagctacctgcactgtggggtcacatgacagaattagtggtcagccctagctggaggtccagggcaaacacaggcgggggcaggggggtggggggtcgtgagcctgctgattcaagtgtccctgtgggtcccgcaccttctgagacacaagcgccaggcttcagagacgaggctccgggatttacccctgggggcctcctgctcccacagccgatgagagccggcagtttggctgtatcgtaagctggcgctttagctggagagggacgagccctcggccagctcgccagcgggagggcctcagtcgtcccatccgggctgtaggctccgcaaagctcttgatgcactgtcaggctgggaggtccggccgctcccattcccccacagccgcatctagattggggtgggtaggacattttaacgtgcttctgagacagccaccaccgaaaggcacctttagcggttaggaaacccgcgcggagttcaaccacccggcctctgcggagcagaaggcccggtcgggcttttccctgcgcggggcgggcggccgcagcccagtagccctggctttgctccagacccggcccagagtgacatcaccaaactccgccgatcggcgggagggggccctgaaatcccctaaaaacaaagtgagtaatcggcggacccaccctccaggcggggccgggacccgggagctagccgagccaccgggcacgccagcctcttcgtcctcggcgaggcgcgcacttggccccgacccccggcagcggctgtgcgtgcagcctcttcgtcctccgcgcggcgtgcacttgctcccggcccctgcgccgggcggcggcggggcagcgcgcaggcgcggccggattccgggcagtgacgcgacggcgggccgcgcggcgcatttccgcctctggcgaatggctcgtctgtagtgcacgccgcgggcccagctgcgaccccggccccgcccccgggaccccggccatggacggtgaggtcgccctctgaccccgcggggtggcatcgccggggccgccgcggctgtggcgggagcccccgcgccgctttccgccccttcctgcgccgacgggcgctgcgcagggagcggtcggcctgccggatggtggcgcggggcggggcaggcggggaggggtctgactcagtttcccctctgggtggagggggtggcccttgactcagcatcctccctgggtgggggagcagagggaaccttgactcagtttccctccacaccgtccatgggggcagctctggcttcgtttccctattaggggagaacgcatctgattcagtttcctctctggagggaggtggggcgtgccctccctcaattttccttaagaaagtacaacaggccctgattcagcttccctctggagaagaaggattccttaccccgttttccctcaagaagcaggtgtttctggttcctttcctccaccccttagtttcaccgcaggttctagggagcaggtcctgactcagttcccctgggagggagcctggcttctcctctccgtggagagcagattcctccttgtgagaatgggcattgggtgtgtgctgaccctgatctccctcccctttcagaactgttccccctcatcttcccggcaggtaagtggcccccgcggcggtcggggaggtgctccctggggtagggcagtgggggcagccgcctaatggggctgcggtgtcccctggcagagccagcccaggcctctggcccctatgtggagatcattgagcagcccaagcagcggggcatgcgcttccgctacaagtgcgaggggcgctccgcgggcagcatcccaggcgagaggagcacagataccaccaagacccaccccaccatcaaggtcagcactgcgccagggtgtgcggggaagggactgtggaaccccagccctctgtgtttgggagtcaggtttggatgtctgggcctctgtactttggacagatcaatggctacacaggaccagggacagtgcgcatctccctggtcaccaaggaccctcctcaccggcctcacccccacgagcttgtaggaaaggactgccgggatggcttctatgaggctgagctctgcccggaccgctgcatccacaggtgaggtccctgcaggctaggaggcccagcatgaggggacaggaggcgggctatgaagtagccgctacagtgttactcctttctggacccagggcagaattcctcactccttgccctgactcagctctgcaagtaaactgcctttgtcttgaaattatctatttgtacgtttactctagcagatgagttccaggggatacggatgggtccctaatcacttctgaattcctgacccctgtagctggaaggacaagtccctcagagtcacgtctcttgtttgaggaagaaaaccattgaaccagcactctcccctggagttgacattgcagttgacagagacaggctgtaaaaaaatatacaggccgggcatagtggctcatgcttataatcctagcacttcgggaggccaaggcaggaagatctcttgagcctaggaattcaagactagccaaggcaacatagtgagaccccatgtctacaaaaaataagaaattagctgggtatggtggcatgcgcctatagtcccagggaggctgaggtgggaggatcgcctgagcccaggaggtcactgctgcggcaagctatgattgcaccactgcacttgggtggcagggcgataccttgtctttttttttttttttttttttttaagaaagagtcttgctctgtccccagactggagtgcagtggcgcg

SEQ ID NO: 5677 - DNA, 6000 bp, Homo sapiens
tgctagggggtggggcaagtttcctggcagggaggtgtgtcccagggtcctgcacccatggcagagcccctgctctaatatccccttatcattcttatccctgctggaccccaaactccagagatgcccattgccttgttcaccccatgcccttagcctcagaacaggcactgtgaaggtggagccacagagcagcactggtgcggaggggaccgaggcaggaggagggacagcaggcggccctgggggagcctgtgtgttgttgccagcctactctctatctggccccagccgggaagccactcagaaatccctaagaacaatccaaagggagcctagccagatcccgggtgtcacaggacacagtctgacccagggttacgccaggccttacccacgtctgcggggaaggggggcttcaggcggggcttgccctgcttgccctcaatggactcgatgagcgctgtctcctctccacagatgtaggccccagccccgcgcaccacaaacacgtcaaaatcatagccagagccacaagcattcttgccaatcagacctgcctcataggcctctcggatggccacctgcaggacaaaggtgtgagtttcccagcccacccccagcccaggagtcagcctataacttcaggagtcatgaagcccttgaaggcctcccacggtgaagctcctaatgctcctggtataaaaaattttgctagcttagtaaaacgaattggaaaacttgactatgatctggaacagataagcaagaaggaacacataagtaagctgctttgctgccaggaaaataaaaacgaagtagctactatcaggtctcctaactaccctagtctgtaaaggaaaaataaaagtccttataaaattaaaataaaaatgtaattgcctatatccttattgccttaacctattttatttttctatatttcctacagatataagtattattcatagttccaagcaatgaacataatgtattttctccaaataggaattgtttatattcataattattccgctctcttgctaaacacatagttccacttaggttttttcttcttgctacttgttttataaaaaatactatatttttgaagcaaaaaaaaaaaatttacaccagcagcattaggagccctggaaggaggctttgggagccaagtcccatttgggatgcatgcaggactggccaccactcccccagttcaaccactgacagaccaggtactaacacctcagaacaactgtgctgggtgaggggtgtgtgagtgcacactgaacaccttctcatctgtctacatctctccctacccacctgcagattggaggcctcattgtagaattcccctcggatgtagatataggcagcgcgggcgcccatggcccggccccccaccaggcagccttccagcagcttgtgaggatcatggcgtaagatctcccggtccttgcaggtgcccggctccccctcgtctgcgttcaccaccagatacttgggcctgcaggggcccacaggtcagacaggctacagggccatcaggactgggtcttcaactccatgccaccccactccacccagggaggcctcaaagatgtctcctctgacagccaatcctttactgccctcccaacatgtcccaggggctctgcttgctcaccaccaatgacagggagctcactgcctattctgtctttgggtggctatgaccacaagaaaggtcttcattcagctcatccaaacatctctccttgtgtctgcccctgagagccagattctactcttggtgacaaagagcattcctcaagctctaccatcaaaaggaggtaaagcaggtgacatttatcatttgctttatgtgccaaccagcatacaggccaaaagctgtatgaacattatctctttaatccttgcatgatatcactgtacctatttacaaaaaggaagctaaggttcacaaaggctgggaaattgcccaaacctctatgattaggaggcagagctaggatttgaactaagtctgcctgagtcaaaatcatgtgttgattctgctacataagtctcccctgtggaagtccacagagtaagtcccatccatttaaggcctgggaacatgtgcccacctcattcatgctaagtttctaaggaaagagcccaaaggcccagggaaaccccagccacccccaaggtctctcccacagccacatctgccccgcccccacacacacacctgccatctgagggcttattcatgaagctccacttgaggccagtggggaagccagcgcctccacggcccctcaaacccgatgtcttgatctcgcccaggatccagtcgggccccttcagcaggatctcctttgtcttgtaccagtcacctcgactcagggaacctttcagcctggacagaatagggaaggcaatgaaggggacaccttgctccgggacccaacacactaagggcactgtctcacctccagtcatggcggccgtacaggttggtgaaaatccggtcttcatccttcagcgagccaaatgaggttttcttgggtgctgtctagggagacaaagggtcaggaggcccagagtgctctggggccatgagggattgggccagaagctacagaatcttgggtctccctatttaggaggggctgggctagggctagggaagcatctatagcatcatagataccactgccacttagtaagcatttttttttttttgagacagactcttgctcttttgcctaggctggagtgcagtggcgtaatctcagctcactgcaaactccacctcccaggttcaaataattcttgtgcctcagcctctggatagctgggattacaggcactcaccaccacgcccgggtaatttttgcacttttagtagagacagggtttcaccatattggccaggctggtctcgaactcctgacctcaagcgatccgcccgcctcagcctcccaaagtgctgggattacaggcgtgagccaccgcgcccggccattagtaagcattttgtttagcaggtactggatggaagcattttacatccaaaatcccatttcatcctcataagaactctgataggaacgattttctctgtttcacagaggagaaaactgaggcttggagcaaaaggagcttatggaaggtctcacagtcaaaagcagcaggtccaatttgagcccaggtctgtcggtggccaaacccacagctgcatcacggcaccacacagccccacaagccgagtgtggcagcttggccctttcccggcctggctcccctgctggaccaaaacttgggtaggccaggggccttttatattcctacctcggccgaagaggcgaaatgtgtttactgatgggaaagaaatgcctccttaacacacaggtgatggaggggctcacttaggatgaaatgaggagccccacgacccagtggagagcgcaccagctgagggcgacgggattcccatccttttaagagcacttttcagccacttcagggcgcagagcagtggacgggaaatcaggaggtgcgcatccctaaatggggcaatgaccccttcacgccctacaaggctgtgacaaggagagaatgaaagactaggggtcttcacaacctgcaaaacttccgccaggccgaggactgtaaaacaagggaagccagcaagtcagagggtcaagggagtcggccccgcgttgggacccgttcccctacttcaaccaggccggagcgggggccttcccgcctggcctggggagaagggctctccagaggccactacagaccccagggactgctcgtgcacgggcgcggccgcgacacccggccccaaacacccgtggccccagccaggctgggcctcaccgtgtcgccgctgaaacgcacagatacccgcgcgggaagcgaccagccgagcagccgccgtgttgccagcatcgcggcgggccagatgggtcacctcacgctgtcaccttcatagcactgaggctgaggaactggcgcgatagagacgctaggtggcgcgcaggaaagacgtcacgcgcccgacgccagcgccgcgcaccggtatcgctgcgccccttcaacttcgccagcggccccgcctcctcgggggaggactgagaggccagtgccttggcgccggggcttctgggagatgtggtcccaccggcctggggtccgccttcctccctccaccgggctggcatttagcggtggctgtccccaccgctcgctctttcgctccctccttagctcgccggctcccagcctttgatgccacaagtaaacaaacctcgcatgtcgccttctgctgggtcctggtgtgttccactttctatagattcggcgtttagtgtgcacctgcggtatgcatcggtgtatcatgggaggagtgaaaagtcaggcaggtcatagcccgatcctcatgactacgttgcaattattctgcccagtgcgagccctgccagactgtgggcttccccaccccgggcgtccgtgtgctcgaggaaggattgcagactccaaggcagggggttgttcgcggagttcttcccagagggcctgtcacggaatcctaggctggggtgaggcagagaggatgcagatggtcagtgcacggcacaaactcttgctggcgccgctgagttctctcagctcttgtcaggagagtccagcactttctgcttctgcccaaaatcctggcatggtccctgctgcttttggaatcagccactggtccaggatttaagggctctgcgaccccgtccttcgccagggtcatcacgcccaggccactgctgtgaaccccacccccgtcccccaagacccctttctgccgtcattagactttagggcgtttgtgtggctgtccccctccctcggttttcccctgacctgaggaggtccctctgtcctttgccttcccaggaggtcttggaagcctgatgaactcgtctttttcagtttcctggaaccctctgctgtggtcctcgtgataagagtgacctttttggcctgctctccccagctcttttccagtcctcatggtgaggaaccatctctgttcttttgtgctgtaatcatccttcctgatctctctaaaacgtgctgtttacaaaactcctttgcagctattttctcacataccccacagcagccccacaaggtgttcactccattttgtccacgaaaaaactgaggctcagggggattttgtcctttgtctgtgggcatgaagctgctgagtggtggagctggactggaatctaggcctttcttcctttccacagtgccccgcacacagcaaacccacagaacaactgacacgcatgtgacagtcactgtggacgtcagtgacattcccaagagaggcaccaagaaatctcttccctgtctgaggtttcccagacagatagagtagtatcaggcccagagcccaggagtcctggctgccagccgcaggccccctctcttggtcagggaaagaggttgcctaggcaaagctggggattacacagctaatccgggctcagacctgagtcctcggatccctccctttggggcagaagaaggggggcaggtcagagccagcccagcgggtggattccttcctcatctgtctctaactgggtcaaaggaatacaggctgagggagatgcaggttggggatgctggggacaggagatgctgggcatgaggggggatggaaaacggagagtgagggaaggatcctctgttcattcagtgccaggctctgggccaagcacttgccatgtgttacctccttaatcctccaaaactccagcctcaggaatgatgagccctgttttcagaagcagggtatcagcattgctgagtggcctgcccaggatgacacaactgccagaactcggcctgaggtctcctaacaacaaatcccccactggtccccacccactggagcacctacttgccaggcttctcaagcgaagaagg

SEQ ID NO: 5678 - DNA, 6000 bp, Homo sapiens
tggggcacccttaagtgcccagctctgaaatgccaagaaagtacaaacgcagaaacagtaaatatttttatgactcatgagtcaggaacaaactcaggtcagattggttgcaacagatctagagaaaaagcacattgtgcttcagaaattcatttaaagaaattagagtgatggggcaaaaaggccccaggagtctgctttcggtcttctgcgtggggcgaatgcctgtttccttctctcagatgtccctctgagtcgggtttgaagtagattgctgccgagaagcaagtcttcagaggctaattgatttcactcttgggaaaattatcctgacattcagcctaaagtttcctttcctttcatccccttgcttctaataatgcctcgttggatcagcatgaaaaattggtatccctccctgatgtttaccctggatgacccttatcaagtcagccttcatcatcacagcccaggcagttttttttgtttttgtttttgtttttttgagacggagtcttgctctgtcacccaggctggagtgcagtgagcagtgagtgcagtggcgcgatctcggctcgctgcaacctccgcctcctgggttcaagtgatttctcctgtctcagcctccagagtagctgggattacaggcgcctcccaccacaactggctaatttttttgtatttttagtagatacggggttttgccatgttggccaggctgatcttgaactcctgacctcgggtccacccgcctctgcccctcaaagtgctgggattacaggtgtgagccaccaccacgcctggccaaatccagttttttaatttgtcctggacaacaccactcagattcaaaagtcatgggaggaaaagttggccaagttcgtatcatgtgcctgtgccttggttagaggaggcagggcaagttgcaacatctcctttgcactttccccctgcactctgcacctttcagctgactggagtggtggatgcccaaggtgatcttggaagcacatgttaaagatggaggagactcacttagcctggggccccacaagaccacgtggagcagaacgttccgcctcctcatgccttgtctattgcatgaatgagacacaaactccttggagttgagctattgattctgtggcccattcgttatagcagcttgatctaccttaagcaataaatgctgttactaaaatacgtgtgagcagtggctcagtggccagaaaacagcaagtatccactatactcacagaaaagaaacgaaagtgaacctttaggccgggcgtggtggctcatgcctgtaatcccagcagtttgggaggccgaggcaggtggatgacttgaggttgggcgttcaagatcagcctggccaacatggtgaaaccttgtctctactcaaaatataacaattagccaggcatggtggcgcacacctgtaatcccagctactcgggaggctgaggcacgagaattgcttgaacccagggaggcagagcttgcagtgagttgacatcatgccactgccctccaggctgggcgccagagcaaactctgttggaagaaagagagaaagagagagagagagaggaaggaaggaaggaaggaagggagggagggagggagggagggagggaggaagggaacctttaaactcacttgcatcaaagtaccatgcttcgtgtagttcattgtgttaggaagaatttgtccgatttggggagctggaagacccagcttctcaggtgtcatctgtagcaggtcacatgtaacccaggtagatgaacctaaaaggcgctaactacggatatcactgggttctctcttccacatcctccccacctccccagctggtctgtgaattctagtgaatcctgactaacggggctgttatctcggctaagcattctgattctcctctgggcacatgattttgcctaatccagtgataacagaagctaaaggatttacacaccttttcccttgcccttgaggttactaaaaaaacataactcaggaaacttggccccactggggagctgacactctgacacagagacacaagacctttttgaaagcttgtgggaaaatcagaaagagaaacggctggcccgtgcgagcattccaagcccaaatactataatgaattttgcacacatcagtgggttctgactctgttgccaattaaaccctctgtgggggggatgcagtccacttaatcttccctgccaaagacacaatcccccccccccccaaataccgcagtgatggaggcagggggccgtgaaaaccatgctgtgaagacaacccaaattctacctacttttccaaagttttgtcattgccgactctgcgcatcggtaagaaatgaccagataaactgaaaggaatgagcctctcacttaccttttttgacagaagttggagtctgtgtatttaaaatgcccgaaaatgaacagtccagccccacacagggtaggtgtcttgtgtgataagaactcaaagggagcttctgaaatgataaggaaggggatcgggagttaccggcgttacggcatgaagtgtcgctaacaatgtcattcagaatcaaaaggtggctgagttttctttctttcttccttttcataaataatactagccaacagattataaagtcaaaaattatatttaaaacaatcctctttagaaacccagattaataaaaaaaacagtggccccaagtttagcgactgtgctgagctaggggcaaactgatcatacagaaaagccgtgctttggaaacagggcattctggctccatggcagccctgccctgggctgggcaccggcggccacagagcctcaagtttccagcctgtaaaatgcagacagtaattcacagacactgtgatgcttctggcacattgactgtgggcttatcactgtgagctgccatcctcattataacaaggatgtttaaacagcattccgctgcatttcgtatgagaacttagttaactaactccctttgcttgtagagaagtgtctatggttggcctggtaaagtctgacagaaaagaaatacagattaaccagctttctatagtattgctgtttacacatgcataagaaatttcataattattttattcatcgctcatgacaaccctatgaggatggtagaacgggtatcttttctgtattttctctttacagaggagaaaactgattatatatgatactcattatgcatatatgattatatattatatgtaatcagttttctcctctgtaaaatatttttacatgtattatctatgtgtgtatatatgtgtgtttatatgtgtatgtatgggtgcatgtgtatgtgtgcatgggtgtataatatttgtgtgtgcatgtacctacatgtgtgcacatgtgtgtatatgcatgacactctaacacagagacacaagatctttttgaaaacttgtgggaaaatcagagaaacggctggcctgtgaatgtgtatgtgtgcatgaatgtataatggatgtgtgtgtaccttcatgtgtgcacgtgtgtgtataacacacacacatataccaaggtcaagtagacaatagtagtggtaaccatttattcactgaaccaataatgtttgagctgaaactttcaaaatgagtaaaactgtcacgagagagcactccaaaccagaaaccaaatatggaagacatagcattcatacaacccagtgtaaaactctgtaaaactctagtgacaacgaacaaaaggcaagttagaacaggaagaaagtgcttgcagggtgtgtcactggcaaaggcttcggacacagatgtctaatgtgctccagtgaaccaggaagaaaaagaaaagcaaccccaaaccaaaataggcaagagtataaacaggcaaaacgctgaggagaaagtacaggcgcccagtcagtattccacttttcagattggggaggatgtgaacgtctaagaacagcccccggtgtgagagagtacgtgggaactcctgccgcgcaggcacggggatgggtcccagcaaacgcacggtgtatttccaggtgtaaatcgcccacactctgacccagaaacaaccccttctgttcagtaccccagaggtgtgcccagggaggcctgtgcttggattttctgaacctgagaaggtctgagaatgctgggggctgggtcttgatggggagatggggagttatgggtgcgcggtgcagggacgcggagatggggaggattttgaagaaagaatcgacagacgtgcatttagaaagatgactctgtgccatgtgaaagacagattgacagaagaaaggctgaagacctgagaacgctgagtataggacaggggagtagattctactgggaggcaggagaacagctggagtggtctagggtgacagcgagtccatccattgactgggtttcctagctgcaagcagcagaggccggctctgactaagcgtcagagttactcattaaaatgatattggtagagctggaaacccaggcctcagactgagcttcccagaacaatgcccgaagccacacagctgacctggccggatgagaaggcgctacctctgtgctgccccaaagagcactaaagaaaaccatcagctgccaggaagtctgcctggcaaatgtcatggcccctggaagccggctgcctctgcagccacctggccagcaaactgcccccagcccacgcctcctgtctccgattgctctcgcttccaaatcagagtcatggacgtatgggataggtgggtgctcggtcgtaagccccatgccccagcggcaggagaagctgggtattccagcgttggaggcactctcttggggagaggggactcccaaggctggcaggctctcaaatgtagtaagagtgtgcaaaaggtgtatgacaagtgccctttccagacagtgggaagtcagggggtgccgttaggcaggagccagagaactccaacctccacgggagggaagatggcaggtctggtgccagcacccctagcccaaggagccagggacctccaggagaaatgcacagcagaaggtcacaggacgcagggctgggcatcgttaagagccaagtggaggctgagtcatgggtgtggacgagacaggccaggaggggcacagagaaagacgatcaggccagggccgccatcctcattataaacaaggatgtttaaacagcacggccctgcatttcctatgaggacttaactaactccctttgcttgtagagaaatgtctacatttctgggaaggtgctgggaaggcctgtagcagggagatggggccccaagcaggtctgagaaggagaggtggtaggtggtgcagtggtgagcacagcagagcagggagaagactctggagaaagagaatgcagcaagccagcctcctgggaagccatcttcttccagggctgcttcctgggcagccgtatgtaggcctctgatttccattcctaaatggtaatgctagtgatttctttgagctggtggggtagggtgagagggctcttgagcaagggagaggagcttggttttcagcacagagccttgtccttggaaacgaaggctcggctgcaggtgatcataagcacccctcagctgcatgaaaggtcaggattgacattgtcactactactgctcgggaacacacaagataagcagactctttccctggcatttctgggtcttatattcgattgcattgttttagagagtagggcttgtgggcctacctgagctgcagtccgggtctccatccgcagccctgatgactcagcaccaacattggagaattccccgttctgcagaaagacatgggtcgccaggacagctgggcctgcttccctcactgctccctgactcaggatgcgatgggcaggtgcccagcctgtagcccacccttaagagtgtgtgaatcaccaccctggcgtgggctatgcagccagatggagtgggcttctattttggcc

SEQ ID NO: 5679 - DNA, 6000 bp, Homo sapiens
atcattagcagaggtggcaggggagggttatgagttcttttcagataggctaagttggggtatctgtaagatcacccaatcacagacatctgtcaggcacttggcaatgaggatttggagcccaagagagagatcagagctggtgataaagatttgggtgtcactcgcagatagatgattacctaggagtagataaatcatccaggaagagggtgaagaaatagctgaggcaaggtccttgaggaacccttggggaggaggccaagtagaaaacccagagaagcttttggaagaggctaaatgcaaagacattctgcagggcccaccctggagggctgaggcatgggagaaggcaggccgctgactctcagcttcagcctcacccattcccctgccccaggtctgtgacagccttgggcggcgacacatgtctacctgtgccctctgtgacttctgctccttgaagctggagcagtgccactcagaggccagcctgcagcggcaacaatgcgacacctcccacaagactccctttgtcagccccttgcttgcctcccagagcctgtccatcggcaaccaggtatctagcccggcagcccgcagtgggaaaggcagaactgggtggcaggggtggggtggtggtggccagcaggtggggaggggcacgcacctctcccctatctcctgtgccacaggtagggtccccagaatcaggccgcttttacgggctggatttgtacggtgggctccacatggacttctggtgtgcccggcttgccacgaaaggctgtgaagatgtccgagtctctgggtggctccagactgagttccttagcttccaggatggggatttccctaccaaggttagaacctttccccaaagctcagccccatccctaccctcaccccattccttccagttacttgctgtgagtagcgctagtttgtggaagggggcttgggcccctggcttctgagaacccgtcctcactgaatctcctgcctctctccaagagaccattgcaccccaccccaccctccaccaatagagcaggcaaaggagtggggacccagagggctgagaaaacaggagctagaggttctggtcccaactctgccagttacttgctgggtggctgtgatcaagtcacttcctactcaatcaaagagtcatctctacaagaaatgactgagtgacacgtgcaccactgcccaaccctgtgatccaggacttcccggccttagcctgacgggcttcccagctcttccagtgccttccctgctcaattaaatcaacttggctccccgttcccctgagttacctcccctgtggaatgacctgttgttttagatccaggcctctcctcctgtagttagcagggaaaaccaaggcaaggaaaagtaagggcagctgaagcaagggctggtagctgagctggggggcccatgtccagctcttgtccctgggccccttgatctggaatggggaggcgaggtccaaagaaggcagtgactcacttcccccttcccttatctaccattaccagaaaaatccttgacatcaggccactaatcgggtccctgtcccatgttctggacccttatctaccccgtcctgccccattcccgcttcctcagccactttcccagtaagctgactggcagcctcatactctcccaggctcctggcttcttcccagcaacctgtgacagagcggcaggggaaaggcagagggaaagcggagtgaggggccgcctgtgtgtggaagacctgggtcttgggccacaccctgcccctggctctgccctagcagatattccctggagtgctgctgcctggtgaggcttctgataccctcttccctctctctggctcttggcttagatttgtgacacagactatatccagtacccaaactactgttccttcaaaagccagcagtgtctgatgagaaaccgcaatcggaaggtgagcacccctgccctgcccctccttctcccagcaccccctcaatcagtcaccataactggtctattctgaggccccctctgcgagcagctaggatgtggaaagcggttcctgcttgcatctctggggcagaggcctccaccagcaggctctcctccattcctccagtcctggcggaagcaaggccctcctaggcagctggtggataacagaggagggtcctaagagcaccacaggaagaacccttggctgggccaggacttggacgttgaggtctcggtctgtctcctcttcttactcaccaagtagcctgggatgaggcacttccccctctgagcctcagccgcctgtttctgcatgaaaggggttgggctgcttgatgtctcctctggctttaaaaacccacatttgagtttcctccttccctctactgccctgtgcccatgcctgcccacctctcgttcttttgggcttctgacacctcccctcctccccactcctggcacctggctctgtgatacagaccgtctgcactgaatctctgtgtaggtgtcccgcatgagatgtctgcagaatgagacttacagtgcgctgagccctggcaaaagtgaggacgttgtgcttcgatggagccaggagttcagcaccttgactctaggccagttcggatgagctggcgtctattctgcccacaccccagcccaacctgcccacgttctctattgttttgagaccccattgctttcaggctgccccttctgggtctgttactcggcccctactcacatttccttgggttggagcaacagtcccagagagggccacggtgggagctgcgccctccttaaaagatgactttacataaaatgttgatcttcagcctgtgtggcctgttctggttatgatccccatcctcagcactgctaccctgccccgtggcagtcagtccccaacccctggttttatggatccacctgccggtgagagaatctcatgggaatggtgctcagggaagcagccatctgccaggagaagcagaagacctgagaacccagggaggtgaactgaggaaggccaagaaggctggggccctagggatgatgtgggcatgtgggcacctgtcttcatttctgaagccctaagccccgtgatgtcagatgcgagtgtagtattgttcctctgtaggataaaggccaaagcctgatgagatcttttccaaagggaccaatcctggggtatagggagtgtgcaccttgcacttaatcaggaagggaaaaaccaggaactatagcctagatcaggaaaccttggggttgtttttgttgttgttgttttgtgtttgagacagggtctcgctctgtcacccaggctggagtgcagtggcatgatcaccacccactgcagtcttgacctcctgggctccagccacactcctacctcagcctctcaggtccctgtgaccacaggaatgtgccactaagcctggctaatttttatatttttttgtagagatggggtccctccatgttgcccaggttggtctcgaactcctgggctcaagcaattttcccacctcggcctcccaaagtgctgggattacaggaaggaaacccttggtgtacaggaatttgccagatgatctggatgtttaagtggttgcatcttaacaacctacattgaggtatgactccagcattggcctttattattattattattattagtgagacggagtcttgttctgttgcctgggctagagtgcagtggcactatcttggctcactgcaacctccgcctcctgggttcacgtgattctcttgcctcagcctcctaagtagctgggattacaggcgcacaccaccatgcccggctaattttttgtgtatttttagtagagaaggggtttcactatgttggccagactggtcttgaactcctgacctcgtgatctgcccgcctcggcctcccaaagtgttgggattacaggtgtgatccaccgtgcctggctcagcattggcctttaataagttgacatatcccaaagtatgttccagggacactgtagagtctctctcccttctataggttcgcagtaattaacagcattttgttaaagcttgcttactatgacagttcaaacatgcacaaaaatagaaaagtataatgcactgtcatgtacccttcacccagtttccatgatcaacacaaggcctatcatctgacagcatgttaaggccctccggagcgcggtaatagagaaacctgtttaacctagtgcttcccaaactcatttcaccacaatcccttttccacctaccaccaaaaaacttgaacttgtttttatttattgagcatggacaacatgcccagccctgtgcccacagggccacttgtctctgtgttgtctggcccgaggacacaagacaacgggctgaggagaaacagacctaagcaaagaggaaccatccagcctagtgactgctcgatgcgggagccaagtgtgctcagtgggaggcaggacctagcagagcactgtcatgaagagggccccgggcagggtggggcacaagccacgagtggcatggactaagccacgagtagcatggactaaaccacctggcagacctaggaaaggaagacagacacccagggggaaccggtgaggacagcgagaggctggtgggttagtcatctggcatcagacggtgggtgtgccaggaagagttcccagacacagcaggaatatctgaacgatgggtgggggcagttcctagtcggggctggattaagtatccttagctgctggggtttcttctctggccagtccgtgaaggcctctgagggcaatgcttcctcttcactctctccttggcccgtgtggggttgggtgagtgcactgagctgggagggatgggctgagatctgctgaggtgggtgtgtcccctcccgccctgggagcaggtcctaccagcccagcccagcccagcccagcccagagcaggcagcggaagccagcttggggcagcgcagagcaacacggagcacaggtatgggggtgtcacgaattgaactgcacagggagcacaaggggagcacccccctgtagaaatgggagatttgggtgggggacagagaagagggtgggcatgggccctggaaaacccttctgaacagagtaaaaagccgaaaggagctgcctcaaatagacagatcttttcagatggcgctggacaaacagctaacatgcctgctacacctcgggagtgctcctctttgatgcttgaagcccccactctggggcatctcgcagaggctgtgtcctccccctccccctctaggcccccactgtggaactgagccttgggcctcccagggagggccctctggggactgtttacacactttttccactcgcagttaaacctcaacccctacaccacacatcccccagggccaggcagatgacaatgagctgatctaatcaaacttgctaatgggttgactggcagagatgtgttctcagtgttatccttcccaactagccaaggtgtactgtaatggggtcttcaggaagtgctgccttaacccaaaaggtgcatctatataaggggattagactgatggtctttgatgtccctatggctctgatagatggtggcttcaggggatggaattttggaggtgggggacatattcggaggtcagcagggctttatgataccttcacatcacaccatgaggatggggcctacctcttccctgtggttgtggggcccccatgacaagaaggggacctccaccagattgtatctccagaactactcctttttttctctcttccttccttcctttcttttttttttttttgagacagagtctccctttgtcacccaggctggagtgcagtggcacgctctcagctcactgcaacctccgcctcctgggttcaagcaattctctgcctcagcctcctgagtagctgggattataggtacgcaccaccatgcccggctaatttttgcatttttagt

SEQ ID NO: 5680 - DNA, 6000 bp, Homo sapiens
gggttttgccatattacccaggctggtcttgaactcctgggctcaggcaatctgcctgccttggcctcccaaaatgctggggttacaggcgtgagtgaccgctttcttttactttttttaaaatttttttatttttatttttttgagacggagtatcggtctgtcacccaggctggagtgcagtggcgcgatctcggctcactgcaagctccgcctgccgggttcacgccattctcctgccttagcctccagagtagctgggactacaggcgcccaccaccacgcctggcgaatttctttatgtatttttagtagagacggggttttactgtgttagccaggatggtctcgatctcctgacctcatgatgcgcccgcctcggcctcccaaagtgctgggacacaggcatgagccaccgcgcccagcctcttttacttttaaaatagatttgcaatctctgtgcacaaccaagttatgaaattaaaagcaatagttcccctttctccttactttccattgacacatgaacatgtccttccggaagatcctattcagaacccagctggagagaaggtagaggagacatagtccataggtttctaatagataataaggaagggtgtgggcggcttgagtatcgatagatgatatctgacacagtccctgttttgcagataagaaaacgagaacatacagtgtgagaagcttattttcagtaacacaattagtaagtggcaaagttgagacttaaacccaggctttctacctgccctcccttagtccttagaataccctttttactcccaccaacgccatgtacctgtgccatttagttgtgttgggctcacctcccccttaatatgtgctcatgcttttcccttgaaatgccctctcagcttcaatctccctgctcaaatgagagaattatagattgttagatgtaaaagaaacctgaaagaccatttaatccaacctttaattttccacctaagaaaacaacaacaaatttctaggtcaagtatctagcccaaggtcgagtagttattacaaaactgaaagtcaaatgtatgtctccacattcctggtctagtgctctattcacctcatgaatcttttcttccataaaaattttccagctaattctagccaccatcaatcaatcttaccctttgctgaccagccattgcatttgtctgtgtcatccacagtttttggcacttagttatatttaatttagagcataggttactacaaattatctaataacggatttaatcattttttgttgaagtctttaaggacagtaactttataatgtatttaactctctcagagaaaacaagctagagatctgtgattctaacatttttattttggccaaacaagctttaatacagatctccatcaattacagtgtagaattagtcaagtgactggtaaaaggttttaatatggctgcctttgcaacatacattcaaattttcttttttccaaagcatctgatctctgcttttagaaatttatatttagatattcagaatagaacaaaacagaagtgaatcacataacttcctcagagctttccacaatacaccacaaaacaaccagtactttttaagaagagagagaggtcatccagaaacaggagcactattcacaacaagtttttagtaattttcttcctgaaaaatccaaagaacacagctgggagctcttgaaccagtttaaattgctgtataacatccagctaaatttttatatttttagtagagatagggtttcatcacgttggccaggctggtctcgaactcctaacctcaggtgatccgcccgccctggcctcccaaagtgctgggattacaggcatgagccaccacacccagccacattgctgtgtaatctttagagagagagaaattagtaaaagtgaattcatgccagaaacaactctaaggactcaagttaattatttgaattatattcagatgtcaacatccttttcaaacaaacattcattcacttattggtgccacagacctgttataccaggcaaggtagcagccactggagacagacaagaaattcatggtaggggagagagagagacaaggtattattttacagtactattgcctgacaaatttctacccatccttatggccccaatgctacctcttcagtgcatcatcgtgggtttgcttccatgagaattagtctcttacggtttcatattcccagggtgtattgtgccctcctaacagcccctactgtattacagttatatacatctctcattcctcctccatcttccgcagtgcaacacactgtatcaggagcaggagcagaagcagagtatatgtttatggtactgaacttagtgtgacaatttgtgaagtctctttagtggaaaattctgtatctttcaaaatgtaaaagtgtgtgctcttagacttagcaattccaattctaaaactctattctacagaaatacatgtaaatactatagtgctcattgagttttgtttataatcatttaaaattggataaaaacaatattccacgaaaaataattaagtaagtggaataatatggagcaacttaaaaagtataatttgggaccgcacgcagtggctcacgcctgtaatcccaggactttgggaggccgaggtgggcagatcacctgagagcaggagttcgagaccagcctggccagcatggtgaaaccccgtctctactaaaaatacaaaaaattagccaggtgtggttgtgggcacctgtaatcccagctacttgggaggctgaggcaggagaatcgattgaagccaggaggcagaagttgcagtgagccgagatcgcaccattgcactccaacctgggtgacaagagcaaaactctgtctcaggaaaaaaaaaaaaaaaagtgtaatttgggccaagatgtcctgatataaaaagataagtggaaaaaatagaacaaaacaatatgcgtagtagaatatgcgtatttaagagagagactacatctggaaagtggaaagaggatagctaggtgtttaggaaattttggtttttactttaatcttctcatatttaatttttaccatggggaattaattgtttttataaaatatattttaattagatatatatgtacatatatgataatcctacattttatatgctttctggatacctatattattcaatatttccaaatattggaggaaagaaaacccaaaataatcaataggattatatgtactaacatggaagtatgttttgatatattgttaagtaaaaaagcaagacataaaatcacacataaattaccatcccatttatgttcaaaactaccttttagaaaaatgtgtgttaggccgggtggggtggctcacaccggtaatcacagcactttgggaggctgaggcaggtggatcacctgagctcaggagttcaagaccagcctgcccaacatggcaaaaccccatctctaccgaaaaaatataaaaattagccggttgtggtggcacatgcctgtagtcccagctactaaggaggatgaggtgggagaattgcttgaacctaggaggcagaggttgcagtgagccaagatggtggcactgcactccagcctgggcgacagactgaggccctgtctccaacaaacaaaatgtgtgctatattcagaaaaaaaaaaatcaggaagaatgaacactaacctattaaaaatagttacttcgagcagtggaattgaaaagaaaatctttcattttttttacccattataattctgtattatttcaatttatctcttctagaacaaagtatgttctatttttgtaattagatgatgacaatggaaataaactaataaatactactcaactcttggcatttttcttttgatctttctgcctcaaaaatattccgtggtgacttgactgcaaacaagcagaggagcagatattatggtttggacaagttgattaatatagactgaagcctatatcacagacaacagtgttcaaatacatttgacccaaataaactttattttatatgcatatatctaaaagagtatatgcatatatctaaaagaataatataagaattatttacagcatagtattcattaagcaggaattaccttcagtcttctgtactccttcctgatgaaacagcacctagactccagcctgttctccagtgaccactaagctctcccacctacctccccacctacctgccctctaccacctacctgcctttgactaggctccacttatagcctaagcagcttttcacctttttctgtctctagaattcctacaggtacttaattaagtacttgcccacatcttatttctatcttaagactctcctagattgccctgggttatatatacccctggctagagtgttctattattttacttctattgttacttctattattatagcctagtttgtattacagctttgtgtgtatatgtatgggtacatattcccactcgattgtgaatctctggagattagaatatagcttaattcatcctgattttgacatggcaccgtttttcacatatatcaagcatttcagatatgttatttgagattaattaaatgagtttattcaggtcattcctccccaaccactccccactccaaccctcacatctcatagagtcttttttttttcatttctaaacaaaacctataaagttgaaccctatgtacagaggtaccctctctctaaccattctctgtgtgctgcagaaaatgtctcaggattataaactcctacttctgttttcctgctttgcctttctaagccatttagaaatgactcactttgaaactcttcctgtgaggtcagatagtggtctagagcataagacttaacttattgccggaaacagagagagaacagaagaagagaaagctcagcaaattttcttgccatacttcatgacttcactgtggctaagtgtggggaccagacaggactcgtggagacatccaggtgctgaagccttcagctactgtctcagttttttggtaagaaaacctagacctacctgatgacttgtgcttagcctgttttgctcattataggtaatgagtttgagtgtcactatcttctatttcccctattccttctctgactttgaattcttttatcttatctctatgtctaacttcctttttctaaatattccacattgcatttgtctttgcttttaatattttcatagtggaattaatagtgaatttttacatcatttctttcctttctttgaattggctatgtatttcaccctgaactttgattccagctgtccccattaatttgtttttcaaataattgattgcactttttttccctttccatttcctctttcttttttttattcttttgcccattccttattgctactgactctgttatcctattactacaatttgattctggggtccacttttctttctctatcacagtggaattttagtttcaggatattaattacctttaaattacggctggtcaacttagtaataattttttttaatcctctactaatcttaaacacataaaggtatggtatttttagccaaattaacttgaagaaatgtaaaaagtaatcttgctctgcaggactttttttttttttttttttttttgagacagagtctcactctgttgcccaggctggagtacagtagcatgatctcagctcactgcaacctccgcctcccaggttcaagcgattctcctgcctcagcctcctgagtaggtgggattgcaggcacgtgctaccacacccagttaaatttttttgtatttttagtagagacagggttccaccatgttggccaggttggtctcaaactcctgacctcaggtgatctacccgcctctgcctcccaaagtgctgggattacaggcgtgagccaccacacccagccttgttctaaaggacttttaatccctgactcctac

SEQ ID NO: 5681 - DNA, 6000 bp, Homo sapiens
taaatgaagacaagaattattatcctctgactaaatgttaaatatctacaatctaattgtactaattacttccaaagtgaaaatttctttgcatctgggagaactgatttgtggcttatttataacttacatgatgaaaatgaagttttatttacacagttgggtttttattaaacatttatctctttttttatgactccctattcaaaactcaatttgaagatccaaatatagagctacagcaagaagcctgttgcaaattcatgatataaaatctctttgaatttgcatgggagcaatttcagccaaacatttcaggtatcactcactaaaggataataattataatttttccaggctataaataactagtcaagctgctcattagttggtttcatcttcaggagtgtagagacaatcctatttcagaggagagctgaacacttccggaagaataacaacgtcgaaataacagcagatgaaaacattattgcatgattcgaagaattgatctatcatgctttaacaggtcacctgtaaattagctcatctacagtgatatttgaaatcagattgttctctctacaaacatgttcagtcctgcagataacatctttataatcctaataactggagaattcatactaggaatattggggaatggatacattgcactagtcaactggattgactggattaagaagaaaaagatttccacagttgactacatccttaccaatttagttatcgccagaatttgtttgatcagtgtaatggttgtaaatggcattgtaatagtactgaacccagatgtttatacaaaaaataaacaacagatagtcatttttaccttctggacatttgccaactacttaaatatgtggattaccacctgccttaatgtcttctattttctgaagatagccagttcctctcatccactttttctctggctgaagtggaaaattgatatggtggtgcactggatcctgctgggatgctttgccatttccttgttggtcagccttatagcagcaatagtactgagttgtgattataggtttcatgcaattgccaaacataaaagaaacattactgaaatgttccatgtgagtaaaataccatactttgaacccttgactctctttaacctgtttgcaattgtcccatttattgtgtcactgatatcatttttccttttagtaagatctttatggagacataccaagcaaataaaactctatgctaccggcagtagagaccccagcacagaagttcatgtgagagccattaaaactatgacttcatttatcttcttttttttcctatactatatttcttctattttgatgacctttagctatcttatgacaaaatacaagttagctgtggagtttggagagattgcagcaattctctaccccttgggtcactcacttattttaattgttttaaataataaactgaggcagacatttgtcagaatgctgacatgtagaaaaattgcctgcatgatatgaaatcttagctgtataaatggaatttaaaaccaaatcttctctaacaaaaaatatagttttcttaatagtctattctcatttttccccagttatctcatttattttggatgcatatctttaaatattattaggacctagtagcaaactactgaatacatcttttctatccctttacaactcagaaatgctcatctttacactccctttcctcgaagaatttcagagctcatgcttctcttcttgtctcctcaacgcaagtgttaggcctgtattgcctagttaaagtctttttagattttactttggctcatggtaaagtggacctgagctacagtaactggtttctcatttttctttgtcatacatttttattgccgctccttaattgtgctcctttcatggctctgctgagtcacccccatttggcttattgattaggaactcagatgttctctggtctgtctttggttttcccgaatgatgatttccatggtctcctaggtaatattttctggttgaccttattctgatgatttctattgattttccttggaattaaatttcctctcaaacaacttgcttttcatgcagcacctaggtgggaatcgaacccattcaagtgccacccaccaaggggtgttcctaagccctcttcacaatctggataaaagaatggggataacaaatattagtcagactgctcaatcaggttcttttctctaaccagaccctgcaaaggttttcactcaggacttaacaaaagaaataaattgggaagaaaatagcgtataccatggaataagcacatactgtccctggaagaagaaacgaatgtttacaaaaaatacagataaatttttattaaaaaaaaaaggaaaataagtcactaaaatttttaatttttctgtgaacatgaaatccatcctcactataatattattgaaacgtttggtctggcatatctcaggttgtgtatgtactaatatggctgtacattattgcttttactcccattactttctgtttaattctgatgtatttcaatctactaatttccttttattataactaaaatactaattaccggaaaattatcagttgtttgtcttattattatgtaaaactcactctgtaaagtactaatatttatagccccaagtatataaattttatgaactatatttctaatatgctagctgtatatgttactctttgttttacaagacacaagaattcatgttctcttgatgaaatatattaatgtattctacaaaatacaggtagattttatactaggatgaactttatatttttcctaaggtttaagtgaaataaacgttttattgaattagtacttttgggaaggttttaccccattagggttaagtttttttcttccatattttgtttcctgcctctctaatgtttcaagcatctctagtgaccacagtgactggggttcaaagtagtaagcttttgacaaaatgctctctcatagaactttttttttaactatatattcacataacttcacgctatacaacattggtattcataaaatctacatttatttccaaaactaaacaaaaacaagtctaaaaattatttgagaaaatacatcatcatagttcccatgagcacttcatttaccaggataaactgtagggtaaaaatgatgagtctaggccaggcacagtggctcacacctgtaatcccagaactttgggaggccaaggcacacggatcgcctgaggtcgggagttcaagaccagcctgaccaacatggagaaacccggaatctactaaaaatacaaaattagccaggcatggttgcacctgcctgtaatcccagctacttggcaggctcaggcaggagaatcacttgaacctgggagatggaggttgcggtgagccaaaatagcactccagcctgagcaacaagaacgaaattccatctcaaaaaaaaaacaaaagaaatgataagtctaggtcagggatcatatccaagatcgtcctatcataggtgatgttccagttgcctgtgaacatggctacataatcatacagattgtccaaaagttaaggctacatctccggaatgatggtttgtcctttaaggaaggataagagaagacatgcattcccaggaaggtgtgaatacccaagaactattctatggaaccccatgtagtaaagcgcttctcagtaactctaaattagagaagctatttcaaactaaaaattcatctctagagatgtggaaagtttaatcttcagtctcctgctagaagggttgaggatctagatactcatgcaatttgtatggaggacagtggagagaatgaaatacagaattttactatctcctctctcatgcatacaactacccttgagaacattttttaaatttttgaaatctttatgaaagtataattggtataaaaagaaccgcatatatttaatgtataaaatttcaaacacccatgatatcttcaccacaaacaaggtaatggacatatctaatacctctcaaagtttccttgagaacattttaagtgaaaatgaaaaatttaaggtaatcaatagtctttttttattacaggtcctctaccttattatatataacattgctaaataaccattaaaagtcatttagtcagtaagacaatgtgttgtattaagagacactatgccatgtaattgttcatctgaacagccaaaataatgacctaaagtttctttggaatcaaataacctacatttagtgttaactttttaaagttcctgaaaatatataactctcactatggaaccaaactttggattctttactaattatcaatattaacattcagcaaaataaaaattcttcaagaactttccaattttaccagttttatacttgctaccaaattcttgatgttcaggttgccagaatggaacactcaatctaatttgaacttcagtacttcctgaaagcactgatcttaagtaatcagggacatacactaaaaaattattgatttttttacctgtaattcaagtttaactgagtgtcctgaatttttagtcgctaaatctagcaaccctattgaggttactagcatacatcacaaattaatgaatccaaaatgcgtacaccttagcctcagaaagacaatgcaggaccatgaaagggaattggcccaatttgcatcttagtaaacagtagctcagcctaaattaaccgtatgtggaaaattacaacctgctgagtaggtaaatgggcatacagtggccaggccaaggatcgccaaacacattgtttgtcaagactaattaggatttaatgaagatagctccagtcttcatttatcattccagtctccatcacaaaacagactacaacaaagaggtaaagaaaactacatcaaaatctaagaagcaggtgtggatgtcaaactccatcaggtcaactagaaactaattgcatatttaaacatggcagataaagtgcagactactttattgttcttagcagttggagagttttcagtggggatcttagggaatgcattcattggattggtaaactgcatggactgggtcaagaagaggaaaattgcctccattgatttaatcctcacaagtctggccatatccagaatttgtctattgtgcgtaatactattagattgttttatattggtgctatatccagatgtctatgccactggtaaagaaatgagaatcattgacttcttctggacactaaccaatcatttaagtatctggtttgcaacctgcctcagcatttactatttcttcaagataggtaatttctttcacccacttttcctctggatgaagtggagaattgacagggtgatttcctggattctactggggtgcgtggttctctctgtgtttattagccttccagccactgagaatttgaacgctgatttcaggttttgtgtgaaggcaaagaggaaaacaaacttaacttggagttgcagagtaaataaaactcaacatgcttctaccaagttatttctcaacctggcaacgctgctccccttttgtgtgtgcctaatgtcctttttcctcttgatcctctccctgcggagacatatcaggcgaatgcagctcagtgccacagggtgcagagaccccagcacagaagcccatgtgagagccctgaaagctgtcatttccttccttctcctctttattgcctactatttgtcctttctcattgccacctccagctactttatgccagagacggaattagctgtgatttttggtgagtccatagctctaatctacccctcaagtcattcatttatcctaatactggggaacaataaattaagacatgcatctctaaaggtgatttggaaagtaatgtctattctaaaaggaagaaaattccaacaacataaacaaatctgaagagaaactatgcttttctaggacaaacaaagataagatgttt

SEQ ID NO: 5682 - DNA, 6000 bp, Homo sapiens
tcttaaattgatcagtattccacacggctaaggaaaagaagtgaggtagtgggaaagaccatgattcagaaggcaagcttggattctatatctggatttaccaggaatttttaatatgtcagttattaatcaccctcctacatgatatattttcatcttcatcttttctggacattacaaattgatcccagagtagttccatttccaaataataaccttgaacctactttattcccctccacaaaattttatctttcaaaaagtttaattaaaataatgaaatattgcattccctgagatgtgaacatggtgcgaccttgtctgtcagttgcatgcaaatcaatttctttactctagtgaagtccttctcagaatattacctgttttatggctttggtcatgacaagcacagtgtgtatttttgagttgtataatctgatatttcttcagaaacaaaattcacagagaagcatgaaagaaaccccaaatttcactgaatagaataacaatagctatttactttctcataaaaatctgcaagattaatttttatctctttattttgtctaaaaccctgaacatatgacacattatctcattaaatactttgtattgttgtgtttgtttgataagcaatatttaatattgccttaaaatttaatattagtttcaaaataatatttctgggaactgtgtattgctgtgtgcctttttctattatttcaaatatgttctactatgcccaatgacatgtttcaatatgtcccaatgaaacagtgtgtttccaatgtgtgtataattagcatactaatatttataatacacctgctgccaaaaaatagagctaagaaaattcagagcatgtattcttatcactcagttcagactgaagagtcttgtatatctatcacgctttttagttccaaaaatatcactttcttgctctttgtcctcctcactgttcaggctgatctgtttccattctaaagataagtgaccagtattttgactattttttctatgtatggaagctacattcaggtacaaagcaagaacactctaagaaaccctaacatctaaaccagaattttccgtgtctcatttgctgacaacactacaatgtcatgtttatttccctcattgtatcttcagttgagaagacaaacactgcagagctttttgaggatattgggaattacctaattaatgtatttctcaatgccctagtgaatggagtgtccttttggccctcttaagtcatataatggggagaaggtgaagttcgcatatgataaattcaccttaatactcctatcttcctacacctttagattctttcctctacattccaccagttatgccatttaagcctcatttaatgttaataataatttgtttaaagctttagtcaaccaagcaagcaaactggccacacaagctaacacagtaaacctagaatctgtaatagcaataactatgtcaatatactaacaaggatggatagtcatccagcaaattaaattctagccatattttccaagtaattgataccttcttgaagttcctggtcaacagctcagattgataaatccaaaatatacagagcttaaaataagaaagagtgtgcaaatttaagaaatcagatccattcccatttgcatcctagaggctttcagtcatcactgcaccaaaggaaattactggccccaatcattgaagtctttaggcagctctagcccagagcaggactggctatcttcttcatctgcatcacagctaacaaaaaggagagataaagacaactatatcatggtctaagaggcagacagatacattgttcttcactggtcagctgaaagtcaattcatcatcagtgatattcaaaaatcacaagtctttgctggcatgccaagtgcaatagaggcaatatatattattttaattgctggtgaattgaccatagggatttggggaaatggattcattgtactagttaactgcattgactggctcaaaagaagagatatttccttgattgacatcatcctgatcagcttggccatctccagaatctgtctgctgtgtgtaatatcattagatggcttctttatgctgctctttccaggtacatatggcaatagcgtgctagtaagcattgtgaatgttgtctggacatttgccaataattcaagtctctggtttacttcttgcctcagtatcttctatttactcaagatagccaatatatcgcacccatttttcttctggctgaagctaaagatcaacaaggtcatgcttgcgattcttctggggtcctttcttatctctttaattattagtgttccaaagaatgatgatatgtggtatcaccttttcaaagtcagtcatgaagaaaacattacttggaaattcaaagtgagtaaaattccaggtactttcaaacagttaaccctgaacctgggggtgatggttccctttatcctttgcctgatctcatttttcttgttacttttctccctagttagacacaccaagcagattcgactgcatgctacagggttcagagaccccagtacagaggcccacatgagggccataaaggcagtgatcatctttctgctcctcctcatcgtgtactacccagtctttcttgttatgacctctagcgctctgattcctcagggaaaattagtgttgatgattggtgacatagtaactgtcattttcccatcaagccattcattcattctaattatgggaaatagcaagttgagggaagcttttctgaagatgttaagatttgtgaagtgtttccttagaagaagaaagccttttgttccatagagacccctaaagagtatcctgactacaaggatgaaagaaatcaacaaaaggcattctcccttctcttgtttgcattcattttctcttatatgctattggaagtcattaatatctgtcatgattctgaagatttgttttgtgttccttcacacttttgtcttgtttaatggataatctaatgttatcattgcaccgtatattctttgtcgttgcagaaaaaaaaaatgcatctaaatcccacactaacatttcatcattttatgtcattgactaaatacaaagaggttctacttcttttctgacaaatactggcaaaggccttgaactcaatgagtagaagaatgtcaggcaaacaggctttggggaaaagattttagaactcatcaacccttgctataaaatcaatcatgcaaaacaactctctactttgaaatgaaggccggtccttatcttcaccgccctttcctctccatttctggaagggtttgtcttgatcaagaagggagaaaaacaatctttaatgagattctatctaagatgatatatgatgtgggaaaaggagtataatctcaagaatgaaagtttgacagagagaggaggcacagttatgtatagcagaaccaccttgagaaagaaggttgagggtcccagtagtcagcgtgttcatgagtactctagctggtgatggcaattttagaagtcatttcccaaagattccctggaatgttctctctagccttctaactcagaaatctctgacatatttttttccctctgcatcattttcttttctattttgtttccagcagtagtttatagataactaggtttctttaagttattaagtttatgctttcctgttacacattacacacatgtaagaaatagaaaaaatcctgcatgtgttgtatacattgtagaactatttaaatacaagaagccctagggtattgtgatttgtattacctacattcaaatgtattttgggctaagttgtactttcccttaccccaaaacaaataaatctaatttaatagtagaattagtcctattccttggaaatactggtatgtaaaaaaaaaaaattattattattattttgagacagagtctcactgtatcgcccaggttggagtgcagtggcacgatcttggctcactgcaacctctgcctcccggttcaaatgatccccctgcctcagtctcccaagtagttacttttttatgtgtttgccctatctagaaatatgactataatatgcactgtgagattacaaatcttataaaaggagttgattggaactagaataatgtaaaatttaaattttcttaattttagattacaatgcttattatacaagagacagtgattcaggaaatgaattgtcttcaagggtatttgtcacattaaaaaaaaactaaagataacaaatctttacctggcatatttcacttctgaggaacaattgaaaagaaagcaaattcttagtaaatattatcatgtgcctgcctaaaaaaaagtcatttctaattagatttgtattatatccttccctaattagccgtttaaatgaagacaagaattattatcctctgactaaatgttaaatatctacaatctaattgtactaattacttccaaagtgaaaatttctttgcatctgggagaactgatttgtggcttatttataacttacatgatgaaaatgaagttttatttacacagttgggtttttattaaacatttatctctttttttatgactccctattcaaaactcaatttgaagatccaaatatagagctacagcaagaagcctgttgcaaattcatgatataaaatctctttgaatttgcatgggagcaatttcagccaaacatttcaggtatcactcactaaaggataataattataatttttccaggctataaataactagtcaagctgctcattagttggtttcatcttcaggagtgtagagacaatcctatttcagaggagagctgaacacttccggaagaataacaacgtcgaaataacagcagatgaaaacattattgcatgattcgaagaattgatctatcatgctttaacaggtcacctgtaaattagctcatctacagtgatatttgaaatcagattgttctctctacaaacatgttcagtcctgcagataacatctttataatcctaataactggagaattcatactaggaatattggggaatggatacattgcactagtcaactggattgactggattaagaagaaaaagatttccacagttgactacatccttaccaatttagttatcgccagaatttgtttgatcagtgtaatggttgtaaatggcattgtaatagtactgaacccagatgtttatacaaaaaataaacaacagatagtcatttttaccttctggacatttgccaactacttaaatatgtggattaccacctgccttaatgtcttctattttctgaagatagccagttcctctcatccactttttctctggctgaagtggaaaattgatatggtggtgcactggatcctgctgggatgctttgccatttccttgttggtcagccttatagcagcaatagtactgagttgtgattataggtttcatgcaattgccaaacataaaagaaacattactgaaatgttccatgtgagtaaaataccatactttgaacccttgactctctttaacctgtttgcaattgtcccatttattgtgtcactgatatcatttttccttttagtaagatctttatggagacataccaagcaaataaaactctatgctaccggcagtagagaccccagcacagaagttcatgtgagagccattaaaactatgacttcatttatcttcttttttttcctatactatatttcttctattttgatgacctttagctatcttatgacaaaatacaagttagctgtggagtttggagagattgcagcaattctctaccccttgggtcactcacttattttaattgttttaaataataaactgaggcagacatttgtcagaatgctgacatgtagaaaaattgcctgcatgatatgaaatcttagctgtataaatggaatttaaaaccaaatcttctctaacaaaaaatatagttttcttaatagtc

SEQ ID NO: 5683 - DNA, 6000 bp, Homo sapiens
gatgtgttgtcaaatataaataaataatttattgtgtttaagttgaaatgctgttaaaatcattttatttatgccattgcagagagaaacaaaatagtcacctgtccattaatattatgagatgcactgggcattaatattgaataaagaaaagaactacatatgaaggaaaaaaacaactaagtccatttaagtttgtttacattttcagtgagtaatggaaaacaaaacaaattgttaaaccataactattatgttgccatattttatgatttcatgtgactggcattgtcttagtccattttgctgctataaaaagtatctgagatgaggtagtttataaataacagaaatttattttttcatagtgctgaaggctagaaagtccaagactaaggcagtggcaggtttggtgtctggtgagggcttcgtcactgcttccaacatggaaccttgaatgctgtatcttttcatggcagaagaggggaaaggttaaaagacctatttagttcccttcaggccttttaatcccatcataatggcaaacccatcataatcatctcctaaaaggccccacctcttaatattgttgcattagggattacatttccacatgaattttgaagaaaatacaaacattcaaactatggcaatcataaaatgtgaaatttggccaaatattatggataggaaattgtaattaagacacattaataaaggctctatagcaaaacaactagataagagaatcgtgatttattgaatggaatgccaaaaaattcaataataatagtacctaaaattttttgagtatatatggtaagaactattctaagtattttaaatgcaagactttatttaagtataatatttctatgagatagatagcactatgatcaatgttttacacattggagaaagaaaagattcagcacaatttaaatcacacaatcattaaaactgagaataagcttcaactccagctgtctggcaccagagctgaagctcttaactgttatatatatttcaagccttgtccaaattttgttatttagcaaataaattatttgtctccatggatcccaaatattctatttcttcaccatttttatacaaatagacaagactattcccaatatgctattataataaagtgttttatgcttgaattattgactctatatagttatccattaattaagactgttcctcttcttaaagagacatgcatatttctcattcatgttatcccttctcaacaggggtctttatattgctctgttttcatgaggttcacatgtacccccatacatctgtacaactattatatgtccataattaaattttaaaaaaagaaaaatacaacaaacaagattactgaatgaatttttttaaaaaatagaagattatttcatccaacaaaaagataggggaactttagcaaaaagaatggtggtgaaatttagtatatttaactacttaatttcaggtagaaagcaaaaatcaaggaaggaagactggcttatgattgtgacaaggaaaggtaatattttgtatagagtgatgacaggagataatgaactgctgtatgtcttgtgaggaattagacggagaataatctggccaggcacagtgactcacacttgtaatcttaacattttgggaggccaaggcaggaggatcactagaggccaggagttcaagaacagcctaagcaacacagtgaaactttgtctcaaaaaaaaaaaaaaaaaaaaggaaaaaggaaagagagtagagtaatctgaaagttacgagagggaaagaaaaacacccatcccagctttagacccacttctatgagggtgtgagagagaaaacagctgccacaggatttaattgtagagtattaaaatgaaaagattcatggacatgagtgatgaatgaactgggaggggcaccaaattatatacttatttttattaatccttagcttaagtctagtatttcttctgtcttgaatgtaagtaacaagcacataccataccagcagtatctgtaattttttcacttcaggaagccaaaaatttttgtcgttacaggtacctcctattgtcatttactttcaccactagtctttatctgccagatatttttgttatgtcaattaaaaagcacataaattcctatattatattaacaatatatttcatactgcaagaaaaaggcatatatatatggattccttatacatttcaaatatttttatttcatgcacttaaaaacattattctgaaattatagcatgcaccagactggcaaagtagtccattgaacaaaaaagttccagaacctcgagttcaaatgaagaaaataaagtgaactgttagagaaacaaatgagaatatatggcttctgctaatggtttactagggatcccaatggatatagtgaagagtttagaatggggtaggagataaagtcagcaactattcaaaatataagttgtcagaaaataggacagtatcgcagtatcctgttcttgatttataaatctgaagagtatagtcatttctcttgatcagtaataatcagtggcataactcaaggacaaatgcctgtaaaagatgtaaggttctaaagaatggtaaaaagtatttaaacaaaggaaagaaaatgaaatttaagaaatatctgcctaagtaggtttgtgtttgctcacttctcatagaaagacatacaggaaatgatgtcataagtttcccagtatttcatctgttttctagtagagacagaaataatcaataaactaacattctagattaaagtgtttctgcaatgaaaatagatgttaaagtctgtcagctaggatccctctttaacttctcaatgctaagataaaatccaaagggcaaataacacataaactcacacacacacacaatacacacaaaaaaaacatattcaacggtgtcaaataaattgagatcatttgggttttatttatagcaaggaaagataaaagagggtggcattttagtaagtataggcccttaggtaactctggtcatatcctatagcatattttcgtttacatttgaatataggcataactttcttaaattgatcagtattccacacggctaaggaaaagaagtgaggtagtgggaaagaccatgattcagaaggcaagcttggattctatatctggatttaccaggaatttttaatatgtcagttattaatcaccctcctacatgatatattttcatcttcatcttttctggacattacaaattgatcccagagtagttccatttccaaataataaccttgaacctactttattcccctccacaaaattttatctttcaaaaagtttaattaaaataatgaaatattgcattccctgagatgtgaacatggtgcgaccttgtctgtcagttgcatgcaaatcaatttctttactctagtgaagtccttctcagaatattacctgttttatggctttggtcatgacaagcacagtgtgtatttttgagttgtataatctgatatttcttcagaaacaaaattcacagagaagcatgaaagaaaccccaaatttcactgaatagaataacaatagctatttactttctcataaaaatctgcaagattaatttttatctctttattttgtctaaaaccctgaacatatgacacattatctcattaaatactttgtattgttgtgtttgtttgataagcaatatttaatattgccttaaaatttaatattagtttcaaaataatatttctgggaactgtgtattgctgtgtgcctttttctattatttcaaatatgttctactatgcccaatgacatgtttcaatatgtcccaatgaaacagtgtgtttccaatgtgtgtataattagcatactaatatttataatacacctgctgccaaaaaatagagctaagaaaattcagagcatgtattcttatcactcagttcagactgaagagtcttgtatatctatcacgctttttagttccaaaaatatcactttcttgctctttgtcctcctcactgttcaggctgatctgtttccattctaaagataagtgaccagtattttgactattttttctatgtatggaagctacattcaggtacaaagcaagaacactctaagaaaccctaacatctaaaccagaattttccgtgtctcatttgctgacaacactacaatgtcatgtttatttccctcattgtatcttcagttgagaagacaaacactgcagagctttttgaggatattgggaattacctaattaatgtatttctcaatgccctagtgaatggagtgtccttttggccctcttaagtcatataatggggagaaggtgaagttcgcatatgataaattcaccttaatactcctatcttcctacacctttagattctttcctctacattccaccagttatgccatttaagcctcatttaatgttaataataatttgtttaaagctttagtcaaccaagcaagcaaactggccacacaagctaacacagtaaacctagaatctgtaatagcaataactatgtcaatatactaacaaggatggatagtcatccagcaaattaaattctagccatattttccaagtaattgataccttcttgaagttcctggtcaacagctcagattgataaatccaaaatatacagagcttaaaataagaaagagtgtgcaaatttaagaaatcagatccattcccatttgcatcctagaggctttcagtcatcactgcaccaaaggaaattactggccccaatcattgaagtctttaggcagctctagcccagagcaggactggctatcttcttcatctgcatcacagctaacaaaaaggagagataaagacaactatatcatggtctaagaggcagacagatacattgttcttcactggtcagctgaaagtcaattcatcatcagtgatattcaaaaatcacaagtctttgctggcatgccaagtgcaatagaggcaatatatattattttaattgctggtgaattgaccatagggatttggggaaatggattcattgtactagttaactgcattgactggctcaaaagaagagatatttccttgattgacatcatcctgatcagcttggccatctccagaatctgtctgctgtgtgtaatatcattagatggcttctttatgctgctctttccaggtacatatggcaatagcgtgctagtaagcattgtgaatgttgtctggacatttgccaataattcaagtctctggtttacttcttgcctcagtatcttctatttactcaagatagccaatatatcgcacccatttttcttctggctgaagctaaagatcaacaaggtcatgcttgcgattcttctggggtcctttcttatctctttaattattagtgttccaaagaatgatgatatgtggtatcaccttttcaaagtcagtcatgaagaaaacattacttggaaattcaaagtgagtaaaattccaggtactttcaaacagttaaccctgaacctgggggtgatggttccctttatcctttgcctgatctcatttttcttgttacttttctccctagttagacacaccaagcagattcgactgcatgctacagggttcagagaccccagtacagaggcccacatgagggccataaaggcagtgatcatctttctgctcctcctcatcgtgtactacccagtctttcttgttatgacctctagcgctctgattcctcagggaaaattagtgttgatgattggtgacatagtaactgtcattttcccatcaagccattcattcattctaattatgggaaatagcaagttgagggaagcttttctgaagatgttaagatttgtgaagtgtttccttagaagaagaaagccttttgttccatagagacccctaaagagtatcctgactacaaggatgaaagaaatcaacaaaaggcattctccct

SEQ ID NO: 5684 - DNA, 6000 bp, Homo sapiens
tttatgatatgaagtcagtattctttgggtcactcatatgttgtgatttttggatacggccaaatgaagaaaactttcttggggattctctggcacctgaaatgtggcctgaaaggacgggcactcttagctacacaggtaggcctcagagagaagtcaacaagaagtcttggtgtaatctttcttgcttcatcgtactctttttttgtatatgtcctgtgtcactgagtaagtaccatttaaattcttcctgggcctggccgggtgcgggctcaggcctgtaatcccagcactttgggaggccgaggtgggcggataacgaggtcagaagatcgagaccatcctggctagcacggtgaaaccccgtctctactaaaaatacaaaaaattagccaggcgtggtggcgggtgcccatagttccagctactggggaggctgaggcaggagaatggcgtgaactcaggaggtgtagcttgcagtgagccgagatcgcgccactgcattccagcctgggcgacagagagagactctgtctcaaaaataaataaataaataaataaataaataaataaataaataaataaataaataaaataaaataaataaattcttcctgggccaggactgacctctaaaatagtttttaaaatattttaaagagaaaataatcacctatatataaaaaagaggtgtgaataagttgtaatccactcattcagatctacagaaggtggatgttagaaatttaacagaagtaagcaaaatagaatgaaaaccacttatttcctctaggtaacaatcttgtctctgtaataatatggatttagccagttactttatgttttttgtttgttgtttgtttgttttgagatggagtctcactctgtcgcccaggctgaaatgcagtggcaccattgtttttgtgaatatttttgctgctgatgtaactgcagaaattagtctagaacttgtggaagttgttaaaaccctttcataagagcccagttactattgcacaatctaaggcatgtagagttaacatacctagaatgcacatcaaaatggtcattaatctcattcatgagaggtctgccctcattacctcctaaaggaaccatctcttaatactggcacactggcaattaagtttcaacatatagactttggaggagacacatgcagatcacagcaaaggggtttttaaatctttgctatgcctatcacttgctttagttctgttaattttgctttatttattttgagtcacaattattagtctgatacaccttcaggattgttaagtatttttgataaattgaatattttatcattatacaacttccctctatttttctactacttgtcttgataatatagccactttgagaatagaaccagtcctgctttctatggttacaaattccatagtatagctttttctttcctttacattcaatctatctgtgcctttatgtttaatgttttatcttctaggcataacatttaattgtgctttcatttattcattctgatgatctctatcttttcatcagagtgtttagtcaaatcatgtttaatgtaattatcagtatggttggctgtaagtcttgcattttgctcaatgtttttcatttatctcacttatttttgtccctctgtcctttttctggctttcttttgtgttaattgactgtatcttcaattatttcattttaatctcacaattggcttttaaaactccatttgttataatgaattattcttttatatatcgctggactctattttgtttggaatttttgcatctatgttcaggctatattagcctgtaatagtcttataagtattcttgatgaaattttgtataaagttgttcacagtattgtcttataataaaagattatatacaaggatatgtaactatattatatagtattatatatatatatatatgtatatgtatatatatatatgtatatatatgtatgtatagagagagagagagagagacagagaaagagagagagagagatgaggtctcactctgtcacccaggctggagtgcagtggcccaattatagctcactgcaagttcaaactcctgggctcaggcaatcctcctgctcggcctcccaagtagctgggactacaggtgcacaccaccatgccctgctaaattatttttatttatttattttttttagtagagataaggtcttgctatgtttcccaggctggtctcaaactcctggactcaagtgattctcacacctgggcctcccaaagtgctgaaatgacaggcattagctaccacacccaggccatatttctgatatctctaaggactgtagtaatttgtattttcttttgaccaacattagtatattactgtacctaattcttttctatcggtgatttctgctgttactataatttcttgacttctattttctttcactcttagctttctagcttcttgagatgaaaacaaaattcatctgtttttaccctgcctttctaaaagatgcattcaaggctacaaatttccttcaaagaatggctttaattggattatgtaaattttaataggtcatttctttattacacgttgagtatccctaatccaaaaatctgaaatttgaaatgctccaaaatctgaaactctttgagcgctgacatgacgctcaaaggatatgctcattggaacattttggatttcaaatttttgaattcgagatgcttaatcagtatgatgcaaatgttccaaaacttaaaaaaaaagaaaaaaaaatccgaaatccaaagctctctggtctcacacatttcagataagggatacacaacctgtattatttacttaaaaatatttttgtaatttttgttatttcttctttgactcaagagtatttacaggttttttgtcttagtaaattgtttctttctctagttatctttttattattgaacttcattttattcctttgaattcagagaacattcaacacttgtgagatattcttttggattcatgatcagtcttggtaaaaatagtctatgtgcacttgaaaagaatatgaattattttaccgttgaacacaagtttgtcaattgttttttcatgtattttccatctattgatttttggtgtttctaagatgagttattgagttatgtattttacagtctttcattgtgattgtagatttgtcttatttttccttttctgtaaatgtttggtagattatttggttcataaatttttgggattaccctacctttctgtagatttgagcatttttatcactataaagtacactccccatttcttctctaatgctgcttcttaccttaaagtctgctttatagaatattgttataattatgccagatttcttttggatgatgtttgcatggcttatttttccataattttactttaaagttttccttttctatatttaaattgtgtttcttgtaagcagtatacagtcagagttttaaattcttctttgttactattaattttttacttggagtatttagttcatttacattttatataattatattctccatttctagaagttttttccccaaatgttccaatttctttctaacagtctcttgctgctcttctctgaaattgcatcttgttttttgtaaacagtgtatacattagctaatttatctatacatattcttatctgtcaatttcagtatgtgcagcccatgagaatttaagttttctacttgcttttggttggtttgttttgttttgctatcatttgtagtctattcctaagcttaatttaacttcattttgaaatcattgtgcaattttatttatggtagtcatgccaggataagtgagagaaggtcttcttttctccaaagcttagtttattcatatttaatgtaaatacaaaaatagcccctcttttaaaggattgaaggcttgtgaaattaagatgagaaaaagatacttaacatagcgctaggaatataataaaagctcaataaatgttagatttcacttttaatttcacttttaattcttagatcagtatgttgatttacttaattgtttcccacctccctcattagaatatacactccataaatcacacaagttttgaaattctgtctaccactatattccctcaaagatcaaaagagagcttgttgtatctagacattcagtaaatacttgttggataaatgaatgggtgccagcaaacagtaatgtgttaaatgaagagattattcctaagagcctttcatgtcaagggtagtcaacataatcttctgcattcaagggtgtaataaccataagtataaaacaacagcaacagatttgtgacatatttgtgaaacttgtcatacctagagttgagcttaaattttaattaaaaattaaatcgatcatttagagtaagtatctacagtggctaaatttgtttttcatttctatatagtattttctgtacatatataaattgattataaatgacataaataatgatttgatattttaaaagataaagtcaaaatttttgtttctgttttgcattacattctataggtatatgtttggcactcctcctccacaattcaatttattaaatgcaaaatagtctcaggaggacatgtaaaatccatgaaacagaaactttcatttgcattttaacaaattatagataggcattcagtctgaacatacattctccagactagctatgttttgtagacatatttggaaaggtcttcattaagaaatttctgattccatctcaagccattactggggcaatttcaagtctttatataatgaaagagaagaaagtcacacttccgtcgagcagccaatatatgcctcattctgcagcaggtaatctaagatagatgtaacagaagcaatattaagaattagcagatatgctacgtgtagtggaaggcatcttcatttttgttgtagttagtgagtcagtgtttggggttttggggaatggatttattggacttgtaaactgcattgactgtgccaagaataagttatctacgattggctttattctcaccggcttagctatttcaagaatttttctgatatggataataattacagatggatttatacagatattctctccaaatatatatgcctccggtaacctaattgaatatattagttacttttgggtaattggtaatcaatcaagtatgtggtttgccaccagcctcagcatcttctatttcctgaagatagcaaatttttccaactacatatttctctggttgaagagcagaacaaatatggttcttcccttcatgatagtattcttacttatttcatcgttacttaattttgcatacattgcgaagattcttaatgattataaaacgaagaatgacacagtctgggatctcaacatgtataaaagtgaatactttattaaacagattttgctaaatctgggagtcattttcttctttacactatccctaattacatgtatttttttaatcatttccctttggagacacaacaggcagatgcaatcgaatgtgacaggattgagagactccaacacagaagctcatgtgaaggcaatgaaagttttgatatctttcatcatcctctttatcttgtattttataggcatggccatagaaatatcatgttttactgtgcgagaaaacaaactgctgcttatgtttggaatgacaaccacagccatctatccctggggtcactcatttatcttaattctaggaaacagcaagctaaagcaagcctctttgagggtactgcagcaattgaagtgctgtgagaaaaggaaaaatctcagagtcacatagacaccttgggaagagatggatgttccacgaaaggaatccagtgaataaatccttgaagatctgtttcattgcactgcattcttgcattgtctttttaactgtgtcattaaagatcactgaaatcttccataattgttttg

SEQ ID NO: 5685 - DNA, 6000 bp, Homo sapiens
catggatacaaagaatcaattattaaaatggctgtactgcccaaaggaatgtacagattcaatgttattcctatcaaactaccaatgagattcttcacagaactggaaaaatttattttacaatttatatggaaccaaaaaagagccctaatagttaaagtaatactaagtgaaaacaacagagctaacaaagctagaggaatcacattacccaacttcaaactatgttacagagctacagtgaccaatatagcatggtactggcataaaaacaggtacatacaccaatggaacagaatagagatcccagaaataaggccacacatttatgactatctaatctttgacaaaactgacaaaaacaagctatgggaacaagacttcgtatttaataaatagcactgggataactggctagctatctgcagaagatcaaatctgaaattcttccctgtaccatataaaaaaatcaagtcaaaatggattaaagacctaaatgtaaaaagaaacctgtaaaagccctggaagacaacctaggcaataccatcctggacctaggaatgagcaaagatttcatggcaaagacatcaaaagcaatcaaacaaaaacaaaaattgacaaatgggatcctattaaacttaagagcccctgcacaagaaaagaaaatatcaacagagtaaatcgacaacctacagaatgaaagaaaatatttgcaaacaatgcatctgacaaaggccttatatccaacatctataaggaacttgaatttacaagagaaaaacaaccacattaaaaagtgggcaaaagacctgaacagacacttctcaaaagaagacgtacatgtgaccaagaagcatgtgaataaaaacttaacatcactgatcattagagaaatccaaatcaaaaccacaatgaggtaccatctcacaccagtcagaatggctattactaaaatgtgaaaaacaatcagctccatcatggtggatgggaggcaggactaaattgcagttctgacttggaaagacagaggagcttgtgaaggcttgcatcatgaattttagctccagaaagactgcagaaaaaaatcaggaaatgcgagaggacccacaggttttctgaagaaagtgggctgctcctgcagaacctgggagacaccccaaatactgtgaaggcccaaattgcagaagtgggaaagggagatcctctgcccccaaacacaacctcccctgggaaaactgaaggtctattttatgggaaaagattacaaccttacctggagctgagttaatttagagagctgagcaaaatacaggaatagagggagcagtagaaaaggccctgtgagctcgctgggtcctcaagcaggctattcctgtgtggcatcacaaagatcctttgggagggtgacaagagggaaatgccacagagagaaggaaatcaccagctgaattttggaacaatttgaagtcatcaagaagcctcctggccagaactgagggaagagttcaaatccattgtgcagactaaataggcaggggaagaactaaagtcctactttctttcacagctaggaggtgggtagcctgtggcaagttctcagccctgcttgccgactgtctggaaacagacagggtgccattggggaggcatggtgggagtgagaccagccctttggattgcatgggagctgggtcaggcctgtgactgccagcgttctctcacttccacgacaacctgcatgactcagcagaggcagcttccttctaggtgcataactccattaacctggaaacctcagccccatcccccctagcagccacagcaggagagagtgagtctgagctcagacatgcttagctctgccccacctgatggtacttccctacccaccctggtattctgagcacaaagggcataaactcttgagagttctagtgacttacccactgccggtgcctcttcatactatcacagctgatgctctctagaaagaactacctcctggtaggaggccaaccacacaaaaatagagcattaaactcccaaagctaagaaccctcacagagtccatttcacccccctgccacctccaccagaacaggtgctggtatccacagttgagagaccaacagatggtttacatcacaggactctgtgcagacaaccccaatatcagcctggagcctggtggactttcttggtgactagatccagaagagagataacaattactacagctcagctgtcaggaagccacatccataggaaaaaagggagaatactacatcaaagaaacaccctctggaacaaaaaagtctaaacaacagccttcagccctagatcttttctctgatagagcctacccaaatgaggaggagccagaaaaccaactctggtaatatgacaaaacaaggctctttaacactccccaaacatcacactagctcaccagcaatggatccaaaccaagaagaaatccctgatttacctgaaaaaaaattcaggaggttagttattaagctaatcagaaaggcaccagagaaaagtgaagcccaatgcaaggaaatccaaaaatatgatacaagaagtgaagggagaaatattcaaataaattttaataataaataataaattttaataataaataaataataaattttaataataaataaattcaaacatttgatacagttagtacataaattttgatgcataaaaaagttaaaatgaaacacactaatctgttctgtatacacctaaatgtaactttgacactgaaatggattaagacactgctcttctctgaggaactgagtttttattctaatttctggatgtagtgtgtgggaattattatttttgctgctctttttctgaaaaagattgcctttccctaagagctgttgttccaatgaaaacctagtgttttcaacccagcatgaatgatgcaagtgctgaggtcctttgggcgagaccctctggggttattgtagctctcactggagacgtgagctctgctctcttttcaaagtatccatgaagtctcaacagaacccaccacacaaccccccacccaccatggtagtttgtctttctctttgtcttctttcccaacctcatctttattgcctggatatagcgaggccagggtaaccttcttgtctctatgtggatagtacgtttgtacttctagccttgggatttttccttaatatttgtccatgctagctgagtttgccttttcaatagctctcttgactaaatatacggtaatttccaagatattttggttttattttattttatttttgcttagctttgcttcaggggactgaaggtgagggatcagttcttcatagtggaacaccttacatctttctctgccatctttgacgtttatgaggcatatttttctactttgtttggtagctgttgctgaatttgtttcattggtgctttgctcactttacttacttttttagctattgaagaagaatgactgtatcatgctgctgatttccccgtcttggctagacagtatgtcatcctttatctacattggtccctgtagtgaggatcatggagtagatgttgctgggagagtgagtatatgtgaaaaaaatgtgaaggtatttggtgctgatgaagcaatatgccctactgggcaggggagaggcacagaataagaattcttgccatgtggatgaactcattcaaacacaatgactgctttatgagacaatagatagatttctacctcttctcacatgtacagagaaaatatttccaaagtctccggaatatttacatgtattactatttaatataaacttgcaagtctttttaaatgtgtttaaaactatcacagtactaaacatgaactagatgcataataaatgctgaaagtaaaaagcctgaattatttaagtgaaaagagaaaaagatttagatcccaaataaatgtatgcgtttgtgtgtttgtgtgtgtgcgcgcatgtttgctgggcatgtacttgtaaaaagtaaaataatagaaaagtattattcttggtacccagcattctaggaataatgtcttccacaagattattagaaaactctgctactttgtaggaggagctttggataactatgaataagtccctttacagacttaactttaaaaaaccatctgatttttctttattttctttatttttattgtaaattgacatattttacttgcatacatttatgaggtatcaggtgttgttatgatttatgactactatgtggaataattaaatgaaactaattaacgtattcaaatgataataaatataacagataacaggtaacaaatatttttttatggtgagaatatttgaaagttactttttcagcaattttgtaatgtacaatacactattattaaccatattcacaatgctgttcaatagatctcagaaaagcagaacaaaacttattcctcttgtctaactgaggttctgtaaactttcaccatcatctccccatttttctccacccaaacacggaagtatgtaaaaattctcagtgcttacaaagtttcatataccaatttttgtaatgatacttccccagaactcaatttgacagactgaagtatgtagataagacaaaaaaaaaaaaaaaaaacacacaaaccaatgaaaataaatatgtccttatttgcatgtttacaaatgagaattcagtgtttcctttctcaccagctacaaaagacttcagcctactgtgtataaggcacacagcatctggatgaagctcagctgagctgtctggggaaatacagagatttttatgaagagagctttaaacccagccattagcaaatctggatggttgctggtttaacattccctttttaaagggaatatattattgaattttcaagaatcagatatacatagcattttagatgaatgcattaagaagtcttcagcagtgatattagacattggggcatgctcttacaggcaatgggtggtgtcataaagagcatatttacattcgttttaattgtggaatttataattggaaatttaggaaatagtttcatagcactggtgaactgtattgactgggtcaagggaagaaagatctcttcggttgatcggatcctcactgctttggcaatctctcgaattagcctggtttggttaatattcggaagctggtgtgtgtctgtgtttttcccagctttatttgccactgaaaaaatgttcagaatgcttactaatatctggacagtgatcaatcattttagtgtctggttagctacaggcctcggtactttttattttctcaagatagccaatttttctaactctatttttctctacctaaagtggagggttaaaaaggtggttttggtgctgcttcttgtgacttcggtcttcttgtttttaaatattgcactgataaacatccatataaatgccagtatcaatggatacagaagaaacaagacttgcagttctgattcaagtaactttacacgattttccagtcttattgtattaaccagcactgtgttcattttcataccctttactttgtccctggcaatgtttcttctcctcatcttctccatgtggaaacatcgcaagaagatgcagcacactgtcaaaatatccggagacgccagcaccaaagcccacagaggagttaaaagtgtgatcactttcttcctactctatgccattttctctctgtcttttttcatatcagtttggacctctgaaaggttggaggaaaatctaattattctttcccaggtgatgggaatggcttatccttcatgtcactcatgtgttctgattcttggaaacaagaagctgagacaggcctctctgtcagtgctactgtggctgaggtacatgttcaaagatggggagccctcaggtcacaaagaatttagagaatcatcttgaatatattagaaaaaaaatagctcctaagaaattcttgtatgttata

SEQ ID NO: 5686 - DNA, 6000 bp, Homo sapiens
aaaggccactgcaaccctacacaaaaagatacttctgcaaggacatctgctcagaacctccttgtctaaccttagacaggtgtcacccttgttcctgatccttggatccaaggttaattatctcaaaacaattatgtaatcttcctcttttagaaatccttgtcttttctaatgtccctgaatacacacataatttactatggcacatgtattctcattgcaatattactcccaaataaatatcattttcttttagagcatctccctctgtttgctatttagctagacagtaggcaattattttctaaagtcaatttttttaattgtcaaatgaaccattaatatattcaattatattttttttctagagttacaaaactttcaaatatgtgatttacctcccacataaccacaggtgactgctatcgaatgttttgccactccctatcttgttttacagtaaacagtaatgttttttcttgccactcactgccaatgaatcaagtattaagccagtgtcacataagttaggtgttttgttttagtaacataccagttcaagaggccagtctcatacttgccaagatagcttagtctatgctgtactaacaagatccccaaagctcagggactccacgtaggagaagtttttgttgtttgtttttgtttttgatttctgttacatgtcctgtgctcatagtggtcacaaaagaatccaggctgatagatggtttattgacccttgtttgagtgtcaaggcaagaagatgagaaatttgcagtcttatagtggtgagtaaatgctctcactctgaagcaacatgtcatttccacaatattttattgaccaaaaatttacataatatacaacttcaagggggagaggggactcctacaagactacatttcttatcctacaaggaataaaatgttagcatatagctctaggtcccattttacgacctctatgctatgtacaagatatatatctaaatcctaataacaaagagaagttaaaagtaaaatttagaaaaatcacaccataaaacactaacaaaaataagctaatgtaatcattttaatatatactaaatagattttttttttttgagacggagtctcgctttgtcacccacactggagtgcagtggtgtgatcttggctcactgcaagctccacctcccaggttcctgccattctcttgcctctgcctcccgagtagctgggactacaggtgcctgccaccatgcccggctaattttttgtagttttagtagagacttggtttcaccatgtgttagccatgctggtctcgatctcctgacctcatgatccacccgcctcggcctcccaaagtgctgggatttcaggcgtgaggctaaatagattttaaggaaaaagacattagaatagataatgtcacctcatgtgagtagaggttatatttgccatgaagatactacaattctaacgctctatgcactcatcagcatggcatcaaaatatgtaaagtaaaagttgacaggacttctaaaagacatagataaacctatactcatagcaggatagtttaacattaaatctcaagaaataatagaataaaaagacaaaactcagaaaaggtaaataggatttaaataacatgattacaaatagatctagtggatgtatgaaacactgcaccccaaagctacaggatacacattattttcagcaaacacaaaacatttatcaaaattgaccatatatgcataacataaattttagcagagaaaattttatgtaaatggaaactcgaacatatattttaaaaatagtctatggtggaagaaaaatcacaataaatttagaaaatatttaaaattaagtataataaaatatagtaaaaccttgtgagaaatgctgaaaaattctaagaggaaaacgtatgccaggaatataacagcaaacatactcaacggaagtaaaaataattaaataacaatataagagatgaaattaatgaaaaataatacatctgaaaagatcgaccaagacagacttgaatagactaacaaaataggcaaacttctggtaagataaatcatgaaaagaaaagcaaataatatgaagaatttaaaggatatattctgttggtattaaaaatttaataagatgatattataatcaaaattacatgaaaacataaataattgaaactgacaaatatctagaaagtcgtaactgccaaaacaagaccagaagaaataggcaacggaatggttccagatcaagatcatagaaatgtatgctcatgtactcaataataagttacatgttaaagaatgttcgtagcatcatcatcatcatagtctccaaactcaaaataaaccaactttgtgtttccactagactagataaattttgaattgtcattccattaatactatacagcaattgaataaatgatctatctctatatgcaacatgattaattttagaaacataatattgatcaaaaatagttaaattcaaaaatattgtgtacagtattattccattcatgtgcaatccaaaaccaggcaaaaccaagctagtgcttagggatacatattcaaattaaaatatacaaagttaaacaataacgtgatttgaattgcagatagttgttacttctggaatgaagataggggttgtgattagaaaggagcaaataaggtgttatggggtttacaaagttctctttcttgccatgggaggcttttaaattagtgtgcactttatactatagcatttaaacttcattaaatgttctatatttgttatatgtaacaataataggcagcaaaaatgaaaaagagaaaagaaatatttctaaacaaatgatatgaggttagctaaatcttaataccaaattctcataggcacaatatgagaaatgaaaattaaatgtcaatattccttaaaaacatagctgcaaatatcctaacacaacgttggcaaactgcatccatcagtgacttaaaaaatactttacatactcaaacctttcattgtttcctcttcctgccctttgcctcattttccttttcagttcagactgctgaaaaagtttttctgtgatgctccctagcatctattctctttctcttatagaagtgagagactacatctctttgattaaatttatatttttaaatgttttctcttatggaaacacaccaggaaaatgcagctcagaaccgcaagcctgttatccattctctatgtctttgtcatgtgttatatcacaagttctaaaaactgtggtattttttcatataccagcaagtacagtaccattcctcaggcctatttgtacagatttggggtattatcaagttgtgaccggcatccccaaacccttttctctagataggtaggaagaacaccctaaaatgaaaaagtataaaagatctcttcagccctgggtcaagaatgcaaatggaagaccacatgccacatagctacatatttaaaggtcataaatatacaaacctaacaaactgttaaaggagacattttctattctatcttgacaaatataccattataacaacaaaatagaaaatatctacctattttaagttataattgaaacttgcaaatcattaaagatgatgcaattattttgtaaattttttagtactctgtagatcacccaataaagattgcatgagtaataaaatacaaacattcataattcacaaattatatctttattaaataaaaatagctttgtattcatctagctaaatggctacttattatcttataatcaagataaagtgttttatttatattaattttgaattagacaatctttcttgagtctccacgttttcagaattttggtaatccactttttttcggtagtttttgaaagagtggggcggggtgaggaaccttgactcttcacaatgaacacattagtccccgcttatctgcagtttcagtgacccaaggtcaaccacagtccaaaaataggtgtgtacagtacagtaaggtatcttgagagagtgagagacaccacactatatattttaacacatttttttactttttatttttttaatttttatttattttagatacagggtctccctatgttgcccaggccggtctcaaacttttgggctcgagcggtcctcccgcctcaatctcccaaattgctaggattacagggatgagccacaacccctggcaacttttattatagtatattgttttaattgttctattttattattagttatttttgtaatcttttactgtgcttgatttacaaattaaactttatcataggtaggtgaatacaggaaaaaaatatattgtatatagagtttggtactatctgctgttttaggcatccactgggggtcttgggacataggcctcatggataaggggaactagtgtatctatttctttgcttggttttcagttttgcaagttatgatgtaatatagtactgctttctttggtagctgttgctgattttgtaaaatttgtttttttatcacttttaagtttaaaaaagaaatatgaggggaaaagcggataaaatgtgaaggcatttggtgcctatggagggatggtggtgagcactgctaagtagtgatgaggcagggaatgagaaagatggatgctttgtaaacgagtttctctttagtcacagtattgaccagatccagctttagctccacaagaaattgagcactcttttgaaatagcataggtaagtctttgcatattttataaagcttcattggctatgctattagccataaaagcttcatttagctacatattctatgaatcagatttttataatatttgtacctcagaactcaagctggttgaatctaattttctatgctcagacaaggcaaaaaagtacaaaacaatgaaagagaatatatctttatttgcatggttgcaaatgtgagtttaactttgctgcataatcatctatgaaatatttctgcccatggtgaagacataaatatcttagctagggctcagcagagaaattgaagaaaaataaagatatcaccagaacagttatgtgaagatcgatcagcaaactttagagatttctgctttgacgttgagccaacaatgaaagaaggagcagaaaaaggagaaggaagaagaactccactggacactcaaggatgtgaatagcattttagatcagtgaataaccagcagtgacattagacattgaactttctctgttctgacatggaaagtgccctgccgagtatcttcactcttgtaataattgcagaattcataattgggaatttgagcaatggatttatagtactgatcaactgcattgactgggtcagtaaaagagagctgtcctcagtcgataaactcctcattatcttggcaatctccagaattgggctgatctgggaaatattagtaagttggtttttagctctgcattatctagccatatttgtgtctggaacaggattaagaattatgatttttagctggatagtttctaatcacttcaatctctggcttgctacaatcttcagcatcttttatttgctcaaaatagcgagtttctctagccctgcttttctctatttgaagtggagagtaaacaaagtgattctgatgatactgctaggaaccttggtcttcttatttttaaatctgatacaaataaacatgcatataaaagactggctggaccgatatgaaagaaacacaacttggaatttcagtatgagtgactttgaaacattttcagtgtcggtcaaattcactatgactatgttcagtctaacaccatttactgtggccttcatctcttttctcctgttaattttctccctgcagaaacatctccagaaaatgcaactcaattacaaaggacacagagaccccaggaccaaggtccatacaaatgccttgaaaattgtgatctcattccttttattctatgctagtttctttc

SEQ ID NO: 5687 - DNA, 6000 bp, Homo sapiens
tgttggggaaaatattttgttactataaatttttcaactgtattagagaagaaaacatagaaagataactgttaagctataaaacatatttagtgtaatctttgagtgtgcttgtgtatatgtagtattactttgactgctatagtaaaataacccagatttagtgacagtagctgagattgtaaataagcagttgagagaattttgcctgctaatgatactattaaaagataaaatacagtttgtatgctatataattgtatagaggatttgtatatatgaagttcatatgaaagtacagtgaaaattaaacagcccaaaggagaatactctttgttgtagggcacttttgtcatgattttcagaatgtggtaaaagaaaaaaaaatagccagtaaatcattggaaatacattggttttaacttattcttaatgaaatactgtctgaggatctttgtctgtgcctgatgctgagaataatataagaaacaagttcatgagcccatcaccctgaaacgcagcacttagaaaacatgattgaagtcacatttatagaagagcatggccccttttaactgacattatcatcatcaccaatcatcatctatatctatctcattaaatgatttatttttgaaatgtttacataaataatttggataatgtctaataaatgtttaaaagattattattatgggaaagttagattagaaaatggaaaatttcaagttgaaccaaatacatttttaagtatagtttagtttaaaatacattgcttaagcaaatcattatagataaccttaaactgatcttaggaacactataggaaagatttagttgcggtgttaataaaattccttaattagaaagataaataagccacttcatgatcaagctcttacttctaaagtgaaggttttattttatttattttttaacctttccacattttattgacaaagaattaatagtataaattacgtttatattgcaaagtttatttatggaaatttgatacgtgtacttctactcctttttacaccttacatgaatatttaaataattgatttataacactccctgatgccaggtaaagtaaagcctaatcgcagttcagaaactcacatgtacaacaaatttaactttctggatatttttaaaactcagcttaatttccctaggtgctccattaacctgatggcagaaattaaatcttaagcaactctgggttctcccacaagcacactttgcttcagagttgtgctgaagttttgaggaggatgggaggaggcaaggaggtgtccagtcctttgtgcatctatcccctggcattctcccatcctgccccaagtcatcagcccacacaggttgctggcacatctaaagtgagaattttaggactaaataaatcaaatagaagtaagccctcacatcttctatatctcacctgatagtgaagaagtttgaaggtacagagctccacttctgctaataaaaaaagagtaaaatttaatttgtaaaatagaatggtgtagctagggttgaggtgctataatttatttattggaatggcatcttgagatccagcacagctcattgaatttccctgtggggagagtttgtggtgaagactcatcaacagacaagctgctatccccccctaaaaaaaaaagctactaacatcacatcaatttccaggttcttccaacttgcggaaggatgtgtagaccaagcttttattctattttgtgaccaaagtcttgggaaaagaagaaaattgttagcattttcatgtcaagcatacgaaaaacaaaaaaacaaagccaaccaactgaacaaagaacccaactttttttaaaaaacttggtggtaagagtgctttgttctgcttctccatagataatgatttatagaaggagaacaaaatataatttctgctactaaaacaataatagcaaaaaataaataatcaatattgagaatccaatagacagagttaacaaccagttagacatagaagagagaattagtgaattggaagacaactataaagaaagaagcctaaagagaccacaagacaaagaatgccaagctaagaggataagaggcattgatgctacaatcagagcatctaacatacttctggatttctggaagattaaaagggataaaatagggcagaatcaatgttgtggagattttcccaaaagtgataaaatgtattaatccatatatttttagtaaccatcaaaggtcagacaagataactaaaaacaaattaacataaaatgtcacaagacatcaaagaccagtagaaaatctgaaaagtagccagaggaaaagatagattattttaaaaggaacaactttctaaatgacaacctgattttcaacagaaaaatggaaagtagaattcaatggaatcatgtctttagtgtgtttcaaaagaatagaggaccttcataaacagaaatccaaatgatatttttcagataaaaaatattgaaaatacaaggttaagcatgcaagaaggaataaaaattaacagaaatgataaatatgtgcataattctaaatgaatgttgactgaataaaataatagcgtcttgctgagttaaatatattattgataagatatatgcaaatagcgataaagagactggaggtaaaggtgacaggaacaaatttagataaattattttttgcacttttctatgtctgtgaggataatttgaacaccacatttaatgaccccataataggaattgcatcaaatgatatgtgaaataatgctgatagtagtattattcataatagctcaaaaatagactgcccaaatatatattaactaaggatgattgaatgatatgaaagattacagtaaatccatacagtggaacagtatatagaggtgaaaagaaatgaatcacatgtacatgcaactatgtaactaaatttcagaaacatgatatctagtgcaagaagccatgaacaagaagaacacacaggactgcacctatacacagttcaaagcaggacagaccaagctgtggagtttagggttgtgaacctagctggtaaagtataaagaaattcaagcaaatgatcatcatagattatgaatattgcttatctcaggagatgtgaataaaggtttaggggcttggaaagtggcctggaagtggacctagtctgtttgcagtgttccatgtcttatcctgcatgatggttacataagtgtttatgatacattgctcttacctatttttgttttggcccatttctaagtgtgcattataattttatttaaaaaattacaaattgggagaaatgtcacgtaaaaattattaattgctctgctcattatatacctagggggaaaatccaccatttacgtacattcttatacaactcaagagagctaaagtgaattcttattttagttgcaaaatggagaaatttgagatgctgttacctacagcctccagatctttccaaaagttttcttctagttttagatattcacctcatattacaaaaactttgatatttccaacctatttttcctttggctcctgaatttctgacacaacaagggcgcacatatttctcaaactcttggattagcagagtacctatatcacttagctttttctgcaaaagaaacttctccaaaaccacattagatatttatatctcacatgtttttggattctgttttcttaagctggggtttggtggatggctctggtgatttgagatggtccaagttttgcctcttggatctagttagagtttggccgatttaaggctggatcaggcaggagccatatgattccatgagttactcattcttattctgggaacagtgtgttagtgtggacatgttctcattataaaccggaaaggaacaagaaagcctaatgtggaggtcatctcaaatttcgatgtaaagtgtagtaattttctgttcatcaaagcaaattacatgatcgaactcagagccctagtgcaaggttgtcactatgcctgtggtgggaggacactgcaaaattatgtgacaaaggtctggtactcaggaatgtttacaagcttgcaggtagcattaccaaaagcctaagcatgagagatatgtttcatgaatattattcattggctgaaaatctggcatgggaaaaataggactaattccaccaggacgagctcctggaaactcattttccatgtcataagttacaagaaagcaattccttccatccttgaagagtgaaagtgtgtgtgtgtctgtgtgtgtgtttatgagcttgttaatagtgatgccatatagaagtattggttaacagcaaccaaattataaggagtattggctttcctgtggtttccaagaaaatcttaggtgattttgataaaaagtttagattctgtgtatttaaatctggctttaaaaataaatccatagtgattttgatcctagatttcaccaggctcttttaacaatatattttttgtgtcatctatgtactgggtattaaaatttccccaacaactgaagggctgaacacaaattatggaaaggtgaaacaaggaaaaaattgcaaagcaatgaaagaggatatgtctttatttgaatgctagcaaatgagaattcagctttcccttcaacatcagtatgaaaaatttcagcctatagcaagaatagagactttatgaataagaattaatttgagttgttttgggactaacagtatttcccataaaggcagcattgaactcattcattagtttaagctggtgcttttctgttgacattgttcacagaatttaaaagtataaagaatgttattggacattcaggaatcaagtgcatatttaacttaaagtcttgaatatcagaggagtcaccatcagtgacattaggcctgaattttttacttgcttttttgtttagacatgatgagttttctacacattgttttttccattctagtagtggttgcatttattcttggaaattttgccaatggctttatagcactgataaatttcattgcctgggtcaagagacaaaagatctcctcagctgatcaaattattgctgctctggcagtctccagagttggtttgctctgggtaatattattacattggtattcaactgtgttgaatccaacttcatctaatttaaaagtaataatttttatttctaatgcctgggcagtaaccaatcatttcagcatctggcttgctactagcctcagcatattttatttgctcaagatcgtcaatttctccagacttatttttcatcacttaaaaaggaaggctaagagtgtagttctggtgatagtgttggggtctttgttctttttggtttgtcaccttgtgatgaaacacacgtatataaatgtgtggacagaagaatgtgaaggaaacgtaacttggaagatcaaactgaggaatgcaatgcacctttccaacttgactgtagccatgctagcaaacttgataccattcactctgaccctgatatcttttctgctgttaatctactctctgtgtaaacatctgaagaagatgcagctccatggcaaaggatctcaagatcccagcaccaagatccacataaaagctctgcaaactgtgacctccttcctcatattacttgccatttactttctgtgtctaatcatatcgttttggaattttaagatgcgaccaaaagaaattgtcttaatgctttgccaagcttttggaatcatatatccatcattccactcattcattctgatttgggggaacaagacgctaaagcagacctttctttcagttttgtggcaggtgacttgctgggcaaaaggacagaaccagtcaactccatagattcacaagaggtgcattgtgtgttttctagcagaaaacaaattgatggtgtctggaacattttatatttcccacaagtttttccgtagtctatgtatttgagtaatttccaaaagttga

SEQ ID NO: 5688 - DNA, 6000 bp, Homo sapiens
atatgttgtctccaaaatcccaataggcccccaaaacattgtgtctcttttgtagtgataggaaatttatagagagagcaacatgccatatactgtaaaaaagattgtttcaacgtgtggtctagggacactgaatgctttaaaacatcacctatgctgtaggtccctgaatcttctcaggttgatttcttttcttctggtattttacttccattcatcgttagagtattttactatagttaagaaacttgccacttcctgattattgtaccaagtaatatattattattattattgctattattttgagacagggtctcattctgtccctgaggctggagttcagtggcaggatcacagctcattacagcctcaaccttctgggctcaagtgattcccccacctctgcattgctagcagctgggactgcaggggcacaacatcacgcctggctaatttttgtattttctgtagggctaggatttcacagtgttacccaggctggtctcaaaatcctgggctcaaatgatcttcccgtgtcggcctcctaaaatgatgggattacagtcatgtgccacagggcctggtctgtaatattattaatatattaaataatcacgatgttttaaaaaatgtaaattaaacagaagtgacatagccgtgatataaaacagtgacacagtgttattattatgatacaaggcaaattgttttgatttttcctcataatgggtgtagattaagaaccattcagcaaatcacaagcccagtaaaaagtaccagaagctctgctctgcttagtgaagacagcacatcctggaaagcatttgtgagtgttgatttaagtttctggtagtctgcattcattctataacccgtctggttttgatagaggccagataggtttagtgaatcggcttatagaaaggactaccatcccctgtaactttcaagtgttttgtcacggcactgaccagttccattccttagggaatgcggttattatattttatatattttgttgccagtagaggagaatttcagaggcttccctttggtcctgctataataatgtcctttactctacagttcacgaagaatgtgagtcctgccggctgccatacatatctatttcaattatactttcaggaagaggtagtaactacaaactgattagctccaccttggaatggacatgagccgaagctctaggtagtatctgaccttcaaaaactccccctgcaggctggatgtgatggctcatgcctgcagtcctagcactttgggaggcgaaggtgggaggatcccttgagagcaggagttcccttcacaacatgtggaaactccgtctgtacaaaaaatttaaaaaattagctggtgtgttggtgcatgcctatagttccaaatacttgggaagctgaggcaggaggattgcttgagcgcaggagttccaggctgcagtggactatgatcctgccactgtactccagcttgggtaacagagggagactgtgtctcagaagaagaaaaaaaaacaagtataagttctcaccggtatcttaaacatcaagtaaaacagtatcgagtaaaacaaaaaactaaaaactccaaaagtcaaaaacacttttaaaaagaacatggtgttaagagtagtttgttcagtttccccatagaaaatgatttatggaaggagaataaaagattattctgaacactaaaacaataagactgaaaaaatgaattatcaatattgagaatccaatagacagagttaaccagttggatacagtacaagagagaataagtgaattggaagatagctacacagaatgaagcatagaagggaagagatggaaatacacagagctagagggtaacacattgatgctacagacagaacacctaacatacttctggagttctgtaagattagaggagagaaaatagagcaagagaaatgttgcaaggatttttccaaaaggtataaaatgtatccctgaatatatttttagtaatctcaaacttcaggcatgataactaaaaccaaattaacataaaataatacaggacgcaaaagaccaatagaaaatctgaaaagtagctagaggtagaagatagagtatgttgaaaagaactgtattctaaatacaacctgattttaacagaaaacatggaagcaggaattcaatggattaatgggaatcatgtcttcaatgtgtttccaaagagtagtagaccttcataaacagaaattgaaaatgatatttttcagataaaataaaattactgaaaatacaaagttgaacacgcaaggagcattacaaattaatgacaatccatgctggctaacacggtgaaaccccgtctctactaaaaataaaaaaaaattagcctggcgtggtggcgggcacctgcagtcccagctactccggaggctgaggcaggagaatggctaaacccggaaggcggagctttcagtgagcagagatcgtgccactgcactccagcctgggtgacagggagactatgtctcaaaaaaaaaaaaaaaaattaatgacaatgaaaactaagtgtgtaattctaaataaatgttgactatataaaacaatagtgtcttcttggattgaatgtataattgataagatatatgcaaatagcaataaagaggctggagataaaggtaacaggaataaatttagtcaaactgtgttttgggcttttctatgtctgtgagaagaatttgaacatcataatcaaggaccctgtaattctacacccagatatatatacacagaggaattgtagcaaatgatatgtgaaagaatgttcattgtagcattattcataaaagctcaaaaaataagctgtccaaatatatatcaaataaggatggataaataattacagtaaaatcaaaaaatgaaaaaaatatagagaagtgaaaagatatggatcacatgtacatgcaatgatggggttaaattttggatacaaaatgttgattccaggaagccatgaataagaacatataggattgcacctatacatagatcaaatcaggccaaaccaagctattgagtttagggtcgaataccttattggtaaagtataaagaatattaaaaaaagaccatcataaattagggatgttgcttatcacaggagacatgaagaaaggtgtagggaattagaaagtggcattgaggtaaacttaggctcttagcaatgttccatgtcttgccctacatgatggttacatgagtgtttatgacacattgctatgttttccatttttgttttggttcatttctaagtgtgcagtctagctatatgataaaaattattaattaggagaaatggtccatgaaaattattattactctgctcattatatactgaagggaaaaatccactatttgtatacattcatgtgtaactctaagagattttaagtagaaactttctgattttagttgcaactttaggaaacttgacatgatgttacctgccaaccacagatttctgaataggtttttcttttaggtttaattacccacttcatatgacaaaacttggacattctctattttttccttcgatcctgaattcctgacacaacaatggtgggcatatttcccacactcctgatttagcagaatacctacatcacttatgtttttctgcaagagaaaactgagttagataattgtgtatcattatgtctttggattacatttttctaacctaggtttggtggatggctctggtgattggagatgggccacgtactgcatcttgccgctagtttggctgatttagggtagataaggcagtggcattctgactccattagtttctctttcttcttctgggaacagtgtgctagccagatgatgtcctcatggttagtggaaaagagcaggaaacttcaatatggaagccatcttaaatctctgtaaattctactaatttcctgttgactgaagcaaattacgtgagtgaattcagagtccaaggtcaaggtagtcaccctgcctgaggtgggagggtactgcaggattatgtgacaaagagtagggtacttagaaatatttacaaaattgctgaacattttaattaaataattaatgtttaaacaaaacagacttgagtgtaaatataccaaaggcctaagcttgagaaacatgtttgataaatattattcattgtctgacagccctgagttggaaaataagactaataccacctggatgagttcctggaaactcattttccatttggggaattataagaaaataattccttccatgccctaagggtgtgagtgcatgtgtgtctatgtgtttaggagcttattaacaatgatgtcatatcaatttattggttatcagaaaccagattttaaagtgtatcagcctcccagggatttccaagataatcttggatgattttgataaaaggtttagaatctggtatttaaatctggcataaaaataagtccatattggtatgatcctagttatgaccaagctcctttaacaatttagacatttactatatgatatatgtattgggttttacaatttccctatggaacaactgaagatgctgtatacaaattatggagaggttaaacaaggaaaaaaattgcaaaacaatgaaaaataatatgcctttctttgcatactaacacatgagaattcattttccacttcaacctcagtataaaaaagtacagcatatagcaaggagagaatgtatatgaagaggagtgaatttgagctgttttgagaataatgaccttttctatttctataaagacagttttgaattcatctattagcatatgctggtgcttgcctgttgacactagtcactgaatttaaaggcagaaaatgttattgcacatttagtaatcaagtgttcatcgaagttaacatctggatgttaaaggactcagaacaagtgttactaagcctgcatttttttatctgttcaaacatgatgtgttttctgctcatcatttcatcaattctggtagtgtttgcatttgttcttggaaatgttgccaatggcttcatagccctagtaaatgtcattgactgggttaacacacgaaagatctcctcagctgagcaaattctcactgctctggtggtctccagaattggtttactctgggtcatgttattcctttggtatgcaactgtgtttaattctgctttatatggtttagaagtaagaattgttgcttctaatgcctgggctgtaacgaaccatttcagcatgtggcttgctgctagcctcagcatattttgtttgctcaagattgccaatttctccaaccttatttctctccacctaaagaagagaattaagagtgttgttctggtgatactgttggggcccttggtatttctgatttgtaatcttgctgtgataaccatggatgagagagtgtggacaaaagaatatgaaggaaatgtgacttggaagatcaaattgaggaatgcaatacacctttcaagcttgactgtaactactctagcaaacctcataccctttactctgagcctaatatgttttctgctgttaatctgttctctttgtaaacatctcaagaagatgcggctccatagcaaaggatctcaagatcccagcaccaaggtccatataaaagctttgcaaactgtgacctccttcctcatgttatttgccatttactttctgtgtataatcacatcaacttggaatcttaggacacagcagagcaaacttgtactcctgctttgccaaactgttgcaatcatgtatccttcattccactcattcatcctgattatgggaagtaggaagctaaaacagacctttctttcagttttgtggcagatgacacgctgagtgaaagaagagaaaccctcaactccatagattcacaaggggagcatcgtgggtcttctagcagaaaacaaactgatggtgtctggaacattttatattt

SEQ ID NO: 5689 - DNA, 6000 bp, Homo sapiens
caaagaggtcctgtcacttttttctgtagatgactttcatttgtttggggggaagtgggggtataattacatatccttgtggcactgatgagagagagggtacctcctggcttcattctggacctagagtatgcactgaggtactttcaagtttccaggatgacaccctcatgcagtttgaatatatgtccctgccaaatatcatgttgaattgtaatacccggtattggacgtggggcctggtgggaggtgtttgggtcgtgggacagatccctcatgtcttggtgctgttcttactatagtgagtgaattctcttaagatctgctgtattaagtgtgtggcaccacccccaactctctctcttggtcctgctttcgccatgtgacatgcaagcttctgttttactttctgccataagtaaaagctccctgaggcctacccagaagctgagcagatgtgggcaccatgcctcctgtacagcctgcaaatgtgtacaattaaacctcttttctttataaattacccagtctcaggtatttcttcattgcaatgcaggaacaacctaatacataccccttgtctgcctgatccctggggaacatgctgtcctgtgatgctgaagcctgcagctggtgaactcatggtgaactcgtggcccacctttggattcagacaaatctcccagggagtattggccacctcccctggcagactcagtacccctggcccctgctgtggggttaccttgtcttggttgtggcaggcctactggctgttagttcagcatcatccttcaagagaacagaaaggcttagaataattgattgtcatatctgtgtctgaccatgctattgtggacttggcctgaacagccatagaaatgcaaggaatgaggtttgagggacttgggcagttgtctcaaaaagggagtcaaggcagaaatcccttaccctgagcactgctctcaacatggaggtaactcactgtggtaggcagccttttatttcatgatttgactttttgatgagtccatgctagttctcttgtagaatattatgcattcttgatttggccaattatttcctcataatatcttataacttgtttctccaacccttgcctttttattaaaaaaaaaaactcgacattatatgtacagatttgattatattcgggttaaacatttttagaaagaatacttcagtaacattgagtaggttacatcatttcatgttaggcacataatttcagcttgtctcactattagtaacgctaaatttggtcacttggttaagatgatgaccccccctcccactctcttcactgaaaaaggacacacatccctttgcactttataagtaatctacaaataacccgttcaacaacttttcatcttatactttgaacaccttttgtgatcttttcctgagtcaattatttcactgggggttgcaaaaatggtgttctaactatagtagtctgtatttattaactagcatttttctgtaaagaagaactttctttttttaagagacggagtctagctctgtctcccagattagagtgcagtggcactatcagagctcactgaagcctcaacctcctgggtgcaagcgattctcccacctcagccttctgtgttgctgggaccacaggcacatgccaccgtgcctggtaagagcgttgttttaagaaaaccattttaatgaatttctcagtggaccactgggtagtggtttgtttccaattttgttgaaagcacttggaaagctcttgatttttaaaaggatttgttacctaattattggagctattcactttctcagtactatccccaatattttcagttattcctgtgtttggtccccaggaggtttttaaattcagacaacgcaggatttgaggtaaaggtggaagagagattcagcaatctgtgtaagatggaagaaaagctaagtggaaaccaagaaccagcatgacatctcgactgcaccagttctcagaaaagcagttttagaatgcatacttgtagaagttgaggatctagaaattagttcccataaaactctgcatgctttgggaccccttggaaagtttttacctgaagccagaggtctatagtacagaacactgagcaaagtcttccaggtttggttgatgacaagctaagggcagaaataaaggaatttagagactggctttcaaaacaatagcctggatttcaagcctattgtcttgtttctattttgaatttcagaagccaaatattaatttctttttttccattccttttgtaacatctaaacagtgccaaaacactatctccaaggcaaatggattccccaggcagatgagaagatcacattactcatgttcaaaatattaccccagttgcacaagtattgtggaattttgtgcatttggatggaagacaactgtttctttatcttcttccaatgtcaaaagtaaatttggtgattataactttggcaatatattttaagcagaattagtatattatgtaacatgttttatgaccatccttaataaaattttgggttatgactccttacaagatgattttaaatatcattaagccataatatatacatgcagtcatcctggaaggaataaatatgttggtcattttttttgtctcaaataatttaaagcaatctttgtgatttcttatgtcaaggggccatagtagtaagtcacaacacattaaattgaccagttattttaatctagtctactatgcatgatgcagaatagcatagtacactatgcctgctctggaggctgagtcagtggttccaaatcctagctcccacactatgcagctttgggcacattacttattcccccaagcctccatttcttcatcggtaaaacagaaatgccagtaatagtactcatcttgttgggttgataggattaaatgacataatgtatgtaaacacctggcacatgttaaatattagttgttcttattgttgtaattattcttgactaagagaggagatgatatccaagtcaccaacctgctgactcaaagaatttcttcaatatctaacttttttgataaatgaattttcttaaaatgtcaagtgttaaaattaacagttgaatttctctgagtcttacatagaaaaactagaattaacctcactcctcctaaaataaaagtagaaaatacgatgaggatgttgatccaggaaggaccttcagtttcttgaaaattatactccagcttccttgtgccacctctttgcttacaaagttttcatttctacacattgcaagtcagcattcgtctttcaaaaaataaatattctgaattgctttggttaggattctgagttagaaacaacaagttatatgccagtgttatgagacaaatgtatagccagtttgtatttctgacttggagtaatccaaatgctatccaagtattaataaaatttgtatttatttaaaataatttgacaactcacatttaaaaaattgtcttttcttccatagtgttataaagaatccacacattgttcctagcatcgacagtcaggtgtggctctaaagtatctcccaattaaggctgttaggacttagataatggcttcccaaaagtcagatattctaacctgaggagaaattgatttcttgagttctttccaccaccctgtgatggcatttcagggtcaatctgtgaagctggaattttcattcagttgcacctaactagatttttaaggaaagaagcagtggaggatggggagagtaactattgcagtgtccatactaattcctagattcctttcaagatttaggaccgacagcaatccaatttggctctgagaatactgtttaaatccctcctcagcaattcagtccttttccctcttcctttctttagtcagcaggctcccatggcgaccggttttaaaagaaatcatcctcttcagcagttacctagcaccatggcaactaggacgtcagcaaagcaggatagaccctgcacaaaacagctccaagcaggctccctccctgcctctccagttcagccctgcctgaggcctagggatggggctaatgacatctagacttgtacaccccagaattcctatgtgtttctgtggttttccccataagcatagatatttgggcatgcagtaaactatgttacaggaatctccctcccccccaccaaaaaaaaaaaaaagaccatatttaaagagtgaggatgggtgatgggatggggacagggaggtaggtatgggatggtcttttgggtttaaggaaatttgaaaattatgtttgtgtttataaggtaacagtaagctgatagtaggggaagtcagagccctaaacatatggtgtggtttatgtttaggcacaggacctcagggaaattttaaaaaatatttttatttacttgagagtgaaatagacaaatggctttaacaagcacttgaagagggtgtaatgctgtccgtggtgctgaacgctccattgtcccagatgtgtgctaagggggatccagaggggaggttaaggaacaccttgccaggtcaggatactgactgtaagaaagaaagagaggggttgaggttaagaaagcatcatttatctcccatactgagcaactctgaatggtcaggataaatcttcagatagaaaaaaaagaaaatagagaaggaaggaggtttgggtgattgaatcttccccttttcatatggagatttttggtctgagccaatcaagacagagatttctgctgctttgctcctgaaaggaaaagtgggggaagggagggagaagatggccacattctccccttcagccacatgatccatttcccatgtgacacattccagagccttggaaaggagaagggaggggcaacaagagagtggggctgggggcgggaagatggtttaacagtctaccctgcacagcgtcatcttgtctccctaacaggaagcaggctgtgagccaaggggaaggcagaggacagaaatgaatgtgtttccaggctttcctggtggtttatggcattctccaaactcctatgcaagggctattcctgaccaagaagatctaaagagaacgtctctgaaatcaagtccggatgaaggtatgtgatagggatcccttggtattgcgactgaaatttggctcagaggacataatgccttctttttttccaggcaatttggagattttgtcctgccttagatgctggttagaggctttaggtttgttaccagtccagaaaagatgcctaggtagttctgtaaaatgaaaattcatcagagtatgtgtcagttgaaaaattggatggaaattgtgtatagtgataattaatgaaacaaagcactcattgatgaaaaggattttttccccttgaagcctggaaagaggggaaaaaattaccgaaaccaactaggtttcatcatcactgtaataaaagctgtttcatcctttttcagctgcttattctatgcccatgttcccagaggttattggcagggcttggggagctgaagtgggcaggcgtgctgttcctttgtgctgtgtgatcatcttccttctgatgttcctggaaccaggggtgcttgtgattgttcccagctctgatttaggacagtagactgccacagaatttcacatcttgtagaaatgctagcaacaagaccctggggaagttctcaaaggaatctaccaaagttacaggctaaaataatcagccgtgaactcaaattttcatgtctttgactattttcagcacaaagagaggagcccctttaaattttattttgtctttatttaacaaatacttaagaaagttctttctaatgtgcaaggcactgttctaagcacaaacagtcattgaatccttataacaaccctttgaggaaggttttattacccacattttagagatgaagaaacagaggcacagagaagttagggaactttcccaaggtcacacagct

SEQ ID NO: 5690 - DNA, 6000 bp, Homo sapiens
tccgtcccacacagcctgtcctcacacggccagtcatgatagctgcaggatgaagaatatgtgatgtgctttcatattcttttgtgtgtgtatgccggtcaaatcatgcttaaaggctcacgtctctctaaaagcctgtccttataaggtgggaagagtcaggaaaggctgcctggtacaacagcaagaatatggccaggagacaacaaaccttggctgtcatcttcaacattccatatggtaagcacatcccttcatccctgggcctctgcttccttattattaaattcctcatgttgtaacattggcttccttattattaatcattaataggagttaggctaggtaacctttaacattccctccagctctgtttctgtgagaaggaaacaacataaataggtgtttgacataagatgtttggtgtcctgactgttttatttccatttttattggactcattgtaatcagtgtattttgattaatcaaagccatatctgagctgtttgttctgatgttattgtagcacagaagccaaaagaaatgagctgtgagtaatttggatgtgtgtaggcaaaaaggcccctcatatccttaaggcctagctgcagatgggttaattctataacgctagattttaaaataacaataattaatacctgggacacgtccttttatctaaggtacttaaagggctttgtggtcattaacccataaatccactggtctcaagccatcaggagctcaagaggaatctccttagaagacaagcacaccagaagctaaaacatcaccaggaggaggaatgacaaccatgactaaccagcaggaagggggtgggaggtgcaggatcaacaaaatagtactcctggaagaattcaatggaaaatcctcctgcagttctgctgacagcagtttaaccactcactatgctctttgagtggatgctcacggatgtcacatttcatcatctgaaaaatccctttacccttaacgtaaacattagccttcacagcttcggaaagactgctattatacccaaagcaggtaaaggggagcttaaggtgtaattggatgtaagaaaattctatcatccctagaatcttcttctctcataggagaaaatggctttttgaagttaaggaactctaaagatagaacaccacttcagaatgattttgtcaagggtttgttaagtctctcacttatttgcaggtgttttccattaacacacatctgttgaaaaaccacaccactaaaaaggaccttctgaaagatctggaattttatctttagaatcattccattaattgaattatccatcacccaggaggttctccacatagaagcaggtactatggggacataaaatgtggaacctgacccctagacagctataaatccaatcaggagatgagattaattcatataacagaaattgagacatttattattcatttatttcaattcattattacttaatatgtattcataagttaactaataggcagaaaatagggtttctgtaattttgaacagaacagaccccaagtcttgtatagttcctggtggaaggtgatcagcgaggtctagaatgatgagggaaggcaggaagagtcatagaggagataaggtgaagaaaatcctacagggagggaatgaatttgggtcaaaaataggataaatgggaatcaagcacaaggcagtttcggacagggacagaggtgagcacttgggaacttattttttttgtgagccagtgggaaaaccaaggaggctaaaccatagagcctggagatgtgaaggaagtacaggtgggtaagaaagggagagccagatcacaagcaccttgaaaccagacactggtttggggtcttcagcagtcctctgtcgaaatacatatattcaggggctgggtgtggtggctcacacctgtaatcccagccctttgggaggcagaggcaggcagattacttgaggtcaagagttcaagacaagcctggccaacatggtaaaaccccgtctctaccaaaaatataaaaaactagccgggcgtggtggcatgcacctgtaatcccagctactcgggaggccaaggcaggagaatcacttgaacccaggaaacggaggatgcagtgagccgagatcgcgccactgcactccagcctgggcgacagagcgagactccatctcaaaaaaaaaaaaaaacaaacatatattcaggaagaaaatcaaggagtaaattggaggtggcggggtgcggttggtgggtgtaggctggacactgtgctgtgctgtattttgtgtcaccatagaagaaaaggaatatggtattcaagtatcagccggtgacctttaattgtcagttctttatcttgggataaattcacagactgattcacagttttgcctgccactggccattttaatgccagtagtagacaaaaccacccttccttatggcccagtgaaacctcattacctgtactttgttgaatggatgctcttttgaattaaaatcaagatgtgggggccgggcaaggtggctcatacctgtaatcccagcactttgggaggccaaggcgggcagatcacgaggtcaggagtctgagaccagcttggccaacatagtgaaaccccgtctctactaaaaatacaaaatgtggtggcatgcgcctgtaatcccagctactcgggaggctgaggcaggagaattgcttgaatccgggaggccagaagttgcaatgaaccgagatcgtgccattgcactccagcttgggtgatggagcaagactctatctcaaaaaaaaaaaaaaaaaaaaaatcaagatgtgagaaagtctccagagatggctttttaggcaataggtcagaagaaggacgaggtatcctggtgtaagtcacctgagggccttgtgtagcttccctgaatgtgttgcaatacacagggaggaagccgtctttcctagatttatacccactttcagatttacacccgctccctaaggccaaggtgcctctggtcagcagtagaatgaaaaagaattattctcaccaaggaaatctctgtagaaaagttgctgtgaaactggaataggtgtgtctttctgtccttccggttctttttatagatactgcaggaacctcagtgagagcctacggttcttccgcccatttggggagagattaaagaagctgaggttggctctttcttactcattggcagttacaactttgccagcactacagcctaagcttccagagtggacacggagaaggtaagttggaattggggggccatgttctcagctgtaaacctgggtcactccagccatctggtctggggataactgaagggaagtagagctaaggggtattcaattgcaattgatttttttttttcaaatgaatatgtgggatctttttcctaggctacctcagtcaagacatggactttcgtactaaactgttcaaaaaggtatttaaagaaagggaccattttgtacaattctttgatgaacacacaataggtgtttaactacaacctgctgcattggattgacttgaattaactgaaagaaggaacagtcattaaaattactgggaaattttattcccagtaatttatctgcctgtctccttcaagcagtgcatcagtgtctagaacgatccaatgatccattaatgttggcagtccttgttctggagtctgatataactgaattccatcaatcatgcaaacattctcatacacctccttttatgaaaaagattttgtattagctttcaaagccttggaaattagcatacacaaatggacatattatcaagtgaagcctgttcagcttttcccagcaggatgaagccaagatagttttgaagggtttaggttgcctttctcatttcctttactgacatcctatataaaactgctataaatttggggtaatatgtgtgatggcatttcccatccccttagactatgtttgcatatatctctgaatttcttcccccagggaagcttagcatttagataagtatcaggagtcaaacaaaatgtaactcaggctcttgacagtgtcctaggaacaattttggtaaggacatttatttcatatgcccaggtgtcttcatttcagaatgagagaaattacagtgcccagcatggaccacccaataggcattcttgtaggtattaggttggtgcgaaagcagttgcggttcttgacgttactttttttgtttgtgtgttttttgtttttcggtttttgttttcagacagcgtctcactctgtcgcccaggctggagtgcagtggtgcgatcttggctcactgcaacctctgcctcctgggttcaagcaattctcctgcctcagcctcccaagtagttgggaatataagcgcatgccatcatgcccggctaattttttatgtgtgtttttagtagagatggggtttcaccatgttggccaggctggtcttgaactcctgacttcaagtgatccacccaccttggcctcctaaagtgctaggattacaagcatgagccactgtaccctgccttgttttttgctttttgagacagagtctcactctgtcacccaggctggagtacagtggggcaatctcggctcaatgtaaactctgtctcctgggttcaagcgattctcctgcctcagcctcccgagtagctgagattacaagtgtgcaccaccacacccggctaatctttgtatttttagtagagatggggtttcaccatgttggctaggctggtcttgaactgctgacctcaagtgatcggcccgcctcagccttccaaagtgctgggataacaggagtgagccaccgcacccagccttcttgccattacttttaatagcaaaaagcacaattacttttgcaccaacctaagagatgcagagttgtcaatttgtctcatcctttttctgcagggcatcagaaaaccattctggtgaggtccacacccataagtcaccatgtacaaggactgcatcgagtccactggagactattttcttctctgtgacgccgaggggccatggggcatcattctggagtccctggccatacttggcatcgtggtcacaattctgctactcttagcatttctcttcctcatgcgaaagatccaagactgcagccagtggaatgtcctccccacccagctcctcttcctcctgagtgtcctggggctcttcggactcgcttttgccttcatcatcgagctcaatcaacaaactgcccccgtacgctactttctctttggggttctctttgctctctgtttctcatgcctcttagctcatgcctccaatctagtgaagctggttcggggttgtgtctccttctcctggacgacaattctgtgcattgctattggttgcagtctgttgcaaatcattattgccactgagtatgtgactctcatcatgaccagaggtatgatgtttgtgaatatgacaccctgccagctcaatgtggactttgttgtactcctggtctatgtcctcttcctgatggccctcacattcttcgtctccaaagccaccttctgtggcccgtgtgagaactggaagcagcatggaaggctcatctttatcactgtgctcttctccatcatcatctgggtggtgtggatctccatgctcctgagaggcaacccgcagttccagcgacagccccagtgggacgacccggtcgtctgcattgctctggtcaccaacgcatgggttttcctgctgctgtacatcgtccctgagctctgcattctctacagatcgtgtagacaggagtgccctttacaaggcaatgcctgccccgtcacagcctaccaacacagcttccaagtggagaaccaggagctctccagaggtacattcctgggggattcagggagcagggaggtgctcctacaggagaagcaggagaaaaatcatgcagtaggatgagccaagaggaaactaaaagaaaatggtc

SEQ ID NO: 5691 - DNA, 6000 bp, Homo sapiens
cccccgcccttccccttcgcaggattcgccgagtctgtagcctccccgatccaagttcctagacctcatggctgtcccctcccaccagtcacctccactgcacaactcgggcgggggtgtgacacctctcccccacccccgactccgtggtttccgtatcgtcaacccttcagccgccgacccgggaggggtctggcctacactggtcttccccttcccatcaactctttctgcttgacaatgtagcaacccaggccccccacccacggtcctcccctttttcctctccctgacaataaagtctgaatttgttctgccctccgcccctagactcagactctgtctttgcccgctgttttgggagcaattctgtcgttaaatgtatctgtatgggaccggcacagaaagaggaaagggagcgagaaggaggagggaaacggaaatcgggggtgggggaggcaaaatatgaggcttgtgcagagtgagcagaggctccccatcccacccacgcccactctcgtccagctcgtgtaaacttggcctgggggatcatttctagtccaagtctgggactgcagctgcagctgttgagaatttgccacaactccacaaggcggcgccaacgacccggaaaaggagtctaagcccgaggctaagccgctcctgtaatgtgtttcgagattccacgcagatgggtctagactcagtctcagacaaagaaaagaatccaggcttttgtgtgtctggtgggaaacccacgccagcgagactcaaggcacaggaagaaacggggggcagagactggggatctgagctctaggctctggccccacataaatagtgaccttgagtcagtccttgccctctctggacctcagtgtcacagtcttcaaaataaggagacttgagtctttcaaaggttcattaagatctcatgtatccaagactgaagaactgagactgtgccatttacagatatactggaataccttctcaactggcccctaaatggtctgtggaacagggaaacactgttcagctgtctctcacatggtatgtgaggaaaatggtttctccgttatctccaaaatgtggttcaaccatacactcccaagagcagccagtaatcctgaccccctctatccctactgagaggcaggaagttcaaacaaaaaagcccaaaccaaaacccagaatctatgtgagttcctcccgactttcatctctgctcacttcccccactctacccacttcccagtcttgcagaagaaaggaggagggaagttgggatgatgtctgttaaacaggaaagagaggggaatgggggactcctgggtttgtcaactgtgaggctgaaaggagggtgttcactgtgggttcagaattggaacccaataaggagtgttttggtgtttgtttgcatgtttgtttccaggtaaatctagctttaaaaggggtgggaggattcagaaggatgcgggacaagagaggccctatagaagagtgggtagagaaaagcaggggctgggtcacatgtggggaaggagatagggactggaagaaattggggttagagagtctgggatcctagcagaccccacaagtacttcaagtctgctagtttaaaactgaattcattatttacccctttccctaagcctgctcctcctcccacatttcctatcttattaagagcaccaccatctgtctggaaaacagaaagttatcctagttcctccttcttcctaactcttcatccaatgaatcactaaataagtcctatttgacctcctaacaacctatggatccttatcattcctccattcccacaaccactgccctaaccaggactggctccataatttgtgggacccagtgcaaaatgaaaaagcagagccccttattcaaaaagtatagtattaagaatttaaaaacagtgattgacgagcatttaaccaagcaccaggcccttcaaactgcaaggccctatgcagttgtacaggtggtctggccctaacttagggccattctatctctcgtctgaactagtgcctctttacccatttcgctcactcccaggctgcacgccttcattctttactcacagcaatctaagtgcaaatctcaccaactccttcagcatgaaaccagctccttagcacgatacacaaggtcccccttgaccctgcctgctcaactctccaagctcttctctgttgttctctacctcatgccctttgttggcttctacctgaacctctgcgcctctacacatactgttctctttgtctagaatgtccctctacttatctcccaaaaaactctcctgttcatcattcagaatgcagctcagtaacctctctgtgaaccctttcctcacctcctacttaatagtatgctccttttctctaagcctctgatatatcattctgggttgttttgttttgttttgttttgttttttgagaaagagtttttgctctgttgcccaggctggggtgcagtggtgcaacctcggctcactgcaacctccgcctcctgggttcaagcgattctcctgtctcagcctcccaagtagccaggattacaggtgcgcaccaccacgcctggctaatttttgtatttttagtagagacggggtttcatcatattggccaggctggtctcgaactcttgacctcaagtgatctgcccgccttggtctcccaaagtgctgggattacaggtgtgagccactgcacccagccatgtattttttgtttgttttttgtttgtttttgagacggagtctcgcactgtcacctgggctgaagtgcagtggcgcgatctcggctcactgcaacctccacctcctaggttcaagagattctcctgcctcagtctcccaagtagctggcattacaggtgcctgccaccacacccagctaattttttgtatttttagtagagacggggtttcatcatattggccaggctggtcttgaactcctgacctcaagtgatctgcccgccttggcctgccaaagtgctgggattacaggtgtgagccactgcacccagcgatgtattttttgtttgttttttgtttgtttgtttttgagacggagtctcacactgtcgcccgggctgaggtgcagtggcaccatctcgactcattgcaacctctacctcctaggttcaagcgattctcctgcctcagcctcccaagtacctgggattacaggcgcctgccaccacgcccagctaattttttgtatttttagtagagacggggtttcactatgttggccaggctagtctcgaacacctgacctcatgatccacctgcctcggcctcccaaagtgctggcattagaggcatgagccactgcgcccagcctgttagtttgtttttctaatttttcagagacaacgtcctgctgtgtcacccaggctggagtatagtggcacaatctttctcactgtagtcttgacctcccagactcaaatgatcctcccacctcagcctccccagtagctgggactacaggtgcacatcaccacagctggctatttttttttttattgtaaagacagggtctcactatgttgcccaggctggtcttaaactcctgacctgaagtcatcctcccagctcagcctcccaaagcattgggattacaggcatgagcctccaagccaggcctatatagtattttaaagcaagcctcagcaaactttttctcaaagggcctgattataaatattttaaactgtgttaatcaagagataaaactgaggatattacataggcacttatataacaatttaaaatataaccatttttattttacttacttatttatttattattttattttttgagacggagtcttgctctgtcatccaggctggagtgcagtggtgcaatgtgatcttggctaactgcaagcaacctccgcctcccgggttcaagcgattctcttgcctcagcctccctagtagctgggattacaggcgcacccatcacgcctggctaatttttgtatttttagtagagacggggttttaccatgttggccaggctggtctcgaactcctgacctcaagtgatctgccctccttggcctcccaaaatgttgggataatgggcgtgagccactgcacctggcctaaaatataaccatttttaaatggaaaaaaaacatgattgggtcacaggctatacaaaaacagcagactagatttggcccatagggtgaagtttactcacccttgctctggagaatcgattaagcatttgcatatttatgtatctgtctcccctagtagactatgcacaaggccatatatcagacgttcttgtatccccagtgtctagatcagagtctggtgtatagtaggcactcagtactaagttgttgggtaaatggataaatgaatgattgaacaggaccctgatcccttgaggagaatgaaaccagaattctggatgcctcattccccacttttcttcatctgacttggtttctcaaatgtgctagggtgtcacatgggtccctctgacttgaaccatgtctaagccgtggagacaagaaaggtagtgctcctctgaaacaaacccaaggcttctgggggtacctaaagttgctcctggaacttggtcttatcttttggccctttgaggagtggcccaaatgttctgatgctctgactccgtgccctagcaattcttggcaatgatcttacagatgagttctgccatgcaaagaggggaagaaaacagagtttgggtttcaggaaggagaaaggaagagtgaaaccactctgaggtaagtagcgggggactttcaacagagaagcctagatttcactagccgaagcaaaatgagtaggaccggaggtggtgaaggaagtggctgggattgggtaatgggggagtttcttattctttcagtggactataataggatacataagagcaggatgtctcctgcttgaagcctaactgtccaccagaaaggactgctctttgggtgagttgaacttcttccattatagaaagaattgaaggctgagaaactcaggtaagcacttttgttgtgggtatacttttaccttcttggtctcctcatctcccaggtggtaacaaacagaaatgactaaagcctatatgtgtgtgtagtggaaaggagcagagggaactgaatacagagaggatcctgaatacacgatgctgaatagagagaggggactcctgggggtctttggggatggggaaggaattaaaaaagttggagggcactgggtttactgagagcagcgggatggatatagaagaggactgaggtttggagcagaataagactaagatatttaggcaagagatatttagataaaaacttggggaaatatttgagaatgggaaaggactaagagaacctaaggagagagttagggatcttgagatgaagaggcctgggaatggttcaggaggatactgaattaaggtgaggtccaggaacagtttagatgtccagggtcccagaactgttcaagagatctaagttgaatgctaggttctgattccctcttcctcttccaccctctgcctctttagcctctatcatgtggaacagctctgacgccaacttctcctgctaccatgagtctgtgctgggctatcgttatgttgcagttagctggggggtggtggtggctgtgacaggcaccgtgggcaatgtgctcaccctactggccttggccatccagcccaagctccgtacccgattcaacctgctcatagccaacctcacactggctgatctcctctactgcacgctccttcagcccttctctgtggacacctacctccacctgcactggcgcaccggtgccaccttctgcagggtatttgggctcctcctttttgcctccaattctgtctccatcctgaccctctgcctcatcgcactgggacgctacctcctcattgcccaccctaagctttttccccaagttt

SEQ ID NO: 5692 - DNA, 6000 bp, Homo sapiens
gtggatggatcactttagcccaggagtttgacaccagcctgggcaacatggtgaaaccctgtctctacaaaaaatacaaaaattagccaggcacagtgtcatgtgcctgtagtccaagctacttgggaggctgaagtgggaggatcacctgagcctggagaggttgagactgcggtgctgtgatcacgccactgcactccagcatgggtgacagagtgagaccttgtgtcaaaaatcaattgattactgaaattaaattaaatatgcctaaaaaagaatatattttttaaaaactaacccctgtcaaacctaaagaaaaatagaggcaaataagtatttaaaaattctaataaatagtattcacagcagataaacaaaaaattatagtatcacaactttgttcagcacccttcaaacaatgcaaaccttttcactcatgaaaaacaaattaatgaatacacagaggtagtctcaatgttgccagcatgctggaagaatgagtcttgatgatcaaatttagacaggatagcaaaactgctgaccatgaagatgcagaacacccaaatgaatatgaattcattaggagcaaaagtcttaaactcaaccatttaaatgattttaaattttaaaaagccatttaaattaaatcaaccatgtaattttaaaagcaaactgattttctgaacatataaataatactgattttagaaatggttttctctgcagtgatttttctactaatactgtaatggctgacttaggaatgagtttgtttgttttaagaagtgatgagattctaatatttcatcaacaaagatcggaatactttaagattttgttgagcatggtagcctctctttaatgtcctagctctgcactcatacatgtaagcccgtattagcagataagaaaataaaactccatgtcagacaaaacgctgttctcgctttttaattttaccctatagagtaaatagtataatgaagacctggtgttttttcatgcttgacttgcagcactttttagaatccaatacactctcactctcactctcctctttgtgtgtgtgtgtgtgtgtgtgtgtgtgtgtgtgtgtgtgtgtgtgtgtgtagttaaggaagttcattccctggataacttttaaagccacatatgcagttacctgaccaggattcccaaggcagaagaaagactaaaaccatttaagtcccttccacatataaatgctgacccgctttttcagagggatcctgtagagatgtaagtgctgctcaaaggcacactgttctcacttttaattttaccctatagagtaaatagtataatgaagacttgatgttttttcgtgcttgacttgcagcactttttagaatccagtacactctcactttctctctctttctctctctctctctctgtgtgtgtgtgtgtgtgtgtgtgtgtgtgtgtgtgtgtgtagttaaagaatctcattccctggataacttttaaagccacatattacacttacctgaccagattcccaagacagaagaaagactagaaccatctaagtctcttccaaatataaacactgaccccccttttctcagggggatactgtagagatttaagtgctgctcaaaggcagctcttcaagaactgttctctaatttatccagtcactaagcattttctgaactttatattcattcagtactcaaaaataagtttctattacaacatttgttaactcattccacaaagatgtgttaggtgctttccatgtatatgggaggcatcagggtatggaggggagagcccaggccttgtcaccaaatggagctgtgtgtgaatcccggctcagccttgtggttaagttgattaacctctgtaatccttgttttattcatctgtaaatgggataataactgtgtccttatacagtttatagtaaatattattttaaagattatatgaaataatgaatataaaacactttgctcatgaagtaagaacttagtcaatgtgtaacccagggctcctgggtttttgggtatgcattgtgaaaaagtacccattcataacaacaacttgagttcgtgttgtctcaaaaagttccaggaagaagctcagccccagcaaaacaaaaaactggtcatatgcagagatgcctgactggagatgaactttggcaaactctcctcattatcatactaaaaactccacccgaggaggagcttatttgtcattttctaaacatgccagtatttggaagcatgatctgcatctgtgctgcctttattccacctctacatacagtgactgagctaactagcccaataaaagccctgttttcagcattgttaggggagacactgctttgggaactctccctggtgtcctccttacttgttgcataaaatcttgctaaatccttcttggtgttgtgatcattggactatcatgcgctatgccattgactttacctattgtataggtaacaaatgtcagtaaatgttcatattatctattattattgtcactagtgtcattgttattactactcctactatgattgccctgtacttggtttaccaaagaggaaaccaaaaatatgtaataaccagtgcagatcctacaggatttcctagtctttgtgaacccaaagtatctgagacaggtctcaatcaatttagaaagtttatttttgccaaggttaaggacactcccatgacacaaccgaacaaagtcctgatgacatgtccccaaggtggtcagggtacagcttggttttatacattttagggagacataagacatcaattaatataagtaagatgtacattggttcaatctggaaatgtgggacaactcgaagcgggaggtttcaggtcataggtagataagagacaaatggttgtgttcttttgagtctttagtctttcactgaatagataacttacatgtgaagagggtagaggaatagtcacttatgccttagtctggctcagtgaatctgcatttttacttaaacaatagggcagaagaagcaatcaaatatgcaaagaaacacaaaaagtggctcaacattcaaagacaggtttattttggagaataaacctgagaggggcttctggccaatttcagtcaggagcattctctgttacagactaagagtattaattggtttaagggtgagagaacttatcaccggcgtggaatgtttctgtataacggagaagtcagttgcagggttggaatgtatctggttggaggggaggttatcttggggctgatatgtctctggtcagggaggggtttggaatgtttctggtaagagatgttatttgtggctcatggtcattctggccttagccattaggctgatgccctttggatttaggtggtttttgatcaaggtgaactttaaaatggcaggatggtgatgctcctgctctgtcaccttgtcttgtgacatgttcatcaccattccatggggaaagtaaaaaaatggggagtttccatggtaaaataaccttggaaaacattgatgaacaaggttaagtaagtttcttttctgaagtttctcaggtcctttttatgtataaatcaccaggagagggtgggatgcatacacagcacttctccaacatatttaaccataaaactcttctcattgcacatatgtaaattgggaatattttgctttaattggaagggaaaatgttaatggtaaaatagctggtaatttggaggatttacatgtatgaaaaaaagaaaatgttttgaacaccgataaaatgccagaaatttaaacaaccatttatataatctttgcagcaactgcattgtgtttaatcaccaagattttacagtgaagaatttgaaactcgaagatgaaaacaaagtcttactgctagtaagtgaaggagatagctgcttccatgaactgaagtacttctcaaatatctggaattatgaagtgaaaggaaagaagattggtaaatgaaagagaatgattattccaggatatgtatgcacaacttccttatttttttcattatttcacccctaaaatttgttaactgaagtctacaaagagtaagagggaaaaggtaagtcttaataatacaaaaagtacagagaaaatgtaaattgctctaagaaaaagcacaaggtgccacataaaatattgtctgttgtgttttctttttcatattttaagaccacaattattttactctctatggggtaatttaatagcaggtccagtgaggcatatgagtagtgcctcatatgtaatagtcctgctttcctttgtatataaaaccagttaaattaagtcaaaaacatgtttaaaactatatggattaaacaaagggactggttctacaatctgcaatgaacatttttttttcctgctttccaggccccatggcatccagcacaaccagcgagagacagatagatggatgatagatagatagatagatagatagatagatagatagacagatagatagatgattgattgacacatgatacatagaatggccagatgcatacatataaacatacatctatgtatcaagcatatatacatttgatatatatggataattggtactgttgtcactgaacaataatatcttccaactgtatccaccaacataacttgagaggttatttttataatttggataattggatatagttttataattggatcagattgtctgacacagatgatttcctgagaggccaccaccctatctcctggaataagaacctccacagagatattggtgagcctgtattgcagatttcctctcctgaaaaaaacctaaaagctcaagtgtgtagggccaagagccacaaaattactaggctgtggccaacaaaccacttttgcaatacccagacactaggttcagtcaacattctttctcatcaggagcactaatagtgtaatttgtgacttaaaagaaagtgaattctctgagtcagtgactattacctaattgcttgaaggattttttccagacaggtggtctggaaaccttttacctattaccttccatccctgaaccatttcaatcttctgcctcctggatatcttggagaaaatgaaccaacacaacacagctttcagtttttagagcatttcccccatacagaacattgtcttacttgatcttcccgatgacctcaacaacaggaaaggcaggtcctttcatttccatttataagacgcacagacccaggattatctagccacaggaagcaggactccagatttcaagtccagcatctcaacgtgacaaccttggtaactctgcatgaacggactggatagtaaagtggaattattactgagaactgcaatgaataaaatcttttgcattttttgcctacgtttcacagagggtgatatttttctgaggcaattaaatttataccacggccacaatactgaaacgttctgaccaacaaagtcatgctcctgcatctacacagcagataactgcagaaacggcttcctttcttccttgtaaaattgcctgaaaacagctcccccttgctgtccgtcgaggcatatcttcaccaacgttaaaacagagctgagggagatcgcatttctgcctccctcccgccctgcagaggggctccagctgttcagagtaacggattactaggtaggtggttgtttcccctccttcccagggcctctttcctctctttgagattgcctctttcttactcctgagcacaggagccgggcgggttttctgtcccttgccctggacagcactgcctggatggccgctgtccggcagctgctctttgtccacccaaaaagatgtccccacgactcagtagtaaccagacggtccccacggaccactgcggccaaatttccgccatccccgctgtgggaatcaggcttttcccgcagaaaaccccaggaatctagagaaaactccttaagtccctagtctccatagagaaaaccaggag

SEQ ID NO: 5693 - DNA, 6000 bp, Homo sapiens
ggcgtgaggcaccatgcctagcctgcctgagaatctttcctggtaattaaggggttcttagaaagcatcatatctcatttaaaatggggagtttcactgggcgcggtggctcacgcctgtgtcccagtactttgggaggccaaggtggaaggatcacttgaggtcaggagttcgagaccagcctggccaacatggcgaaaccccatctctactaaaaatacaaaacttaccaggtgtgatggtgcgtgcctataatcccagctacttgggaggctgaggtgagagaatcacttgaacccaggaggctgagcttgcagtgagcccagatcttgctactgcactccagcctgggcaacagattgagggagactcagtctcaaaagaattttttaaaaaagtaaataaataaataaaatgaattctccagcaggccagcttcctgagcatagggcatggctgtcttgttcaccagcctgtgcctgccacagagatggggtccagtaagcatctattgagcactgaatgaaccagagaaggtatatgagtcccccaaggtcacacagcccatctttggctgaaatagaggagctctcattcccatgtggcctgtctatgccttaaagaaagtccaaagtaggcagagtttggacttagagaggatccttcatgtggcaggatgcatctttgaagacctcctttggttgggagcctctctgctgagcctagtttagccactgatgatcagggaggctggggaaaccgttcagctttaagtagagtgttaggaatctgtgaacactaaagatctgccggaaggagctacccagtggcttgggaatgagatataagctccattacactaggcacagccagtaccaggagagggagtggtaggggtggaaccagtccctgctgaaccagtccaccctgcgccaatgggacagagtttagttggaggacagcatgggatgagaaaggcaaccctcctcccactccaggtccagggcaggcattgctcacggatcactgagttccttgcagccaggccaggatgtggcctcagattccctttaacacagagctccaggaatcaagaaccagtcaacccgagctggacctcaaaaggaagcttgaccctccatcctgattctatgtggagctgccaggggtgtacacagaggttcctctgagggtcctggaggagactgcttctctctcaagtcccagtatccccaggtcagcccttagatttcaaaatcctctttaaaacaaaagcataaaaacccccacaagcaacaacaaacactttttgctccaagaaagaaaagccaaactgttcagccctgttcaaaagggatggccaaaggcccgtggcttcagattgtcccacagccaccaggtggagagtcataagccaggcagccccacgccttcctcactggcccagtggggctgtgggttcccacctcctctgccagccacccagggacccagctggctgggggaccagtgtccttgctctgccagttgtggctcctagctgatgagacccgagcttaggtttggctgggaggccagaggcagagggaggcatgccacagccacagccacctccagggaggaagaggcatgtccaggagtccatccccgggctggatttacccagctcctcttccatagtacccgtgtgcttgatcttcctcgaaggctgccttctggcctccttctcttctctcccactctccctcctctcccccactccttcttctcctcccctctcctttatctccctttcctccccttcttctctttcccccttcctccttctgaccccctcctcccctttcttcctcttccctcctcctctcctcttccctctttttcctcttttcatctccctcctccctttccctcctcctccttaccccctccccctcttctcctcctccctctcccctctcctccccttgacccctcctcttccctcctcctcctctcttcctccttcctcctcctcttttcatctccttcctccctttccctcctcctccttactccctcctcctcgtctcctcctcccccaccctctcctcctcccctttctttctcttccctcctcctccgctcctcttccctcctcctcttttcatatccctcctccctttccctcctcctcctccccctcccctctcctctacttggcccctcctttttcctcctcctcctctcctctttccctcctcctcctctcctttttccctcctcctcttttcctctccctcctccctttccctcttcctcctcttcctcttccactgtccacagcagatgaggaaactgagactccaaaggtgaaaggccttgcccaagtcacacagcttacagtgacagcgacaggaattcaaaccaggtccgtctgctatcaaagcctctgttcttagccactattctgtgcattggcaaggtgacttgttccagggcccatttcaatggattcctaattgaaatgcctatgtcagtggatctcaaacttgagcaagcatcagaatcccctggagggcttcttaaaacccagatggcttcctggagtctctgattgccaaggtctgcagtgaggcccaagggtttgtgtttctaacaaacttctgggtgaggctgctggggttggtatggaaactagactttaggaacctctggtctctattagatggtgatatacaagatccctgccacgttatggaaatatcctctcctttcaccaggagaacctggggaatgacatgatttggctttgtgtcccgacccaaatctcatcttgaattggaattccataatcctcacgagtcatgggagggaccaggtgggaggtaattgaacatgggggtggttttccccccatcctgttctcatgatagtgagtgagttctcatgaaatctgatggttttataagaggcttccccctttgcctggcactcattgtctctcctgccaccctgtgaagaggtaccttccatcatgattgtaagtttcctgaggcctcccctgctatgcgaaaatgtgagtcaattaaaccttttttctttataaattacccagtcttgggtatttcttcacagcagtgtgagaacggaccaatacaattactaacttctgggtgaccttgggtgagtcccttgcctcctctgggttcagtgttctcatctgtacagtaagtgtttcgatatgatgttttgttccctagataagcccaaagaagaagagagcaaggaagacagttgggtagactgggcctgacttctgactatagagacctgtgtgacctcaggcaagagactcaatctctctgggcttcaagttatctgtgaaatggaagaatgaaattagatggtttctaagtgtaaagctcactgaattaaaggattgaggatggtggggagaggtcggtggggttctaaggctgatcagacgatgaggacatagtcctccacctgcccaagactttgaggcccaaaacacaggtttctctccttctctccctccctccccatctccctctcccttcaccttcccctcctccccattaccttcctccctgccctcccttttcttcctttctttcttctcctcccttcccctctcttcccctcccctgcccttcccttttctttttctttctaaaaatattattttaggcagtcgtaggcagtcttggctttggaatcagacagactcagatccagccatggctcggtcagcatgagcttggcgccctgggcaaaacgacttctgctctgtggccctagcatcctcatgtgtagaatgggcaagtgatgcccccccgacgtgggtggtggttcacacggcttactccatggaagcacttggcacaggggcccacatgggcacttctgttatttcttcagtctggaggccaagggtgggcctccgagccagacaacatagttggaatcccagctctgtcagctgctggcggtgtggtcttgagcaagtgacttaatctctctgtaccccagtttccttattggtaagactggagtagtaataattcctgttatctagggttgccgtgaagagtaagtacgcatcgcctagcacgctgcctggctgtcggttgttttgattattccactaatgatggtgaccacacagccgatgaaccaggcacttagcgcctggttagggcagggaacagaatacagttctttccctacagagttcctggtgcaaggagttctcggtgcaaggagagagacatcttaacaggcaaggacagcactgcatcagtgaggtgatggggtgaccctgaggggcacagcagcccccgagggttggggaaggcttccctgggaggtgaccttcaacctgagacctgaagaggcagtaggagaccatcgggccacgaattagggcaggaatagcatccaggtgggaggaacagcgttgcaaaggcccagggtgagaggcagccaatctctcggtcagtgtggagcttgagcccctcaccgggagcagaggcgcttgcacttcccccagcagccgggtgctcagatgtgctccctgtttgcgctcagtgggcacggctccccggctgcaagaggctgccagaggggcgggtcgtccccagcgggcccccgccgccacccacaagcccagtccccggctggtaggggcaccctcccctcgcagccccctctccacgcagctagccgcccccgccctaggtcagcccagtttcctgcccctccctcctgctctcctccctccagctgtttctctggctgagttctgtcccagtcccattcagggaagcagccccggcggccagcagggagctcaggacagagcaggctccctgggaagcctccgggtgataggggtgttccagctgcggcgctctgggggttcagagggggatcttgaatgaacaaatgaatgaactgctttctgggcaaacagccacagccagaggagcctgtgattggcagaaagaagccagggtgtgcaagtctccccaacagcctcgagtggcctgcagtcacagggaaccctcaggaagaccttccgggcagagaccagagggaaggtatcatcacacacttgccttgggtgtcttctgaggggggccagggaaggggaatgaatactaacagagagaaaagtttgtttctttttataatttcatatttgttaaaaggaagagttttgttattattttcagatgtcaaaagtaatgcatgttcattgtttaaagaaatagcaaggatacacaactaaatatatgaatgtggatttccacatctagtttggtaacctgcttaaccacagattgtgaacttttttccatatcacctatattcttccaatatacatttttcatggctgcatagaaaggctatcttaagattatttgacttttccataatagatttgcttctttttttttattagaacagtgctgcaatgaatatttagtatgacatctttgtgtgtgtgtcttatgaataccttttagaaattgctagatttaaggtttgcctatttttaagacttctgagcttttggtcacactgcaccctggaaggccgtggcagcttgacctctctacgatgttataccagggcacagtattctcacatactaaacccaccttgttgctacccatcccttaaactttccctgatgtgaagtcgagaataatatctagatgcttcaataggcatttcatttctttgttagtgttgattctcttttataaacttatttttcacatttctagtctgactctcctgttcaagtctgttcccatttttttctcctctgggggcatgtttatctttttccaattgatatctaagggttctttgtatataaaggacacaaaacctttgccggcactctctgttgaaaatattccactccctcctctgtcttcagaatagcccattttaaatgggcaagccagctttggcaaaattata

SEQ ID NO: 5694 - DNA, 6000 bp, Homo sapiens
ctctacaatttcttgacaattatagcaccaattttgagccattcaaaaaccaggtctgtaagacactggataaaatgtatgaagtcaacaagaacaaccatactagatttcaggggtaatcacaaatcctcatcctaactgctaagtttgttagcttgaaacttgagggcaccaatacctcccagaattgttgggagactttaaaagcagagtttctcagccaggcgtggtggctcacacctgtaatcccagcactttgggaggctgaggcgggcggatcacctgaggtcgggagtttgagaccagcctgaccaacatggagaaaccccatctctactaaaaatacaaaattagccgggcgtggtggtgcatccctgtaatctcagttacttggggggctgaggcagaagaatcgcttgaacccaggaggcggaggttgcagtgagccgagatcgcaccattgcactccagcccgggcaacaagagcgaaactcagtctcaaaaaaaaaaaaaaaaaaagaaggaaagaaagaaaagcagagtttctcaaccaagacgctgtcggctttgggggccggagaagtcttagttgcggggggctgtcttggccattgtaggatgttgagcagcataaccggcctctacccactaccagaagcacccactccccactttcaacaaccaaaaatgtcccatacattgccaaatgtccccggggggtcgtgggtgcaaaatcacctccaactgagagcactactgctttaaagagatagcaataatgaaaagattaaagcatcaaagcactttagaacaggaagggattttaaggagcctgagaacccgtgattctcaaactttgctaggtatcagcctccctggggagtttgttaaaaatgcggcacctggacctcaccccagacctatcaatagagtcaagtgttgggttctgccccagcaccaacatcctcattctacagctaagttaacgtcggccagagagggaaaatgccttgcccaaggtcacagggcgagttagaacctggactccaaaaccaaccaagcccttccttacaacaaggagagtgtgctattcttacgtctttgaggcagcagaacctaaaaatggttaagacggtgcattccggagccagccggcccgagttaaaatcccgacttggcatttatcagcggggcggcctcgcacaaggcacgtagcgtctgaggacctgtttccttctctgtccagtggaaaagtaacagtacctacccaccagcgttattggaaaggtgaagagagaagatatttaaaaagcccgtcgcacggtaagcactcgatacgtgtcctattattaggactgtcccacacctgcaaagtggaaggggtctggggatcccggggacagagggctggaaatgggctcagggaggcgaaacgacccccgattccccgaagtccccaccgggagacggacccccgccccgcccctcacctggccctgcagctccttctcgagctgccggtagtcgtttttccagactaggaggtgcagggggtagtggtcgcccgcgtcgcaggccgaggacatggcgaggaggccgtaacctggtcctcgtcgcccgccccaagtctcggccccggcggggtctcccgcgcccgcctgcctgccctgaggccggcgagcaagcgagcgtagggcgtgttacgctgccggccggctgagccggtcgggtgcggggcgcgcgggaggtccggggtcgccggccggctcagggaccaggtcggccgcgcccaccccgcgccccgcggcgttcccgcccgcgctgacagctcgcggacagacttctgcggacctaactgccccaaacagggaagtgcggagagcgaaccaccgcatgccgcggcggggataggcgaccttgggcaccgggtccggggtccgcgccattgcacccacctccagctcacaccgagaaactcagtgcagcccacagaacagagctgaggctcattctcttggccaaagatctccacgcggaaagttccgtctacctgtccccagcttctttccccctgctccagtagccccatgtggttcggtccacaactgggcctcttccattggctctgaagtcagggggtgacaactgagccccggaccaaaccattccagctgccgacacccttgcagcctttttggagcaggacagatgcttccacgacgggtcaaaagccattttggaagtgggcaacaccggacaatttttgaaggaggaacgctaaaccctggcgaagtggcttcaaatacagtatttgcataaaaggggatatttctacttcatgatttctcaacctcggcacatattgaactgggcagtttttgtgtgggggttgtccggtccttgtaggatgctgagcagttgccctggtctttctccccactcaatgccagtagcactccccaaaacatgtctctccagatattgccaaatgtcgtctcggggagaaaaatcgtcctcagttgagaaccgcttctatttgaactccgaaccgggttatgattcaatagctaactatggtggtgatttagtccatgtatgaatgtcatttttaagctagctttttggatttgaggttatggctgaaaggactgataaataatatacatatttgaccacagtctgcgaatatgaagtttattctttgagtttcaggcactatgcctccttgactcaatgaagaaccaaatcaacttacagctagctactcatgggcttgaactttctgctgctgcttcagctcagctgtctacaactagaccacatagctggatgaagctatttaatgcattgtgaaaacattccctctgccctctgagtgtatgcacatccagctcttcagatgcctgcaacaacagctgttcaagaatcccaacctaatccattctccacagatgtggagcccagaagatttgtgagttgttaaaccaaaacaggatgcaggagcaccaggatggcacccggagactctaaccatggaatgcgtgggaattctgtgattatttctccatcacacatttatcacactgtagagatggactcaagaccagtgcttctgaggccttttccagcacttctcattctttcagatgccttttgcaacttaacgttctccttcttcttcatcatgccgtgtttattgaaaatctccctatctcattaatcagaaaaccccataatgacaggaaccacatcgttttgcttaccagagtatctaaaaccaaaatagtacctggctaacaacaggcattcaatatttgctgaatggagatcatagctgtgtttatatgtaagacagacaataagtagtcattggtattagggtcacatctcctttctccttcacactgatttacctcatttcattgtgtttatctcacaccattttgtaaattatcccatgttagctattgttattctcaaattccacgcatatgaagaaaaacagtaattagaaaataatagcaatatccataattatgggagctactatttactgaggggttactatccagcaggtgtatcacatttttcccataatttattccatctgtccttagccaaaatgaatgtttaactttgctggtcacatacaagttttgtcgcatattcttcttcctctttttctttatttccctctctctcttcttcattttcatctcgcaaccctttaaaaatgtaaaaatcattcttaagtagcaagccatacaaaaacaaatcgtggactagaagtaaacaatgcattatcttaattttgaacatgagattaaaactgaagcctaaggaatcatctaatatattcttttttgttatttttgttgttgttgttgaagttgtttttgagacagtctcgctctgtcccccaggctggagtgcagtgacgcgatctctgctcactgcaacgtccacctcccaggctcaagcgattctcatgcctcagcctcctgagtatctaggattacaggcatgcgccaccacgcccggctaatttttttttttttttttttttttttgagacggagtctcactctgtcgcccatgctggagtgcaatggcgtgatctcagctcactgcaacctccaccccctgggttcaagctcctgcctcagcctcccaagtaactgagattacaggctcctgccactgtgcccggctaatttttgtatttttagtagagacggggtttcaccatgttggccaggctggtcttgaactcctgacctcgtgatccacccgcctcggcctcccaaagtgctgggattacaggcgtgagccaccgcgcccggccaatttttgtatttttagtagagatggggtttcaccatgttgcccaggctggtctcgaactcctgcctcaagtgatcctcctgcctcagccttccaaagagttgagattacaagagtgagccaccacgcccagcctggaatcatataatatattcttattttactttaccccagtaaaatgcaagcttcataaggactagaaattcagtctttgctcactgctgtttctccagtggctgggacagtatataaagcatggtaagtgcttgataaacatttgttgaatcaaggaatgaatgaatgaacttgaccattgattgcctcaggaaggttgtggctgcagggttctcatcacaagatattgctacttcccctggtattaatcagttgggacgaggggaatctctgccagagaagaagacccaaattcaatatttaaaggtaggacagatgatactcgggcagtctcctgccctcactcaagatggcgacaaggcagagtgccctttccggtcacatgacctgacactcgccgaagggcacctccccgcgcgtgcgtgctgtgccaaggctgcaaggcgctgaggggagaggcgccgccgtcagcgccgccgcagctgggacccgttagagcggaagcgccgccgccaccgccgcctttgctgtcccccggcctctagttccccgcaggtgggaggtgggagccatgtcgaaacggctccggagcagcgaggtgtgcgctgactgcagcgggccgggtgagtcgcaccggccgggcccgctcccctctgctttcctggcccggacccctaccccggggccgccccctcaggtcaggctgcatcccgcggctagggtcgcaacgaagaggtccctgggcggccttggggtgggaaccgtcccgggcctgtcagagccgggcgggcagggggccgccgccctccccgtccctcgcggccctcccttccctctcgttccctcccgttccctccgtcctaggccaactggggaggtgacgggggccagggctgctcccccaacaggaaggggcttgggcaatccacaggaaagccaattacagaagtaaaatgtgagcgtcctcccggctgcagcctccagaggctgcaggtgtcacctcccactagaccctttctccgcctgggtgtcctgcccggggaggatgacactccctgagactcgccagagggtccccgtagatgacttccccgctgctgacatccgacagctactctgcccgggagaattgccaggagatcggggtcttccaaacacaaccagcacttaggaggcagtgcttgtctcaagtttgaggatctgaacggcctgggttcaaactagattttgcttctggctgaccttgggctggtgacttcacttggtcacttgcttgatttcctcatttttttcaatgaggataatcgggagtatcacgcttagtggtgaggaagattcaatgaatactcgtagaatcatatcatctaaggcttttcttttttgcattatgctgtctacagtagaactcttgtagtcccttaaagctatatttgactatctaaatcatacgttgattacaacggaaacaaacgcaaaatcaccagcaatataggggcattgaaacgctaaagccattccttc

SEQ ID NO: 5695 - DNA, 6000 bp, Homo sapiens
tcctgaccttgtgatccacccacctcacctctcaaagtgctgggattacaggcatgagccaccgcgcccagcctatttatttttttagatggagtcttgctcttgtcctccagactggagtgcaatggtgcgatctcggctcactgcaacctccgcctccaagcttctagcaattctcctgcctcactctcgcgagtagctgggactacaggtgcttgccaccacactggctaatttttatatttttaatagagatggagttttaccatgttggccagactggtcttgaactcctgattccaggtgatctgccctcctcggcctcccatagtgctgggattacaggtgtgagccactgcctggccagttttgttttttttttttttttttttctgagacagattctcactctgtggcccaggctggagtgcagtggtgcaatcttggctcactgcaacctccacctcctgggttcaagcgattcttgtgactcggcctctggaatagctgggactacaggcatgcaccaccatgactggctaattttttttttttttgagacaaagtctcactcttgtcccctaggctggagtgcaatggcgctatctcggcccactgcaacctccgcctcccaggttcaagcgattctcctgcctcagccccccaagtagctgggattacaggcacctgccaccacacccggctagttttggtatttttagtagagacagggttttcaccatgttggccaggctggtctcgaactcctgacctcaggtgatccacccacctccgcctcccaaagtgctgggattataggagtgagccaccactcccggccacgaccggctaatttttgtagttttagtagagttggggtttcaccatgttgggcaggctggtctcgaactcctgatcgcaagtgatctgcctcccaaagtactgggattacaggcatgagcctagatagatctaaatttggtgcacaaaggaatagggcaccacagcatgatcttgagcaggaagtccaagaagagagagacagcatcttcttgaagccctggggtagaataagatcagattgtacgtgaaaaaccagtaggcttttggggtgggtgcggtggctcacgcctgtaatcccagcactttgagaggctgaggcaggcagatcgcttgaacccaggagttcaggaccagcctgaccagtatggtgagaccttgtctctacaaaatatacaaaaattagccaggcatggtggcacgtgcctgtggtcccagcaacttgtgaggctgaggtgggaggatcacttgagcctgggaagcacaggctgaaaggagctacatttgtgccactgcactccagccttagcgacagagccagactctgtctcaaaacatacaaaccaaaaaaaccagtagactttcagaggaatagatgccatttttttcttccttaatcctctgccttacagctaattctacagccacaaaaagaaaaaaaaaaaagagagagaagaaggtgatttgacaagacaaaggatttagaaaagaaaggcaggtgttagtcatgtggaaaaaaaaggaagtatttgtgtttacaagaatcccgacagtatctgagaatgtagaatgaagaatattttccatttgttaaaaaatccaggctaagcatgtgaagtactcagggttacccctctgacctcatcttggggtgtttcaacctaccatggttacccctgttagttaacaccttatcacagaatcacaaaggcccacagagtgaaagtggttacaatgagctctcatgaaaagtaggagttaggcttggcatggtggcttacacctgtaatgtcagcacatttgagaggtcaaggtgggtggatcacttgagccccggagtttgagacctggacaacatggcaaaaccccgtctctacaaaaaatacaaaaattagctgggcatggtagcatgcacctgtagtcccagccactcaggaagctaaggtaagaggatggcttgagcctgggaggttgaggctacagtgagccaagacagagccactgcactccagcctggacaacagagccagactctgtctcaaaaaaaaaagaaagagagagagggagggaggcagagagggagagagagagagacagagagaaagagagagagagaaagaaagaaaagaaagaaagaaagaaagaaagacggaaggaaagaaagaaggagaaaagtaggagttagtcatccaggccaagagtatgaagtttgtcttcaaagaactcctgaatttgtgggggaactagatatagacgtttgacgaacacgtttttatttattagaggttatgagactagcgagtagggtggaaggaggaaagtggcaggaaaatcatactggaaaggtaggttgggaaccaactgtgaaggaccttgtacgtcaatccaaggaatgtgaccttcaacctagagcaagaggtgacaaactcaaaatcccacagagactaggcttgccaatgaggaaagccaaccaggtgtaaggcaatagggagtggtggggactgtggcaaacagtaaagctcattctctgtctacaggggctcattctctgtctctactccatctactctaagctccagctgattgtttccatgtgggagtgtcggtccagtgtggccagatcttccagtgttctaagagacaacagaaatccaggtttttataggactgcaccaggttttaaaaacatatcggccaagccaggctggtttttaaaccagatatggtccacaggccatcattctagccccttggcagattgaagggagctagtgaagatttttaagtgaaaaaaggtatatgataatatctgtgcttcagaaaaatcagattattgtgtagaagatgacttacaggaaatagatgagaggaagggaaaccagttaggaaactgtttcaacagttcaggtgggaagtgactgcggtctgtgctagggcgaggcaggggagaatgtgggtggacagatttggagtccagcatccagtgggaagaatttagcttcagtgtgcatctagaagacagacacattctttcaatgcaccccctcttttccgccccattttttttttttgagacagagtttctttctgtcacccaggctggagttcattggcacgatctcggctcactgcaacctccacctcccgggttcaagtgattctcctgcctcagcctcctgagtaactgggattacagacacatgccacaacacctgactgatttttgtatatttttagtagagatggggtttcaccatgttggcaaggctggtcttgtactcctgacctcaagtcatccacctgcctcggcctcccaaagtgctgggattatagatgtgagccaccgcgactggcctccaccccattttcttctttctttcttttttctttttctttttcttgttgttttgtttgtttgtttgtttgtttgttttagacggagtctggttctgtcacccagactggagtgcagtggcgcaatcttggctccctgcaagctctgcctcccgggttcacgccattctcctgcctcagcctcccgagtagctgggactacaggcgcccgccaccacgcctggctcatttttttgtatttttagtagagacggggttttaccgtgttagccaggatggtctccatctcctgacctggtgatccgcccgcctgggcctaccaaagtgcttggattacaagcgtgagccaccgcgcccggcctccaccccattttctaaactggaagctgaaaggcacagggcagattaataatccttaaagccaaaggacaggaaattttagcaaagactccaattttttgtgcagtctaatgttactcatgattgctttagagatggactccttaatcaactcctccaatcctcttccgcccccagggggcagttttaattgatgggctcagcacataattgaaattaaaaacgtacatctcatggtgtttggctcattcaacagccaatggaaactcagggccaaatctttgtaaaagttctaggctctgcttcccagcagagggggaaaccggctcccaaagaggccgttttgtggagacagacatatgagaagtgggcttcagatctatttcatggtcttggtggttgtgcaactggccactttggttcacggaaggatgtaaagggcagggaggtgggaatagagcgggggaaaggtgactcccgtcaaagaatttttctaacatccatcaagtatcgtgattagaacttttctctccgcagactcctccaatttttgagcgcggtatttttcggcacaggaaatggcccggaggagctgcagagcaaagcctcccctctctggcaccgcatgggagtgccccgtgggatgagggagaggacaaggcagtcaggcaaaggttacgggaggaaagcaaaggcaggagcccagaaccactccaggaaatgtttggatttctccaccaggagggaggacaaacaagctttcttcttgccttctgggcagctttgtgtgctctccagcacggagtccgaggaggaacagcgaagctgaaaatgaaaattactctggcgctggacccaatcgctcctctacggcatcaatctcatcggacccccccaccctaccgcctctcagaaatgaccacttttgcaaaattgcatgcatttccaagcttcatccggctccaggcttggcctctcccagaggcaggcggcttgtgagacgggctccagagaaaggacctccctgggtctctcatttcctggctgaagtttctcttctcgctgctgtggcagcatccaacccacacacacaggacccgcatcctgggtgatgaagtcagacacgcagcagctgggtgagtgctaacgctcagataagcatctgtgccattgtggggactccctgggctgctctgcacccggacacttgctctgtccccgccatgtacaacgggtcgtgctgccgcatcgagggggacaccatctcccaggtgatgccgccgctgctcattgtggcctttgtgctgggcgcactaggcaatggggtcgccctgtgtggtttctgcttccacatgaagacctggaagcccagcactgtttaccttttcaatttggccgtggctgatttcctccttatgatctgcctgccttttcggacagactattacctcagacgtagacactgggcttttggggacattccctgccgagtggggctcttcacgttggccatgaacagggccgggagcatcgtgttccttacggtggtggctgcggacaggtatttcaaagtggtccacccccaccacgcggtgaacactatctccacccgggtggcggctggcatcgtctgcaccctgtgggccctggtcatcctgggaacagtgtatcttttgctggagaaccatctctgcgtgcaagagacggccgtctcctgtgagagcttcatcatggagtcggccaatggctggcatgacatcatgttccagctggagttctttatgcccctcggcatcatcttattttgctccttcaagattgtttggagcctgaggcggaggcagcagctggccagacaggctcggatgaagaaggcgacccggttcatcatggtggtggcaattgtgttcatcacatgctacctgcccagcgtgtctgctagactctatttcctctggacggtgccctcgagtgcctgcgatccctctgtccatggggccctgcacataaccctcagcttcacctacatgaacagcatgctggatcccctggtgtattatttttcaagcccctcctttcccaaattctacaacaagctcaaaatctgcagtctgaaacccaagcagccaggacactcaaaaacacaaaggccggaagagatgccaatttcgaacctcggtcgcaggagttgcatcagtgtggcaaatagtttccaaagccagtctg

SEQ ID NO: 5696 - DNA, 6000 bp, Homo sapiens
tgccaaatccccctccgcgagaaacacccaagaatgatcaataaaaaaaaaaaaagaaaaaaagaaaactgggcttataccttgtatatgcagtctctgtacagggttcctgacttgtcataagtaaagaatgtcactttctgacaggcccagaagcccaaattatcttgggaccttgagaggaggaaaattctcccaactcatacaggtatttgcaggcatagataaatccatggctgggctaaaggctttaaaaagtataaggtgagattccttagggaatgaaatttcagcaaagctaattttgtttttatttatttatttatttttgggccatggccttgctctgtcatccaggctcaggcgattctcccacctcagcctcccaagtagctgagactacaggcacgcgtcaccacacctggctaatttttgtagagacggggatctcgctatgttgcccaggctggtcttgaactcctgggctcaagtgtttctcccaccttggcctcccaaagtgctgggattacaggtgtaagccaccatgcctgaccagcaaagccaattttaaagagcctatatggcaaataattattcttgctgtacgttatacaaataatcaggccaagtataataagactaagacttatttcgcaattacatttgtcctactactatttgtttttaataaaaatggggactaaagagagaaaaactatgtttcaaaagctatagtacacccattgttagattctagtcttgtccactgttcttgagtttttgttattttctgcaatttggactaaatcctgaattctttgtggctgcagtgagctgtgatcacaccactgcactccagcctgcgtgacagagtgagaccctgtttcaaaaaaattaaaccagattttaaaaattgtgtgtcacagagataaccagtttttcttgttgactgcacctttaactatggctgtcctgaagcttacctaactaatgctccaaactaatgttttccaaactaatgctttcacatttttcttccacttttctgacttggactcaataaaattgctactaccttttttcctgaggccctgtaagctgaagcttattcttttaatataggtggcaaaaacatgtcagattaccactgccttcctgctctataactaaaggtattttgagtttcacatctggataaattgtgcccaacattaacttttgtttttcttatatttccatagaaatgcctcgtattaaaaatctgtttgtcttcatcatgtatagaggcctagcccgtgtgcaatgccacctcctgatatgggaaacagctgtttaactgaactgatctagtcccaggactaggaaactgattaataatatatgggacagtgtatttaaacttgctccttcctggctgactataggtgcattgcctatgagttagccctgatccacaaggagcagtaccaaataaaataaagtaaaataaaatgaaattcactcattcttgtctatcccaatatgtttgtccaaaaacctttgacccaactctctctgctagtgacccatgtctgactgattcttggagctattcacctggatccctcagagcttaagatcaattctacaaaggcttcttcttctttttttttttttttccatagacaaagtctcactttattgcctagactagtcttgaactcctgggctcaagcaatcctcctgccttggtctcccaaagtgctgggattataggcatgaaccaccacgcctgtgtttgttgttgtttttttttttttgagacagagtttccctcttgttgcccaggctgtagtgcaatggtgtgatctcggctcaccgcaacctccgcctcctgggtcccagttcaagcagttctcctgcctcagcctcctgagtatctgggattacaggcatgtgccaccacacccagctaaattttgtattttagtagagatggggtttcaccatgttgaccaggctggtatcaaactcctgacctcgtgatccacccacctcagcctccaaaagtgctgggattacaggcgtgagccaccgtgcccggctttttttttttttttttttttttttggtggagtctcactctgtcacccaggctgcagtgcagtggcacaatctcggttctctgcaacctccaactccctggttcaagcgattctcctgcctcagcctcccaagtagttgggattataggcgcccgccaccacacccagctaatttttgtaaattttagtagagacggggtttcaccatattggccaagatggtctggatctcctgaccttgtgatcctcccgtctcggcctcccaaagtgttgggattacaggcgtgagccaccatgcccggccatgctctgctcttatgagctgggtggccctgaatattttatcctctctgagcttcactttcctcattttgaaatcagaatcagtaataataccttccacatgggctacagtcagggtgaaacaagcaactataaaagcactgagctcctggctaacacggtgaaatcccgtctctactaaaaatataaaaaattagctgggcatggtggtgggtgcctgtagtcccagctactcgggaggctgaggcagcatggcgtgaacccgggaggcggagcttgcagtgaggcaagagcgagactttgtctcaaaaaaaaaaaagcactgagtatgggttccagcacatgggaagctctctataatgtaggtgccaccatcatcttcttcatcatcgtcttcatctcacctggatcatcatcaagtacttgtagttctatgggaatctaatattaggtcatcctgactctagtttactgtgaagagtctataagctcctattattgaacctgcgtttgcagctaaagaaataaattgacatcttatggtggcagcgatggttcacacctgcaatcccagcattttgggatgccaaggcgggaggatcacttgaagtcaggagttcaagaccagcctggccaaaatggtgaaatccatctctactaaaaatacaaaaattagccaggcatggtggcttgcacctgtagtctcagctacttgggaggctgaggcaggagaatggcatgaacccgggaggcagaggttgcagtgagccaagatcatgccactgcactccagcctgggcgacagagcgaaactccatctcaaaagaaaaaacagaaaaaaaaaaaaaaaggaagaaatttacattttataactcaaagtagaaggaacacaatttagaaacctcctgcatggaagaattcataagaccaaaatattaaagggagaaaacattctataggatgacacccaatcgcactgacaagcagagaaacaatgtgtgcaatggtgtcccgctacaaggcggggttccatgtcctcttaggtcctgtcactctaagtttaattttacaaaaatgggggctttgaaaatatcacatacttagtgggggaggttttgcgtgtgtggagacagagtgcacaggaccgtccgtactttctgctccattttgctgtgaatctaacactgccccaaaaaataaagttcattaaaaaaaatcacggccaggcgcggtggctcacgcctgtaatcccagcactttgggaggccgaggcagacggatcacaaggtcaggagtttgagaccagcctggccaacacagtgaaacctcgtctttactaaaaatacaaaaaattagctgggcgtggtggcgcacgcctgtagtcccagatactcaggaggctgaggcagaagaattgcttgaacctgggaggcggaggttgcagtgagctgagattgttccaccgttctccagcctgggtgacagagtgagactctgtctcaaaaaaaaaaaatcacatcctaaggtcccaaggacataaaacaagttagagacctcatccagttttttgtttgtttcagggacctgcaaccaactttcttactgaccagtttcctgggctgtctagaacagacagcttatggggtactaaccccatgctctatcctaaggtacccctcttcatgcagagcgacacagaaaaacaaatttgtagcacaaagtacacccgatttgctacagcttacgactagcctcatgaatcctttttctcattaattcaaagtttgcaaaaaaaagaaatcacatacttaaaaataaatcacttgagcacagaagcatatcaaaatctaatataaacaaacaaaaaacccaacttatgttaacatgccactgaaactgggctcaagttttcaaatgtcttatgaaatattacactctccagcaggctattttttttttcctaactggagatgaatggcagagttctgatatggaaaagcactccatgtttgtacagaaaggtagcataggaaaagtggtcaaattcaaccagtctgtcctcatcaaacaggcaactactgtcttctcagcatttccaaaagaaatcatatgtctgctactgtttatgtcatatgcctgttaatttttcatgctaattcttagtgtttctggaaaacctcactgtttggcaccaaaaattgttattgctattgttgttgttttgttaattatgtcagccaagcagatgacggtgaattaattctgcaacgttgagtactcagttggcatacaagcacccagccttccaaagggatgtccttcatgtttcactgattttcgaatgacagtcggcttgcctaaacttatcctttacatttaagacattttgtgggttcccgtctgcccaggggattcttattacttgtttatgcaaacagcaggttgcataagagccttgctggcttttttttttttttttttttttagagatttcgtagtttcctggtaaccattcagtcatctatttcaacaccctgacatgacataaaggcaggcgtggaaccacacgttcaccacacagacacacacctccttgctggagcattcactaggcgaggcgctccatcggactcactagccgcactcatgaatcggcaccatctgcaggatcactttctggaaatagacaagaagaactgctgtgtgttccgagatgacttcattgtcaaggtgttgccgccggtgttggggctggagtttatcttcgggcttctgggcaatggccttgccctgtggattttctgtttccacctcaagtcctggaaatccagccggattttcctgttcaacctggcagtggctgactttctactgatcatctgcctgcccttcctgatggacaactatgtgaggcgttgggactggaagtttggggacatcccttgccggctgatgctcttcatgttggctatgaaccgccagggcagcatcatcttcctcacggtggtggcggtagacaggtatttccgggtggtccatccccaccacgccctgaacaagatctccaatcggacagcagccatcatctcttgccttctgtggggcatcactattggcctgacagtccacctcctgaagaagaagatgccgatccagaatggcggtgcaaatttgtgcagcagcttcagcatctgccataccttccagtggcacgaagccatgttcctcctggagttcttcctgcccctgggcatcatcctgttctgctcagccagaattatctggagcctgcggcagagacaaatggaccggcatgccaagatcaagagagccatcaccttcatcatggtggtggccatcgtctttgtcatctgcttccttcccagcgtggttgtgcggatccgcatcttctggctcctgcacacttcgggcacgcagaattgtgaagtgtaccgctcggtggacctggcgttctttatcactctcagcttcacctacatgaacagcatgctggaccccgtggtgtactacttctccagcccatcctttcccaacttcttctccactttgatcaaccgctgcctccagaggaagatgacaggtgagccagata

SEQ ID NO: 5697 - DNA, 6000 bp, Homo sapiens
tggaagatcacctgggcctacggttcgagaccagcctgggcaatgcagtgagaccctatctctatttaaataataaataaaaccaaaaatcccaggttagttcaaagacacgaaatagttacttaacctcctgatgcctcggtttctcaatctgtaaaatggagatgataatgacaataataatacatctgtcacagggtttttgtgaagattaaaggagatcacatatgcaaatctctcagtacaatgcagtcgtgtcactattaatttttacaataattcaatccagtttagtggtacacattcaagttgtcataagataaccaggcatggagattcaactgggtgagtgataaattttaagtggagtttctacgaaatgcggagggatcactgccttcactcttgaaatgattcattaaacaagtttctgtacaactcatacacttgtaagaaaaaaataataaatgcatgaaagaaggaaacaagcaagacaaaacatgctcactgtgcagtgggaagaccggaaattccatcggaggcaccagaatccagcgaggctgccctttagaatctgcccgagtagccgcggactttggtttagaatcatgtagtgtgagagctgggaggaagttcgaagatcatctaattcctcatgagcgggtgaggggttaaggggtttcacagctagttaatgagagagccagaacatacatccaggctccaggttcttttgcaaacttaacatgtgtggttgttcttttatttatttttattttaatattattattattttttgacatggattctcactctgttgcccaggctggagtgcagtggtgtgatcttggctcacggcaacctccgcctcccgggttcaagcgattctacctgcctcagcctcctgagtagctgggactacaggtgcctgccaccacacccggctaatttttgtatttttagtagagactaggtttcaccatattggccaggctggtcctgaactcctgacctcatgatctgcctgcctcggcctcccgaagtgctgggattacaagggtgagtcaccaggcctggcctgtggttgtttttttctaattttatccatgactattgtttaaaaaaaaacacacacacaaaatattatgaaattgtgaaacttagaaagggagagtcccttgcaaatttcagcttctagaaataaatactgctgacttctctgactcttagttaataaaggcccttaggattactttatgaatgttgttgacaagtgtccacatacatccaagaaggaagcatggtattcacaggcagcaagaacaagaaacaaataccaattatttcactaaagcctgaacagcatgacctccatccccaccatgccctgagcaagatcttcaaccttacagacaaggcaataacatagtaagaggcagtgagcatgatggttagggacacaggctttgaagtcactgccagattcaaatccaagctcagctgttttttttcttttagttttgagacaggatctcactctgtcacccaggctggagtgcattggcacgatctaggctcactgcaagctccgcctccctggttcatgccattcccctgcctcagcctcccaagtagctgggactacaggtgcccgccacgacgcctggctaattttttgtttttgtatttttagtagagacagggtttcaccgtgttagccaggatggtctcgatctcctgacctcgtgatccgcccgcctcagcctcccaaagtgcttggattacaggcgtgagccacggcgcctggcctctgttttttttttttttttttctaaacagagtttcactcttgttgcccaggctgtagtgcaatggcgtcatctcagctcaccgcaacctccgcctcctgggtcccagttcaagcagttctcctgcctccgctactgagtagctgggattacaggcacgcgccaccacacccagctaaattttgtatttttagtagagatctgatttcaccatgttgaccaggctggtatcaaactcctgacctcgtgatccgcccacctcagcctcccaaagtgctgggattacaggcgtgagccactgtgcccgggtttttttgtttgtttgtttgtttgtttggtggagtctcgctctgtcacccaggctgcagtgcagtggcacaatcttggttcactgcaacctccaactccctggttcaagcgattctcctgcctcagcctcccaagtggctgggattacaggcgcccgccaccacgcccagctaatttttgtatactttagtagagacggggtttcaccatattggccaagatggtctggatctcctgaccttgtgatcctcccgtctcggcctcccaaagtgttgggattacaggcgtgagccaccgcgcccggccatgctctgctcttatgagctgggtggccctgaatattttatcctctctgagcttcactttcctcatttgaaatcagaatcaataataataccttccacatgggctacagtcagagtgaaacaagcaactataaaagcactgagctcctggctaacatggtgaaaccccatctctactaaaaatacaaaaaattagctaggcgtggtggcgggtgcctgtagtcccagctactcgggaggctgaggcagcatggcgtgaacccaggaggcggggcttgcagtgaggcgagagcgagactttgtctcaaaaaaaaaaaagcactgagtatgggttccagcacatgggaagctctctataatgtaggtgccaccatcatcttcatcattgtcttcatctcacctggatcatcatcaagtacttgtagttctatgggaacctaatattaggtcatcctaactctagtttacttgaagactctataagctcctattattgaacctgcgtttgcagctaaagaaataaattgacatcttatggccggcagtgatggttcacacctgtaagcccagcactttgggatgccaaggcgggaggatcacttgaagtcaggagttcaagaccagcctggccaaaatggtgaaatccatctctattaaaaaatacaaaaattagccaggcacggtggcgggcacctgtagtctcagctacttgggaggctgaggcaggagaatgactggaacccaggaggcagaggttgcagtgagccactgcactccagcctgggcgatagagtgaaactccatctcaaaagaaaaaaaaaaaaaaaggaagaaatttacattatataactcaaagtagaagcaacatagtttagaagtctcctgcatggaagaattcataagaccaaaatattaaagggagaaaacattctataggatgacacccaatcgcactgacaagcagagaaacaatgtgtgcaatggtgtcccgctacaaggcagggttccatgtcctcttaggtcctgtcactctaagtttaattttacaaaaatgggggctttaaaaatatcacatacttagtgggggaggttttgcgtgtgtggagacagagtgcacaggaccgtccgtactttctgctcaattttgctgtgaatctaaaactgccctaaaaaataaagttcattaaaaaaaaaaaatcacggccaggcgcagtggctcacgcctgtaatcacagcactttgggagaccgaggcgggtggatcacaaggtcaggagttcgagaccagcctggccaacacagtgaaacctcgtctttactaaaaatacaaaaaattagctgggcgtggtggcgcacgcctgtagtcccagatactcaggaggctgaggcagaagaattgcttgaacctgggaggcggaggttgcagtgagctgagattgttccaccgttctccagcctgggtgacagagtgagactctgtctcaaaaaaaaaaaatcacatcctaaggtcccaaggacataaaacaagttagagacctcatccagttttttgtttgtttcagggacctgcaaccaactttcttactgaccagtttcctgggctgtctagaacagacagcttatggggtactaaccccatgctctatcctaaggtacccctcttcatgcagagcgacacagaaaaacaaatttgtagcacaaagtacacccgatttgctacagcttacaactagcctcatgaatccttttctcattaattcaaagtttgcaaaaaaaagaaatcacatacttaaatcacttgagcacagaagcatatcaaaatctaatataaacaaacaaaaaacccaacttattttaacatgccactgaaactgggctcaagttttcaaacatcttatgaaatattacactctccagcaggcttttttttttttcctaactggagatgaatggcagagttctgatatggaaaagcactccatgtttgtacagaaaggtagcataggaaaagtggtcaaattcaaccagtctgtcctcatcaaacaggcaactactgtcttctcagcatttccaaaagaaatcatatgcctgctactgtttatgtcatatgcctgttaatttttcatgctaattcttagtgtttctggaaaacctcactgtttggcaccaaaaattattattgctattgttgttgttttgttaattatgtcagccaagcagatgacggtgaattaattctgcaacgttgagtactcagttggcatacaagcacccagccttccaaagggatgtccttcatgtttcactgattttcgaatgacagtcagcttgcctaaacttatcctttacatttaagacatttggtgggttcctgtatgcccaggggatttttattatttgtttatgcaaacagcaggttgcataagagccttgctggcttttttttttttttttttagagatttcgtagtttcctgataaccattcagtcatctatttcaacaccctgacatgacataaaggcaggcacggaaccacacgttcaccatacagacacacgccactttgctggagcattcactaggcgaggcgctccatcggactcactagctgcactcatgaatcggcaccatctgcaggatcactttctggaaatagacaagaagaactgctgtgtgttccgagatgacttcattgccaaggtgttgccgccggtgttggggctggagtttatctttgggcttctgggcaatggccttgccctgtggattttctgtttccacctcaagtcctggaaatccagccggattttcctgttcaacctggcagtagctgactttctactgatcatctgcctgccgttcgtgatggactactatgtgcggcgttcagactggaagtttggggacatcccttgccggctggtgctcttcatgtttgccatgaaccgccagggcagcatcatattcctcacggtggtggcggtagacaggtatttccgggtggtccatccccaccacgccctgaacaagatctccaattggacagcagccatcatctcttgccttctgtggggcatcactgttggcctaacagtccacctcctgaagaagaagttgctgatccagaatggcactgcaaatgtgtgcatcagcttcagcatctgccataccttccggtggcacgaagctatgttcctcctggagttcttcctgcccctgggcatcatcctgttctgctcagccagaattatctggagcctgcggcagagacaaatggaccggcatgccaagatcaagagagccatcaccttcatcatggtggtggccatcgtctttgtcatctgcttccttcccagcgtggttgtgcggatccacatcttctggctcctgcacacttcgggcacgcagaattgtgaagtgtaccgctcggtggacctggcgttctttatcactctcagcttcacctacatgaacagcatgctggaccccgtggtgtactacttctccagcccatcctttcccaacttcttctccactttgatcaaccgctgcctccagaggaagataacaggtgagcc

SEQ ID NO: 5698 - DNA, 6000 bp, Homo sapiens
ttctgcccggcctactttgacttttactctgttaggttttccagaatgctgactcttctgccccttgaaccagggactccaaagaataagattcatgggggcgggggcaaggagttaatgtattctgtctgtggccagccatcttccctggtacatcttcttttctcagttcaaactgaggaacgggttagttggaactggagtctttctcttcccctattttcctctgaaagagttcattgtaaaagtttttttacccattagctgggtgagaatgccagataaatggcagaacaagttaaaaatgagattgttccctcaacttcatgtgaaaggtggagtacttggctagatactctgtttattgtgtaatggattgaaccttgaaaaataaaaccccataagaatagcatatgtcatattttgaccgcttaaaagccctgggaagagaggccgggtgtggtggctcatgtttgtaatcctagaactttgggaggccaaggaaggaggattgcttgagcccaggagttcgagaccagcctgggcaacatggtgaaaccccatctttactaaaaatattaatagaaaaattagctgggcatggtggtgcgcacctgtagtcccagctacttgggaggctaaggtgggcagatctcttgaaccgggaggtcaaggctgtagtgagccaagattgtgctactgcactccagcctgggcaacagtgtgagaccctgtctcaaaaaaaaaaaaaaaaaaaaaatagaaaccctgggaagagaatatagctactatacaacaggaaagtagtatagtaaaagggccagacaaaagcataagcttggcttaggagtatttaataaatgtaacttattcaggactgcttggaagaaccataatacctgctacaggattgtggaagaaacctaaacatcagaatcctgtggatgagagtaggaatgaacatttattgaatattcattatatgccaggtcctctgctagttctcacccgctatgcttggagttggctattcattaactgagggccttctttgttccaggcattctgctaggtgctgggaatcaagaacaagaccactggtccctaccctcatgaagtttaaagataaataagttatatctagaccaggtgttgtggcttacgcctgtaatcccagcactttgggaggctgaggtgggtggatcacttgaggtcaggagtttgagaccagtctggccaacacggtgaaactctgactctattaaaaatataaaaattggctgggtgccgtgactcatgcctgtaatcccagcactttggaaggccggggtgggtggatcacctgaggtcaagagttcaaggtcagcctggtcaacatggtaaaatcctgtctctactaaaaatacaaaaattaactggtcgtggtggtgcgcacctatattcccagctacacgggaagcttaggcagcagaatcgcttgcatcagggagtcggaggttgcagtgagcagagacctgccattgcactccagcctgggcgacaagagcaaaactctgtctccaaaaaaaaaaaaaaaaaaaaaatacctgggcgtggtggcaggcgcctgtagtcccagctactcgggaagctgaagcaggagaatcacttgaactgggagacagaggttgcaatgagccgagatggtgccgctgcattccagcctagacgtcggagtgagactccatcccagggggaagaaaaaaagttatatccatatggtgtgatgaagtgaaagagacatcgtcccctttcctacacatgaggaagctgaaggccggagagatggaataatttgcccaaagcttcctgttattatgccattagacagttattttagttttgtgttcattactacagtagaccccgatttaagagtctggtcatcagatacagtttcctctcttaggttagtacttagttaggctcacctcactttttttttttttttaaggtatcacctgattttgatacagcagcaggaagcttgttcccagcctaccagaaacaccaaaaccgggcgagacactcaagtcgaaaacctaccacctccaagtttccacatctaacttttgagagtccgcaatcttccagttcagagacattggggatccccttaatccgagagtgccccagtgaatcagaaaaggatgtttccagaagacccttagttccagtgctcagtccccaaagctgtgggaacatgtcagtgcaggcacttcagagcttaccttatgtgttcattccacctgatatccagaccccagagtcatcgtctgtgaaggaagaactcattccccaagatcagaaggaaaacagccttctaagctgcactcttcacactggcactcctaatagcccagagcctggacctgttctggttaaagacacccccgaggacaagtatggaataaaggtcacatggaggagacgacagcacctgcttgcttacctcagggagagagggaagctgagcagaagccaattccttgtgaaaagctgactgccatcagtaatctcaatagaaaagagatatgttttctggagtcataaaggaattcaattcctagggtttttgtttttgtttttgagatgtaatattgctctgttgcccaggctggagtgcagtggtatgatctcaccttactgcaaccaccacttcctgggttcaagcgattctcctgcctcagcctccccagtagctgggattacaggcaccagccaccatgcctggctaatttttttgtatttttagtagagatgtggtttctccatgttggccaggctggtctcaaaatcctgacctcaagtcatctgctggccttgacctcacaaagtgctggcccagccgagatttgttttctaagatactttgtgtcatgaacagttcagtttagtgtcatgaactattcacttcatatttttcttgtattaactgtttaaatttttaaaatatcttgtagtaactctttaaaatgtatgtaagtaaatggctgcagaaagtttttttagagaatcctgcttccatcagtaatacagcaatattaccccatccactaatggtctttgtttccttaaccactactcattaatccttaatcacctcattcaaactaattcattctgcatttttgagtaccaactcttgtcaggctcagtggcagcttctacgacctgatggatggaaaaaaatcaaactctgtgactctatggttgactgccacctctgcaaccttgactcatctgctgaaaaggcaagaagaagaaagggcagcaagccctgttttagggactacataagatgaggggagataagggggacatagatgagttctttaggattgcgtgtgttttgagtttttgtttctaactgaagaaatctgtcaatattaaatagggtgggaaaatggtttcttagaataactgttcaactgtgtgtaaataaggaaagttttcaatgagtattacttattgtaattaatgcagaaggacttccccagtcaaccgaatgtctcggccttttactcagacaagtagcatctcattaaacccattcatttagcattcattcagctggacctactgtgtcaggtccagccccaactagatcaagcagggattactgtatattttacagatgggagtttgatgcagagaatgaaccatgcacaggtcacacagtgagtgcacgctgacccaggcagtgtaacggtccactctcagcgtgtgcctcctaaagtactaacttgtaggttcaaaaccaatgtggaaacaactttgaccttagaacgccataaagccatttgtgcagtgacttgtcaggactcaggatgttttgtagggactataatgtgcatgtcggtagggagaaagggactgacatttggggacgggatttattggagacaagagtacacatttagacaggggctctcacggtgggctatggatgtttgaggaaggcccacaggaggtagaaaggtagatggaaagagtctccaggacgggcccacgcctgtaatcccagcactttcggaggctgaggcgggtggatcatttgaggtcgggagttaagaggccagtctggccaacatggtgaaaccctatctctactaaaaatacgaaaaatagccaggcagtagtggcccctgcctgtaatcccagctactccacaggctgaggcaggagaatcgcttgagcctgggaggcggaggttgcggtgagctgagaccgggccactgcactgcagtctgggcgagagagaaaccctgtctcaaaaaattaaagtctctggattccctcgtgtgctttaggggagtctgtagagcaggtctaggaatgacctaaaagcttgggctggagtaggggaagcttaagttctgtgcagttgaagttcaaggccagcctatggaagatgcgtttcactgggagtgactgatggagtggagagggtaccagagggggtccacgaaggccgctggtatcagggcaggggccagaatgggaagcggcagaggtctgtacatcctcacagggcagacctcgggaagcgctctgggtgggctcggtaaaaatggcgggggtgcgaggagccgttgcgtgcgtggcggttggtgcggtataggagactcctctgaccggactcgcctgctggccgcgcggcgggcgaggcccaggcaaaaacaaagtcttcccgctcagtaccggccccgcgaggcgctccagaggaccaagccttagctcgcgtcaccccacccccgcgcaggcgcgtttaactcccgctcgcctcccgccccttagcaaccctcccgcatcgttgggccccggcaatagccaatgagacaggagccacgagaacacggaccaatcggcggcggcgacagtgtggaacgcggttgccaggaggcgggacgcggcggcgtgccagcctagccactctagcgacggcggggaagagtgtgtacgtggtgggggcttcctcggtggcgggcatggaggcttcgcgctgccggctcagtcccagcggcgacaggtcagacagggccgtggcaggtctcctcctgagcgaggcggaggggcgaagcgagaaggcggaggtcctctccgggagccctgcggggagagggcgggactcgggacttggcgactcagggagggactggtttcggcggcgggaggcgaccccctcgccctactcccgtgtggggacccctttctcaagtggagcggcggcactacatcccgcgccgtgggcagagacctttggttcaggtccctgcttaggaacttctggagttttcgtgacgggctccctcggcccctctgggcctcgggtttccctcgggggagaggcgctggccccgctcagctcccactgcccggcggtgtcacagccgagaggggacccagcccctcccgggaggcggtgcgggtgatgtttagtagcttgttctgacgccgctgcttcggacgggtaaagctgaattctggagcagagtccgaggagcggaaacgcgaaacttctttttcctctctgctttccagtgtttgtccctgattcgggatggtctgactgatttgccagtgggccacaccccttgtttgtgcgcctctttctctgccagagggagagcctcggaaaaaaaaggatccaaaatctcagcgtgtcactttcttgttcgctaggttaatgagaagttaatgggaagccgtttgaaatcattggttagaaactttggcgtcatctgaggatttaagccctacacgccaactgtataccccgctttttattccattaccaagacaaagatttggggccaggcgccttggaacacgtctattatccccagcactttgggaggccaaggcaggaggatcgcttggtctcaggagttcgagaccagcctggacaagatagcgagacccccatctctagaaaaaaataaaataaaataaaatcaa

SEQ ID NO: 5699 - DNA, 6000 bp, Homo sapiens
tacatgtatgcctgcctttagtactatctgggtgcaggttgttaagtcacttgcccagagacacacagctgctaagcagtggagctgggattcaaatccaataccactggaccccaaacgctgtttttcctcgtaggactgcatgaaaacctgctctaaaaggctaaaagaaggtcacccatatagagtatcattttaattgttctactgaatctcaggcctttgatctcagcctctcgttcctctgcagccactcagctccagaaaaatttgacctgtgaggtgtggggacccacctcccctaagctgatgctgagtttgaaactggagaacaaggaggcaaaggtctcgaagcgggagaaggcggtgtgggtgctgaaccctgaggcggggatgtggcagtgtctgctgagtgactcgggacaggtcctgctggaatccaacatcaagggtaaggacccaggttccaaggcctctgcctcctgggctgcgggaccttcctgtggttggcagagaccacccagagtcccggcctcccaatgcctgagttggggggttatgggtatggtgtcctctgtggtcccagggtgctttggaggccccaaaaggaggcatagaagtgatgaagtgaggtgggttgtggtcctgggctctaggctgccagttgtaattctacaagttcccactccctcaggtctacagcctagggatggggtccacctgaccgagagcccccctccctggctcctggcttttctccaaatccagacgcacttacacacacactcacacacatacactctcacacacatgcacacactcccatacactctcacacacgcacacacatcactcacacactcgcacacactcatacacacactacacacacatccacactcacacccacactctcaccccatgtactcacacccatgcactcacacactgtcacacactcatacacacacatgtactcacacatgcatgcacacacacacttacacattcacgcacatactctcacccacacactgtcgtacacgtacactcacacacttatacactcacatccgcacacgcattattcacacatgtgcacacacgcgcgcgcacatgcatgcagtcacgcacacacattcatacacgcacacaggcacacattcacacacatgcacacacgcacacacattcacacatggactcacacgcgcacacgcgcgcacacacacacattcacaccattcacacacgcacacacatgcacacactcacacatgcacacacacatgcactcacacacacagcccaggagccagaccacagcttctctctctccagagtgccctggatatggatatgcccaaacataaaaccgattccccagcactggcggcctttgagagcccccaggcacccctcccctctcccccaaccccagggtcaaaccagagactggccaggagggattgcagggcagtcctcagtcccctggcccgtggaggagggcggtgcattgagcacatttctctcccttgcagttctgcccacatggtccaccccggtgcagccaatggccctgattgtgctggggggcgtcgccggcctcctgcttttcattgggctaggcatcttcttctgtgtcaggtgccggcaccgaagggtgagtaaccccacacctggtccccacaaggccctcaaacccctgagtcctctaccaggagatcctgtatatgggaactgattttggcccagctccctctgcccactcgtaagttcccttgctgccctgtcccagatcccactcaagggagagacaggaaggagcagagagttaattccaggatagatggcctgggccatgtaactgcttctcctgtcgcagcttcccccactccccccaccaaggggcacctcccttctggaggcctgggaccctcgtgactccctttcttgtccctggacagcgccaagcagagcggatgtctcagatcaagagactcctcagtgagaagaagacctgccagtgtcctcagtaaggatctgggaggaggggttgagagaggggaaagggggagggggagggagttagagaggagggggaggaaggggagcaaaggggggcaggaagggaggatggagaggaggaaggagttgaggaggaagagctgggaggggtggaggtgaggagatgggggctaaaggggtgtggtggagaggatagaggggtgggaaaagatggccaggagctagaaggaggcagaagtgggaggatggagctgaaggagcagcaggccaggaaaggccctgctggaaagccactggagctgtgctgcgctggaaaggccattggaggtgctagaacgcaaaggggttgcagtggggacagacctgctccccttcttctttgttcctgcagccggtttcagaagacatgtagccccatttgaggcacgaggccaggcagatcccacttgcagcctccccaggtgtctgccccgcgtttcctgcctgcggaccagatgaatgtagcagatccccagcctctggcctcctgttcgcctcctctacaatttgccattgtttctcctgggttaggccccggcttcactggttgagtgttgctctctagtttccagaggcttaatcacaccgtcctccacgccatttccttttccttcaagcctagcccttctctcattatttctctctgaccctctccccactgctcatttggatcccaggggagtgttcagggccagccctggctggcatggagggtgaggctgggtgtctggaagcatggagcatgggactgttcttttacaagacaggaccctgggaccacagagggcaggaacttgcacaaaatcacacagccaagccagtcaaggatggatgcagatccagaggtttctggcagccagtacctcctgccccatgctgcccgcttctcaccctatgtgggtgggaccacagactcacatcctgaccttgcacaaacagcccctctggacacagccccatgtacacggcctcaagggatgtctcacatcctctgtctatttgagacttagaaaaatcctacaaggctggcagtgacagaactaagatgatcatctccagtttatagaccagaaccagagctcagagaggctagatgattgattaccaagtgccggactagcaagtgctggagtcgggactaacccaggtcccttgtcccaagttccactgctgcctcttgaatgcagggacaaatgccacacggctctcaccagtggctagtggtgggtactcaatgtgtacttttgggttcacagaagcacagcacccatgggaagggtccatctcagagaatttacgagcagggatgaaggcctccctgtctaaaatccctccttcatcccccgctggtggcagaatctgttaccagaggacaaagcctttggctcttctaatcagagcgcaagctgggagcacaggcactgcaggagagaatgcccagtgaccagtcactgaccctgtgcagaacctcctggaagcgagctttgctgggagagggggtagctagcctgagagggaaccctctaagggacctcaaaggtgattgtgccaggctctgcgcctgccccacaccctcccttaccctcctccagaccattcaggacacagggaaatcagggttacaaatcttcttgatccacttctctcaggatcccctctcttcctacccttcctcaccacttccctcagtcccaactccttttccctatttccttctcctcctgtctttaaagcctgcctcttccaggaagacccccctattgctgctggggctccccatttgcttactttgcatttgtgcccactctccacccctgctcccctgagctgaaataaaaatacaataaacttactataaagatgctcttcgtgtgtgtgtgtgtgtgtgtgtgtgtgtgtgtgtgtgtgtgagagagagagagagagagagaccccttctctggggaccaggaatcttctggtctttggggtcggacccagaggagaggttgctgggcgtgccccaggaaggagatgaagtttccctggagagggaaaaattctgtggaggctggctacccacctccacaacccacagggctctgtgtgggcctgtgtgtgtgtgaggctgagactctgtaattacatgtgtgtgatataccgtgggggagagactcagggttgtgtgagctctcctggtgtatgtgtgtggcagagaaaaaggactatgagaaactgtaacatgtgtgtgcaaattgtatccccaacatatgtgtttgtgttccaggaggaggaggcagagtgtgtgtgtctgtgtgcatgcatgcgcccacatccttttagcttgtgcacaaccacccccaactccacaagcagccccagtgtgcaccacaagccccctcactcccaaacccaaggcccagccctcacacagatacacacagtgacacacgcttcctcctccccgaacagctagctcctcagtccccaacaacaccagctgcctcttggagcttgtgttcgtgttgaaaacgggaaggggtgggggcaggacatgaaccatttcaccaatgaagccggttcccagccatcctcctcaccgccctccctctcagcgccttccttgcccctcctccccgagtcaccaccgtccagttccccaccctgcactcgtttcccgcccccccccgccccccacaaagctgtcctgccttccctctggcctgggctcactggcaggacgaccccgggagagagggtcctggagagtgagaggggcagagaccgagtgagccgtgggctgagcctgggaggccgggactgagggggaggagggaggcccgggggaagggagggagggagagagggaaggagggaggagggcgggcgagctggagccggcaggcagcgggagcccgagagagccgcgtcgggagtgcggtctccatggcagtgctgggcgcagccggagagaggtaagacgacccctgcctgccccgtcccctgtgttgcctccctttccccctcaagctgcctcctctcccctaggccggcccctcctccccagccacctgctgtttctgccctggagaacctggagggggacaggagggaggagccgcctgaccttaccccttcaccccaaagggcgagggaccccgtcggccagggaacctcccagatcccccttcccaccttcctctgatctctccctgtccttcacctccctctctctgtccttcacatctttcctgcctccttccctctctgactccctatctctttcatcctgagcccaccagctgggcctgggtggaggtgggtgggaaggggtccagggctgtaggagaggacactgggggctgctcttggccaagtccctccacctccctctggctggccattgccatggcaactagggtgtactgggctccggagggaagccaagggtgggggtggaccaggacctcttggggaaagcaagggtctgagctgcttccatgggaaacagaccctttcactgctgtgccccatttttaccccacttaccctaaagccattatgtgcttccttacagccccactctgttcagggtttcacccgattcccttaccccccttcccagggctcactgaagctcagcatcacgcactaaaactgggaccatccttcctcccatgagagggaaactgaggctctgggccagggaggaagagtcaaggtctccccacggggagtcagcaccttattgaacatttggcttttcttctcagcctcctattccctgctccctccctccctccctcctccagtccctcctccctccaaagcctcctctccagggggtttgagcttttcctgctattttcagatactaccactttgccccctctttctcttctgctcaaactctcctccttctccctagttccccctctttccatttctggatgc

SEQ ID NO: 5700 - DNA, 6000 bp, Homo sapiens
caggcgaatggcttgagcccaggagttccaggccagcctgagcaacgtggtaaaaccccgtctctacaaaaatacaaaaaattagctgggcctatgcgcctatatgttcccacctacttgggaggctgaggtgggaggacctctggagcctgggaggtggagattgcagtgagctatgatggcgccactgcactccagcctgggcgatagagcaagaccccgtctcaaaaacaaaaaatgaaaaaaaaaaaaaaccccaggttagacggcttgggtgactaggtgtctctcagaagtgagatttgtatgcaggcgtaactagatagtggtgcttaaacaaattcaaaaagtagacaaaaaacgggtgtcagaaaagcgaataattccagtgtagacatccagatattaggagacccccaggtagtgagagtggtcgcggaggtggctgggtagttgtgactcagtatcaaggagtgggggagccacggagtccacagtttctccgagagcatgtcaggtgggaagaggtcagagagggatagcccgctgatgctgtctccctaccgccagtctggcctaactgtggaacttcctcttagggtcctgtttccagagggactcctctattcttggctcatcggggattaatgatcaagcccttcctgcctagttcccagctctgccccacttttccagctgtccctaccctctcagaggcccccttactgctgtaggaagctctcccgagttctctccacagtccccttagtaagcgggattccagcccgtaccagagagggacaatcggacagccgtggcggtgggcactctctgggaaagagcagcagctcaggaagacgagccacaacagaactgtgggagcatctagcttcttctggagagcgggagggccggagggagggtcttgcagccctgcagacagtgaggggctgggggagtgactccacggtaaactccttcctatttaggatgcagctggggctggagccaggtctggctatcgtggtcgccgctcccctcacaccccccatgaacgcttcgaggggctcacggtgcttaaggctgcgcaggtgagcacaggaggcacccgggcccgtctgatgcccagacctggaggagaggctgtgcaggaagccgggccccagggcctgggcttttgtgaaggagctttcttgggaccgagactacctgataggacccagcgtggagaaaagggatgttctgagagctggggccggggttgttgtcatggagagagaaggagcagtttgggctgatggacagagctggatgctgacagactccaaacccatgggtggagagcggcagagttgggcaggggctagggccgagaccaccctccccttgccttcctccttttctgccctgcctttcactgcctgcagctggcccgggctgggacagtgggcagtcagggtgctaagctgcttctggaggtgagcgagcgggtgcggaccttgacccaggcctacttctccccggaacggcccctgcatctgtccttcacccacctggtgtgccgcagcgccatagaaggtacgacagggaccccccactgctcttctccaacctcaggccctgcccccaggacactgcccccaagagccccggggtggacgtgcacggcctgagcccacagggtggcagatgggcacaggggcacagaggtacccccagacccctttgtgtcctaggagagcaagagcagcgcatggacctgagtcacccagtgcacgcagacaactgcgtcctggaccctgacacgggagagtgctggcgggagcccccagcctacacctatcgggactacaggtgggcagcccctctagtggtcaggcaggtgggcagacaaaggtcatcccactgccggcctgggcctgggttggggtctcactgcctcttgcttttttccctccccagcggactcctctacctcaacgatgacttccagggtggggacctgttcttcacggagcccaacgccctcactgtcacggtgcgtggagtggggggtgtgacggtgtgacaaagggcccagctgtggggtcaggattcaaaacagaaggctccagaggcaaatgcagggaaatggccagggcttttaaccctttcacttccccgcctccgcagccctcccgctgcttcctccgtagcaaggtctctaagtggccgaatcaaccctaccatcagtatttgtctcgcctcctaaagaagggtgaatgaagcacagcttgcaggtgcctccaggactccatggccctattctagggatttggggaacttgaaatagtccttcctctttgcagcgaggtgagcacagtggctggcgcacagataccagggccgccttgactggggctcggattctgaacctttctgaggtttagtttcctagactggggtgataataatagtacgtattttaaagggtcattgtaggaagtaatttaggtaatgtacctaaaagaatgaggcagcgcctggtaatgataagcaattaatgaatgttaggtgggaaatttccggacaccaggggctaggattgggtaggaggagaggggcagtgattgttcatctgggtgtggggtgtgaaaatggttccaatatctgtatccccttctgcatagagtctggtactgcatgcacagccccagattgcttcaagccctggattcaaagggctgagtgggaaaaatcagggtaccaggggtcaggaaccaacaggagaccatccgtggagacccctttttcctttggttcccaactcctcttgcatttttgctctgcaagttgaagctgatttctcatttgccccaagctagtccctgaattaaggagtaggaagtggtagcgagagagctgatcctctctgtgcccctgtccccatcctgctctagggagtgagggccaagttctctgagagagccaatccctggagctgaacctgccctcatccctccaggctcgggtgcgtcctcgctgtgggcgccttgtggccttcagctccggtgtcgagaatccccatggggtgtgggccgtgactcggggacggcgctgtgccctggcactgtggcacacgtgggcacctgagcacagggagcaggtaaggagcggggtaggaagggatgtggttctcctggtgcgtgaagggtgggcaaggagcccccgagaaggctcacagtcggtgagggtcaggggctgagctgacccagggaaggtgggtgcagggaatgggccacactctcctccccaaccccaggagtggatagaagccaaagaactgctgcaggagtcacaggaggaggaggaagaggaagaggaagaaatgcccagcaaagacccttccccagagccccctagccgcaggcaccagagggtccaagacaagactggaagggcacctcgggttcgggaggagctgtgagtggctgagccagctccttgaggatgtggccacttgacttgtggaaggccatcttgatgccaggacacacaggaagcccctgtgtgacatcaggagcagaacagcaagctctctgtccctgcacccccaccatcttggggacctacaagggcctggactcagaggacagtgcacaggctagcctggagctcaccaggcctggggagctgggacggggccccgctgccggacctgcagccctggacagatggggaacactgtgcctccctgaacagaaatggcaggggaggaggctgatgctttaaatgaagaggatggtggggttgggaggtataaccctgctcctctctcccagtctgtgcaataaaggtcgtgaagatctctcagccaggggccagtcaagtgtatcacagattctgtgatggctggaggtgggggtggctctggctggcctgggaggagacaggtgtctttgggcctcccagaggcggggcgcctggagcctgtgatttgtcagggaaatctcagccacctgctcccctcatgcaaatgacccaagcccctggcagctgctccttaggcctccaagtgtaagccctgtcttccctctctgagctttgctgagacttagggccgcctgctttctctctgacccctgctttcacagcctcgagagggcaaggagggggccagaccccagcctgggagcagcgtgcgggccttccctccacttgaaatccgttgcccgcccacaataggggcagacctgtccatccttctctgtgggtcccctgtacctttctcccccaacaggatcagacccagaggcagctggttggggtttgtcgagaagaaggattatccagatcagtcctttctaatctcagctcctgcctgtaccctcccatactcaccaaaccctcttccccaccaccctgagctgaggagcacagtttgaggtactgacaatggggccatctatcacccttatatcccacctcctggcctggttgctaagtggccctgactgccaagatcatcaccatggatgggggccgggaccaggggggccactggagctgtagttgtctgctcctttgcacccctcccaaaccccaacccttaatcctcacagctttgctctaatcctgtggggcctgatgctcttatctctgcctgcagagactgaccagggaagcaccccttcaccccctcctctctcagggcttgtggtgggggctgcccctctctatggccccacactcctgcccccaaccctcctcccggctgggcccaagtctctctggaatccgtacacctccctccctccccccaccccttccccccacccctgccagctgatttcatttgcctgacgttgtggttggctctacccttccctgtcaggcccccccaaccccccgccggtcggggccaggccaggccaggccagctcctctggcagcagagcctgggcaggtgacgggcgggcgcgggcgtcgcagctgagggagtaaggaggctcccaggaaccggagctggaaacccggccgaggtccagccagagcccaagtaagagggagctggcctgggctctgctctcctgggctggggcgcaggcagggctcaggcaggctggggctggacgcaaaggacctcaaacttggagggcctagctggggagagggtgcagccacccagtcgtttccctgtgtcttggagtctggtgtgggcacgaagggcagaagcacagcctggtggggggttcctcaacaccgaccccatgttcctggcaggagccagagtgacccctcgacctgtcagccatgggggagatggagcaactgcgtcaggaagcggagcagctcaagaagcagattgcagtaactccagagccctacccctggggccccagaaaacagctggggacatgaggagcgtggcccagggggagggggctgggtttgctcttgagtgactagaagtgaccagggactttctaaacttggttcgcatatttgagacccccaagccccagagccccaagaccaacctgccctgaaggcccatgcacctgccacccccacctcgcccttgctcccctgatgtctgctttccctgcaggatgccaggaaagcctgtgctgacgttactctggcagaggtaagaccccctgtcccccggaaggcagggcatggggggaggggaagggagctccccgacccgcaatagcgcgttgctccgagcattagtacagcacgtccttggagtgaggaaacccattaattaattcattcgaccaacattttagcgggacctgctctgagccaggcaccatattggatgcgaaagatgcggacacggttcctattctcatccgtagaacaagagtgaccacagccccctcccagggccttgaagatgaagaagcgatagtactttgtaaattataaagcccttgtagactctagctgctagttttctatgctgtattttgtcaattctaagatgcacatttcttcacattttgacat

SEQ ID NO: 5701 - DNA, 6000 bp, Homo sapiens
ttctgtgcattctgccccctctgcatgaaatgcccttcctgatccttgcccctcttctcttctccatctgaaaagccttaactcatcctttaagcctccctgcctcagtagtgcctactctgaattccggggtgagtattgactgcagctttttgtgcctgaccgtggtccttgtgcattttttctggtgtgacacctcacacaatgcattgttttttttttttggtttttttttgtttttgtttttttgagatggagtcttgctttgtcgcccaggctggagtgcagtggcacgatctcagctcactgcaagctccgcctcccgggttcacgccattctcctgcctcagcctcctgagtagcagctgagactacaagcgcccttgaccacgcctggctaattttttgtatttttattagagatggtgtttcaccgtggtaaccaggatggtctcgatctcctgacctcgtgatccgcctgcctcggcctcccaaagtgctgggattacaggcatgagccaccgcgcctggcccacaatgcattgtttttgtttgattactgcccatctctccaccagactgagctgcttcttctttttttttttttgagatggagtttcactcttattgaccgggctggagggtaatggcacgatcttggctcactgcaacctctgcctcccaggttcaagtgattctcctgcctcagcctcccaagtagctgggattacaggcatgcaccaccacacctagctaatttttttgtatttttagtagagacgacgtttcactatgttggtcaggctggttttgaactcctgacctcaggtgatccacctgcctccgcctcccaaagtgctgggattacaggtgtgagccaccgtgcccggcccacactgagcttcttaaatgcagttttcttttgattctccagcagagttacatagaagaccatttatagttgctaaatgactcactcaataaacggacattcccttcagaggataaagatcgagtatggtctttctcgtacttctgttgtattccctacaatgcatggtgcttaggtggctctcaaatgcttccagtgattgaatggaagaaccactattagcaggaacctggcaggagctgtggttcaccgacactagcagctccaataaagtaataacctaaggaaatggaattcctctccgccttcctccaaccaactcaggtacttcttatatgagatttaattgaggtcagggaagggaacaagtagcaccttccatcctgccagtaaaaaagcaaagggagagaaaggggaagccccaggcctgaggtcctgcagccgggaattccaaggcggcattaggaagggggtcaggatcagggcactggcagagccgtctcttttcttgcttccttcctgcaatcaagagtggggatctcggtggtgatggttggtggacatcagaagggaaggggtcagcagggactgagttctgggacttcctgaatgaggcagacccaggcccgtgatcttgggccataggccccctaacccctgcccacacgttgctggccttgcagctgaatgaaggtcctctacaccatcagatcagcctctctttttgggggaacatggcgcccttattgtggggctctctcttctcctctcctcatttccagtctggtgagctttcttctgtgttgctcaacaaagctacccatcactttcaaccgggtgacactctaaggatgataactagagttgggagtgaaacatgggtctccagacccccgtcctactgtttctttcatttattcccaagaaccctcaaccttggtctgcagaccattttaataggatgagagacctaggaagtgaatgattccatctactggtcctgtccttcttctcctctggggcatctcaaaatcactcagataccccagaatcactcagctattccacctgccctagtcctccctgtcttcttccagagagccagcccccagggacacaggtgcagggccgggactgggagaggcaagcaaggggactagagctcaggatttaaaggggcactcactcttaaagttgtggagtgcctccttgaaatctgtgctctggttgcctcattggcctcatctagtcctggctttgtgcaggcaggtgtctccataaagggataggaggagaccaagaggttaagaggagagtagaaaagagagtactaagaggacaaggtgggacatccaaagtcaatggcactactcaggaggctgaggcaggaggatggcttgagcccaggagttggaggctgtagtgagctatggtggcctgtgaatagccattgcactccagcctgggcaacatagtgaaacactgtctctaagaataacaacaacaacaaacaaagccaatagcaaagtgaagagcaatgactgaagacaggttcagaacaagcatccccacacatgctctctgtctcacacaccctggacctgccagacagataccatccagagaacagtgaacaaaggaaagatcaaatacactcatcacattctcattaggaggacctaatgggaatgtggtcctggggagggggtgtagagatagggtaggatccccaaaaccacatcatctttgttctttcaccatcctcagacttgacgtcttttgctcgatgtcatgaaactcaccctagacatggtgattcagactccgtgctggaagagccaccagggacaactagtcctcactatccagtgtggtagccacaagccacacacactttttgagcaatggaaatgtggctggtccacactgacaggtgctttaaatataaaagacacactgggtttttgaggatatagttggaaaccaaagaagtaaaatagccccttaatatttttaaaaatattgattacatgttgaaatgatcatatttgggatcatatttgggtaaaaaatatacagtgttattaaaattaattttcctgtttctttgtacttcttttaatgtggctagaaatttaacatgacatatgtgggccaggtgtggtggctcccacctgtaatcctagcactttggaaggccaaggctggaggatggcatgaacccaggagtttgagaccagcatgtgcaacacagcgagaccttgtctctataaataataaaaagaattacttgggaggctgaggcgggaagactgcttgagcctgggaggtaaaggcttacagtgagccatgatggtatcactgcaccccagcctgggtgacaaagtgagagtgtctcaaacaagaaacaaacaaaaaaattagccaggtgtggtaatgcacacatgtggtcctgggtgcttgggaggctgaggtggaaggatagcttgagcctgggtgattgaggctgcagtgagccgattgtgccattgtactccagcctgggtgacggcgagaccttgtctaaaaaagaaaaaacacacaaaaaataaaaaacaaatgtggcttatgtttgtggcttgaattatagttctattgtacaatggtagtctagttcaacttcttgaacagacgagaacgctggggtccggagagaagccctgacttagcggatggcacacactataaagcactgtcatttgcagtcccaccagtctctcagtacccacccccactctgccacacacacccctgggagtcttaggtgtgaaatgggtggactcacagacccctgggctgcatacctcaaagtgttccaacactcaaggcactgcctgtggttttttgggagtgaaataaaaacctaacaatggtggggtcacagtctccagtaggtcacattttaaaagcactttaggctctggagacttggggtgtggggagaagtgaagagaaagctggggagccctgggccttcccccatttcttcatatgcagaataatccagattagtttaccaagcgcgctgataaccactttaaaaacagagtccctcctgcctccccgtggcatggggtagaacctggcttgagccccgacacaggcgggcagccactccaggatcgttccacacgtaaacaaagacgagtttcggtccgattggcttgatcctggaagaggagtgggcagtggagggaggggaaaccaggcaccaaagcaaattccttcatttcataatttcatctggcgcccccgttcaatcagcctgcattgtcgaggctttaggagaggcagttaggaaaggagagatactgatctctcagccccagggcagcactaatggtgcctgtctagactctgacaggtggagctgctgagctaactacggacctggtgggggaagttttccttggctttcacgtggctttggctggggagccctgagaaggtggctgcctcctttttctgaagcctggcttcccatacggcagtggctgggggagagtgatggagagaaaggctaagctaaggtcaaagaaagtggaggaaggctggcttgtcccgctggacttgacggcggagctgctgcaatctcgcgggctgggcccttgccccgggtggacccgagtgcctgcggggaggcgggtgtggctcccccgggaggtgacagctggcggggcccgtaaggagctggtctgctccggctcccctctcgtagccggcgccctgggaccagcgcgtgagcacgtctcggaggagtccgatgcgctgggcagggccgggtggtcacccccgcccagcttccaggggtgactgtgcctctgacgtcagacggtttttgggtcattccctggcacggggactttattttcataacagcatgaagtgccgtggaactggaataggcgtgtcctctccctcgaccctccccctccttgtccctctgctcacccctcgctcgttccctccctccggcgagggccgcctttataacaactgctcagagtgcgagggcgggatagctgtccaaggtctcccccagcactgaggagctcgcctgctgccctcttgcgcgcgggaagcagcaccaagttcacggccaacgccttggcactagggtaagtgaggcgccaggagcccagagcgctggggcctccggatttaaatcgtctggggagagcggggcgttgggaggggtgggatagaagaggagagaaatcctggtaatggaatacagttggctatgagaaaaaaattccctaggaaacagttcctctagtttaacaactcagatttttttttttttttttcccctttgcgggtttcctaggctaagatagaggcagagagcaaagagataatcagggtaatagtttctgctcggacacattctacaaactttgagtagatggaatccggccaggcaggaggtgagcagctctgggatcactctgcaggaaaagaatagagggagaaagatctcagaggacccgaaggtactgggagtggagggggagtgggaaacaaggggcaggggcaggagggaggacacggtgacagctactattttacccagatgctgcaaaaagcccttctgagttttgggaattagatctagaagcccatcccttttctcttgatgtgtgggcggtcagttccactctggtgtgccttgagttgctcagaaacctgggacagatgaaagttgaatgtgcgctgagagtgcaccttccactaccgactttatggataggatttgggaatagcatagatgctgttccatctggtcccttaaacatccatggggaaggctggcaaatagctttattttattttttgagatggagtttcactcttgttgcccaggctggagtacaatgttgcgatctcagctcaccgcgacctccacctcccgggttcaagcgattctcctgcctcagactcccgagtagctgggattacaggcatgcaccaccactcctggttaattttgtatttttagtagagacggggtttccccatgttggtcaggttggtctcaaactcccgacctaaggtgatctgcccgc

SEQ ID NO: 5702 - DNA, 6000 bp, Homo sapiens
ggggcagctgccgggcggaggggctcctcacttctcagactgggcggccgggcagagacgctcctcacctcccagacagggtcgtggccgggcagaggcgcttctcacatcccagacggggcggcggggcagaggcgctcaccacatctcaaacgatgggcggccaggcagagacgctcctcacttcctagacaggatggcagccgggaagaggcactcctcacttcccagactgggcagccgggcagaggggctcctcacatcccagatgatgggcggccaggcagagacactcctcacttcccagactgggtggcggccgggcagaggctgcaatctccgcactttgggaagccaaggcaggaggctgggaggtggagattgtagcaagccgagatcacgccactgcactccagcctgggcaacattgagcactgagtgaacgagactccatctgcaatcccggcacctcaggaggccgaggctggcagatcactcccggttaggagctggagaccagcccggccaacacagcgaaaccccatctccatcaaaaaaatacgaaaaccaatcaggcgtggcggcgcgtgcctgcaatcgcaggcactgggcaggttgaggcaggagaatcaggcagggaggttgcagtgagcagagatggcggcagtacagtccagcttcggctcggctcggcatcagagggagaccgtggaaagagagggagagggagacggtggaaagagagggagagggagaccatggaaagagagggagagggagaccgtggaaagagagggagagggagaccgtggaaagagagggagagggagaccgtggaaagagagggagagggagacgtggggagagggagagggagagggagagcttttcttttatttttctaagatacttttgttacaaagagtataaaatatgtatgtgcagtttaataataatttaaaatgagcaacctcagactctgacatttgtgaagcagtctctcattaaggtttaaattacacctcctaataatgttcatcatttattaatttgcttattggctatttagaaatcctcttttgtaaaaggaccttttaactgtttttcctatttaaatttgtatttgaaattttattacttatttgtagtacttcttttcatattctatgtatacccccataacacacatatatactatatttatcttcactcaatctttggtttgctttttcactgtcttaatgttgtctgtcaatgaacagaaataatttttattttattcagtccaattaattaatctcctgttttaaaaaataacccacaaaagagtagataataacaattgctcatgatggtttattaaagcaaaaaccactataacactttcaatatacattattcaactgcaacatacacacatatacacatgatcaaagaggtatgcatacatttttatatatggggatatacattttatatataagtatgcactttatatatttacatatataaatcttatcaaatttcaaggaactcttaaatatacacatacatacatatataaattcttagatacatctatgaataaatgttctaatcaatagatgaataaaaattaaaaactttaaattccttaccaacaaggaaagcaaatgttttaaaaaattgattgattattctaaatatccttaagttgtatttgttttgcttagttaataagttgagccgagtgcagtggctcatgcttgtgatgccagcactttgggaggccaagttgagtccaggagtttgagaccagcctgagtaatgtggcaaaaccctgtctttactaaaaacacaaaaaattagttgggtgtgatggcgcatgcctacagtcgcccagctactcaggaggctgaggtgggagaatcacctgagcccaggaagtcaaggctgcagtgagccgtgtttgcaccactgtactccaacctgggaaatgggagtgagagcctctctcaaaaataaattggcaagggacagtaggaaataatcttttgccagagagtctagtttgaataaaaacattatacctcattgtaaataaataaatacaaattttcatttatactacagtctgttactacttatgactctaataaactattaaaccaatgcttccctaaatatccctattctgaccaatcaaactgtaacaggttcctgtgtagccatcaaaatggatcgatcaaagaaaatatatttgaacagactttatgcaaatgaatgtttgtgagcttgtgaacttttttctttttaactatttgatcaaaaaatcatttttcacaacaaatttgcctggaggtgatttcacctgagaagtcccagagagactaggctttagaatgtcagttgaaaactatttctttcctgcttggggaacaaaacaccattttcaactcccactagattctaaggatttagatttaatgattataggccattgcatcaatctagatgttccaaaggccacacctaggagatccccattggtccttataacaatcaatgttattaaagttctttcttattaaatctgacttcgtattgtgactacagaacataaaagctgttctcctgtccaacaaaggcaatcacctgaaccggcaaccttaacatagctgcactgcagattggttaaaccaaactatactgcatataaatgagacattggtttcagaaacaggaaaactaaaggatattttagaacctttgaaaaaaggacctgccctatggctatttaacttattagtgtagaattcactaaagcattttatcatcaataggactttataaactcaaccatgaaacaatattttaaaagtaaccttctccagttcattgttatttttagcagaggcagctaaataaaaatcctgcagccaagttggagagaagattgccgtactggacaggatgtacaggcaatctgtatttggggcatgggaaggattttgaggctgagtttctagattaagatttaattagtaaagattcagatgtcccccttggctgggctttgaactcatcaggaatagccaggaccaggaaactgatggggacatcataatgagtcctatgggtgacccaaggtcagacttaggatgtaaggccaaagctgggagttatgagtaaacattcactgttcaaggaaatagagcactgttgtaacccagacctgaagactcatgaaatacatacttgagggccatgagggagaacacattctggccataagggagaaatctggccataagggagaaatgatcagagaatagtgggacaggacatccccctgtaaggtagggattaccagcagcaggcatttccagcagaaactagatgctcagagtccaactttgcagtcctacaagatgaattcccaacttttttcctattgtctgagacagtggtccagaatctgcagtactgcacagaatcctggctgttgctacaccctatatacccactcatgtattcctgtatcatgaaatcctttcaagtcttcctcttgcttacttgtccagagattccaggcattcctgggatacacatcttccctagtaattatatcgaagattcccctaggtgtctacatgagtcccaaccaacttctctcccacttgtcatgtctggagtctgctagcaatacctattaggaggaattacatgccctcctttctgaatgacagcatccacagtaactgcaaagtggcttatctcttaaaaaaaaaaaaaaagcctccacaccaaaataattcctcacctcctgtttttcttctaattgaggtaatgagcaggagtgggcttctaccagtaatgatttcaatgtgattttcttactaaaggcacaaagtaagaataacaacagcagcattagcagaaacaactttgatttttgatagtgcttcaccctataggagaatttatctgagttttatctagacttacaaacttaataaataattttaataataacaaatgtcaatgaacagttaggagtaggtagtttgaagcgccttatatataatctcatacttaatcctcaaaaccttacatagtactattatatgcattttatatgctaagaaattgagatacagagctttgtgtatattgtacaagtcatatagctaattaatagtacagctggaatgtgaacgtagtctgacacaggagtccacttagccattgatctgtgtggctcaattatactctaagcatcagcttttcagaactacccatgttttactgaacatgacttgatttttcctcagtcttgagtgttcgaacacattcttcatgccaattaattgtctctttgatatttattttcctaggtcaatcatatgcttgctttctctttttttttttttttttttttttgagacagagtttcgctcttgttgcccagactggagtacaatggcacaatctcagctcaccacaacctccacctcccaggttcaagtgattctcctgcctcagcctcccaagtagctgggattacaggcgtgagccaccacgctcagctaattttgtatttttagtagagacagggtttctccatgttggtcaggctggtctcgaactccggacctcaggtgacccacccgcctcggcctcccaaagtgctgggattacaggcatgagccaccgcgcccggccaatcatatgctttctttaaaaatgtgttcaaatttcttcaatgtattatcattactgacccctatataaatcaaaatttgagctctcttcatattaattacactgttacaatttcttgttttcacatccatgttcttcagtggaccatttaaagagcaaagactacacctcaatcacctttatgttccatgtgaccgatatgaaaagagaatcagtaccatgagaaaactgtctggagtaatcttgacttggctgctatgattttacgagttatttctagggagtagcctttgtaaatggccttggggaatcacagcaccatcaccgagttcctcctccttgggctgtctgccgaccccaacatccgggctctgctctttgtgctgttcctggggatttacctcctgaccataatggaaaacctgatgctgctgctcatgatcagggctgattcttgtctccataagcccatgtatttcttcctgagtcacctctcttttgttgatctctgcttctcttcagtcattgtgcccaagatgctggagaacctcctgtcacagaggaaaaccatttcagtagagggctgcctggctcaggtcttctttgtgtttgtcactgcagggactgaagcctgccttctctcagggatggcctatgaccgccatgctgccatctgccgcccactactttatggacagatcatgggtaaacagctgtatatgcaccttgtgtggggctcatggggactgggctttctggacgcactcatcaatgtcctcctagctgtaaacatggtcttttgtgaagccaaaatcattcaccactacagctatgagatgccatccctcctccctctgtcctgctctgatatctccagaagcctcatcgccttgctctgctccactctcctacatgggctgggaaacttccttttggtcttcttatcctacacccgtataatctctaccatcctaagcatcagctctacctcgggcagaagcaaggccttctccacctgctctgcccacctcactgcagtgacactttactatggctcaggtttgctccgccatctcatgccaaactcaggttcccccatagagttgatcttctctgtgcagtatactgtagtcactcccatgctgaattccctcatctatagcctgaaaaataaggaagtgaaggtagctctgaaaagaactttggaaaaatatttgcaatataccagacgttgagttaaaaaacaaacattgttggccgagcactgtggctcatgcctgcagcaggaggattgct

SEQ ID NO: 5703 - DNA, 6000 bp, Homo sapiens
aagacttacatataagacccaaaactattattaaattattagaagaaaatctagtattgcaggaaaaatctactatctagtataaggaaaagtctcctggacattggactaggcaaagaatttatgactaagatctcagaagcacaggcaacaaaaacaaaaataaacaactgggacttaactaaactaaaaagctctgcacaacaaaagaaataagcaacagaatgaacaacccgcagaactggagaaaatatttgtaaactattcatctgacaggggagatatccaaaatatacaaagaactcgagcaagaaaaaaaaaaaccccacaaataatcccactaaaatgtgggcaaatgacatgaatagacatttttcaaaagaagacatttttcaaaagacatttttcaaatggccaacagatatatgaaaaaatgctcaacatcactaatcatcagaggaatgcaaataaaaaccatgacgcgatatcatcgtaccccagtcagaatggctattattaaaaagataaaaaaaaaaacagatgttggcaagaatgtggagcacagagaactcttagacattgctggtgggaatgtgaactagtacaacttctatggaaaacagtatgcagatttttcaaaaaactaaaagtagaactgccattcgacccagcaatcccactactgggtatttactcaaaggggaagaaatcagtacattaaaaagacacctgcactagtatgtttatcacagccctattcacaatagcaaagacatggaatcaacctaagtgtccatcaacgaataaaaggataaagaaaatgtggtatatatacacaatggaatactatttggccataaaaaggaatgaaattatgtcttttgcagcaatgtggatggaactggagatcattattttaagtaaaacaatcgaggcacagaaaatcaaatattgcatgttctcactcataatgtgagtgctaaaagatgtgtacacatggatgtggagagtgaaatggtaaacagtgaaaacttggaaggaagagggaatgggagaggagtggatgatgagaaattagtcaatgggtacaatgcatgttatgcttgtggtggataccctaaaagccctggcttgaccaacatgcaacctattcatgtaacaaaactgcacatgtaccacatcaatctgtacaaataaatatttaaaaacaaaaaacaaaagaaaagaaactgagattcagaaaggttaagtgacctgcccaagatcacacagctaccaagtggtggaaaaaagtgtcaaaaacaggtctgactcaaaaactggtgttatctccacagtgtctcgtgaagggccggtgaagagggaagaactgagcagagagagccaaggacagggtagtggggcacaggctttgaggagcctggaaagctcctaatctggtacttctgggcaaaccagattcctctctagcttggggaagctggtggcaggagggcagaacaacctccacgactagacttggcttcctgactcagtggccttctggaagttcacactgtggacgcgagtgcaattactgccaaatccctcagccttaacctgtccacaaagcacctgcctccaccccataagccaggcacgtgggttgatccctgggacagcctgcctcaccccttctgccagggtccaagcacagccctttgcctaacctgaccctggaaagtcgtctgcctttatctctgcctcccaatacctcctccctggtaccttccttcctttctgattgttgatcgcaaaatcttgtctacacttttttggggaaaaaaagtggggcggggaggaaaaagagtaaatttccaggaattgtttcactgctgctgtttctgctgcatagggcaaagctgctggcctgctccttttgcccaggttggcgaggagcctggcctcctgctcctccctctttctcttcctcccagtctctctctttccagctgcaccccaccccctaaaaagccccacatgaaaactgcagagctatcacttatttcttcctgagggaggagctttccctctgagcctctgccagaaggaaccaccatcacttcctctttctacaaatacacattgggtgacaggaataggtgggagaaggcagcaggtagaggtgaggctgcaggggggatgtctccatatgggaaggacaattcagagacccaggagacaggagccactaaagggcagtcttgtgaggaacggaagtggtcacagatgtggccatctggagaggacaaagaccagaccagggccttccttggagggtgcttgatctaggacaggcttcatttgcatgggtcaaaagcatgtagtgggaaggggaaattctcagaaggctccttactgaagaaaaatatcaatgggatagaaactaagaccctaaagggagagaataagagcaaaactaactgaaaaatcgaagtaagccacatttcacactgtcatggttcatcatgatggttttttgtttttgttttgttttgtttttttgagacagagtctcactccacggcccaggctggagtgcagtggcgtgatctcagctcactgcaacctccgcctcctgggttcaagagattctcctgcctaagcctactgtgtagctgggattacaggcatgcaccaccacgcctggaatttttgcatttttagtagagacaaggttttaccatgttggccaggctggtctcgaattcctgacctcaggtgatacacctgtctcagcctcccaaagtgccaagattacaagcatgagccacctagcctagcccattattttttttttttttttttttttttaggagatgggatctagctctctagatcccatcacccaggcttcagtgcagcagggtgatcatggctcactgcagccttgaattcctagtctcaagcgatcctcccacctcggcctcccaaatacagactgtaccaccacaactggctattttattttttgtagagatgggggtctcatcttgttgcccaggctggtctcaaactcctgggctcaagcagtcttcccacttcggcctcccaaaatgctgggattactggtgtgagctactgcaccggccatgatagattttgtgatcttggagtgatctgatatgtaagtggaaggtttaagaaaactacaaaactacaaaatgaaaaatattcccttccatggagataaatggtgctgatggttgcacagcagtgtaaatgcacttagcgccactgaattgtacacttaaaaatggttaacgtggtaaaccttacatatattttaccataataaaagaatcagtgagcaaacttttaaaaaatgttctctttgagtggataaagaaaatgtggtgtgtgtgtgtgtatatatatatatatatatatgggaatattactcagccatgaaaggaaatgaagtacggatgcatgctccaaagtgaatgaaccttgaaaacatgctaagtggaaaaaaaaaaacacagacactgaatgtcacatatgatatggttccctttctattaagtatccagaataggtaaatccacagggacaggaagcagaaggttggtggtggggggaataggattgactgcttaatggttatggggttttctttgcgggtaatgaagatgtttagcacgtagacagaggtggtgtttgcacaatgtgcatgtctaaatgccattaaatcacacattttaaaatggttaattttatgctatgggaatttcacctcgacttaatatatactcaatcccgtccagccgacacacctttggctcaggcctaggccactctgccatctgccaagtgtggcttgtgtaacagacaacttctctgggcctcaaagagggtgaagaaatccatcctccccacaggggtatctccagaatccaacgagatgaagtgaggtgaaagcgctctgaagggcaggaagctctgctgacacaaaatgtttacccataacacgtggcttagagtcccttaccctctagcttggcgggagagagaagtctgctctccctaccccacgccccatcccctgctcatcccctgccagccacccaccacacccttcacgcagagaagtatagagccacagggggagggcgccattctctctctccctccctactcaggaatctccctgaagctttgacaaagcccccttgacaccccgcattcaatcttatttttatttttttttattaactctgtcacctaggctggagtgcagtgacctgatctcagctcactgcaacctccgcctcctgggctcaagcgattctcctgcctcagcctctcaaaatgctggaattacaggcgtgagccaccatgcccagccattcaatcttttctttcccagattctcacctccaatcacaagatgaaggcagggagctcacagccctgtgaggggctggggagaatggcaggggtgggccagagttattaaaagcccaactgatgttcagatttattttgaccctcccctatacccccacatccaatttcactctagtaggaatcaagacaggggagagagggattccaagctgacttagggagaggaaaatacatacatacgtaaagcatttgccacaggccccacctgagctaagcactttccctccctcaacagctcctttaattctcaaagcatcccttttagtagataatagaccccactttgcagaggagagcactgaggctgaggaaagaggtaaattcattcagcgggtgagggaggagctgggattttaatgctggcagtatgacctccccgccactggcacaccgggtcttttgctgggacatcccctgtaaccggattgggggaatgcaggaaaaaccccatccctccctacagagcctcagcagtgacagctacttcccggatgagaagggcggccgtgaagccagcagggaagccagccccacagccaagggccccccagcctcctcacagctccccatagcctggacctgccggccctccctccaggaccgaggggctcccaagggaaactcaggtgagtgtcgccctctcccagggaagatgggaatcagggcttggagacaactggctatcctgcatgatccacaggttttcctagggatgaatcagattgtgtggtgtgcgtgtgtgtgtgtgtgttccacactcacggtccaaataacaagacagaaaaagagcaataaagatctgtgcaaaagggctgaggaatgaagtgccaggagagaggtggaggttggagaccacctaggaatggtgggtgtggggggattgagggggttgttgagggggaactggctgggggtggggagaaatgttggtggacaccaacagtcctggcctcttccagctgaaaccccttaagaaagtatctctgctcttgggtcagagctagcaagtgagttgtgtattatttattcacagtttgaaagctaaacttccctttcttgccttagccccagaatctttccccaaagcccccgactccctctggcctctaccttgaggacacaaggctctcgaggtctgctttcccttccaaccctcccttcatcccaataggcgtgtgctggtcccaatgtcagtgaaacccagctgggggcctggcccctcggagggggtcaccgcagtgcctaccagtgaccttggagagatccacaactggaccgagctgcttgacctcttcaaccacactttgtctgagtgccacgtggagctcagccagagcaccaagcgcgtggtcctctttgccctctacctggccatgtttgtggttgggctggtggagaacctcctggtgatatgcgtcaactggcgcggctcaggccgggcagggctgatgaacctctacatcctcaacatggccatcgcggacctgggcattgtcctgtctctgcccgtgtggatgctggaggtcacgctggactacacctggctct

SEQ ID NO: 5704 - DNA, 6000 bp, Homo sapiens
aaaaatgattataaacatgtcaatatgaggggtgggagagggaaaaggatctatgtgggtttattatagtgacctgtaaaaggcctggaagagatttatacattcttctataaatctggttgtctctttcagttgggaggcagtcatggccatggcacatagaaaaggatcaataaatattagtttagtggttatgagtgtgtctctggggacagactgcttggattctaatcctgacctcatcatttgctagctacctgaactagctttgcttgtgtctccatccaggaaaaaataaattaaaaaaatatatatataccctatagggtcgtttgtcatcaaatctatttaagtaattgctattattcattttttgtctttccaaggctgttgacaaataacattagctacaactccattaaaacgttggtggtaatgatatttataatttgatgtctgcacttgccttgcttgtttagaaatggtacaacgtggccaggcatggtggcttacacctgtaatcccagcactttgggaggctgaggcgggcatatcacctgaagtcagaagttctagaccagcctggcccaacatggtgaaacccggtctctactaaaaatacaaaaattaaccgggcatggtagtgggcacctgtaatcccagctactcgggagactgaggcaggagaatcacttgaacttgagaggcggaggttgcggtgagctgagatcgtgccactgcactccaggctgggtgacagaatgaaactctgtctcaaaaaaaaaaaaaaaaaagtacagtgtagtaccccacaattgctatcccagaaaaacaatttaaaattacctcaaaatacattgaatagttatgagcacatgtaaaatatataaggcaaaattctatacttgtttctttaaaacatccatatgatgttttgggaccagtggtcccaaactctgtctaccataaagataccacatgtgggtaaggccaactcattgcactgtttgatgaagagagatgctgcatctagctaaagtcactgatgccttgtggatgcatgccagatgtctgccagagtgtttaaattttcaagggatgccagaaattgggatttttttttacatgacatttctcaattttaaaattttgactcaatttatttcatggtacaaaactctctggatcaaacaatacatttgtcaaatctttgccataaatatttacactaatacatatgtactagttacactgtgctgttattcaaagcaaatgtttttgaggcatgaataaaagatgaggaagacaaaatataaaaaggtcttcagaaactcacaagtctagtggggagataggcaacaatgtcacagaaaagagtgaaaagtgtcacagtagagtgtggaagttagaacttaagctgtgtggttaggatcagatctgcattaaaccaacaaacaaaatcaaagaaccccattatttcaaagcttggcaaagggtggacacccaagtagatggctcttttgtttaacaaaacaccttaatggattttgggggtaggagctatgcatagacagggccacagccttgcacagttccagggggcatcatttgtgtttgtcacctcttgagcatcattcatgttgtattctttgtgaatagcaccccctggaattgcacaacatggtaattgtgtcaataaaggtggcctggagtctggcctgagatgaggattgagagttaaatccttctacataataaagtaaaaggaattttaagtctttcctagtgggtagaggcaggcgggtagagggatgcctggaatggacagaagaaaagggttaggagaaaagacatctctaagatgaggatgggccagcaatttggcaacaacctggagccgaatgagcctggtgagagattgcttgtaatttttgcaagagatgcatacaatcctctgtcatcttctacctccaggagacactggtaaatgaagtcaaacaactttttctttggcactcttctttatgaatcaggagataattgggaaagacttcaccgtccagaatcacacagcaacacttgcctaaacatacaatgccttaataacttgcctttttactgtttttctttaaaaagctgaaagtgcttacactttcatttcctcatttgttctgacattccagtgtgggtggggcagatttatgataacattatttatagatggagaaatcgaaatagagattaaatcgcttaatcaatgttgcatagctggggcagtggagcccacagtggaatttggttctccaggctccagccacgaagtggaaagaacatgagttttggaattagagggatctttgcacaatcctgattctgccccttaacaagaatgtggccttaagtcaattacttcacctaagtctcagttatcctcatctctaaaattaagaccataaaacctcatagcaatgtagtgaagattaatttagaaaacgcgtgtaaagccttggcatagagtaattcccaaataatattagttccacccccaacccagtattatctggttacatttcagtacaaatttaaagtaatcaaaatgaatcctccattatagtaattttttttctagcctcatcttctttcactgagagcaaaacatgaataaaaatccttcaataggtcatttaattcaacggcaagaacttttgctccggtaagagttatccctgttggaaaaaattagaaaaaaagaggaatatgtggaagacaagatattagttcttaatatcttatgcagtggttcttaaacttgacagtatatcagaatctcctggagggcctgttaaaacacagattgctgggtcccaccccagagcttctgattcataagatctggggcgggacccagtaatgtgcatctgtaacaagttcacagatgatgttgagaggcttagtccagggacttctaggggtggggcccagcaatctgttttaacaagccctttaggtggttctgatgcactctcaaatttgagaaccactgggatagtggtgaaaagcatctgagaatatggtctgcaaattcaaacccaggcggctccatttaccagttagatgaccagattaaatgactaacctctagcacctctgcatcccacacagagcctgataatatctgtgattcaggattcctctcactatccctttaggccttgagtaaaaagagatgtcggtgagtcctgccaacccacgctgttttttacttcttcacactctgaggcacaaaaggctgcttgaatttgagtattacggaagtatttgccaacacttctgcgatcacaaaaataaagtaagaaagccctgtaaataaagccaagagcagtggcattgtttgcatcttaaatttgtaataatgggttttcaacttttttcctttcccctgcctttcatagtagaaacatttaaaaatcttccccgccaccccccccccccccagtttcaagagatgttagtacatttgttttgcagatagtatgcattgctaagaggcttttttttctttccctgcatcccagatacagaatctgcctcagatatctggtgcctttctgattttgtggctgaggaatcccacgccctcctcctttccatcccttttccctgtctggtatgtaactctgtgggtcctcatattatcactgcatggagcttcacaagcacctgtatttttccagttgtaaaaacccctactctttctttttttttttttttttttttttgagacggagtctcgctctgtcgcccaggccggactgcggactgcagtggcgcaatctcggctcactgcaagctccgcttcccgggttcacgccattctcctgcctcagcctcccgagtagctgggactacaggcgcccgccaccgcgcccggctaattttttgtatttttagtagagacggggtttcaccttgttagccaggatggtctcgatctcctgacctcatgatccacccgcctcggcctcccaaagtgctgggattacaggcgtgagccaccgcgcccggccaacccctactctttcttatttccttaactaatcttttctattgcctattgctgatgaggtataagaatcgttaacttttatccaatgccagacattctgaaatgtttatcatgcattatcattttggattcctacaatgcagagatgattttataacttgccagggtgaaaaaataaaagtaaataaaaggagacaagcaaaaagattccagatccccaccccaacccccccaaccccccaaccccagctctcgcctctgttgaagtcaccagtgatgacagaatataggaatatagtttgagccctgtttttaaataatttcaaaatcttggtataggtagatgagatttatacacacgtgaattaaaatcaaccaacatttgtgagattgggtttggtatctttgaccgtttttctcccctgcaagacgtagataatagcaccaaccccaaggagtttggggatgattaaataagttaatgcacccgaagggacttaatacagtgcctaccacgtagtaagcgttcaataaatgttaactattatcattattttttaaaggaggcagattggagcgtagagtacactgaagggagtcgggaggccgggtgtaggcactggattcttgcacctaattctccgagcctcggtttccttatttgtaaaattagctggctggagtaaaacaactcaaacagcagttaaagcaaagggtgcagcagtagccggggaatcgaggaggcgcggggcggaaagggttagttaggagcccagaggctgatctgtgggcgcccggcgagagaggccccgccccgccctggaggccctggcagctccgggctgagagcagttccggtgccaaaacccttccctcccccgctcccccggaagtgcttttccaagattcgggccggagagaggccttgtaggcacagcggctgagactcgatctgctccaagtaggggctccagcgcgggtcggagtctgggggttcgcgcccgccgacccgcgccctgctccctctcagcacctgggcggacggtgagtggctagggaaacggactgggacggccgcgggcccgcgtcggagctggcgttctcgtgcccccgctgcccgcttcgggatccgggctgagggctcggctgccggcgtccggggaaggggattgtcgaccgccgcggacttctccgggccagcgggacgggaagagctggctgtgggtccatggggtgggcggggcggagccagggagggggttcccagagctgttgttgctgttgggactcgagagtggggatgggctgggcctctgttcgtccgtccgacccccctcatgtgtgctgccccaaacctcgccgctccctagtttggtattctgtgtccggcctggggtagtagctggacaccagactcaatcttgggctccagttcccgacttttcgcctcctctgggtctgtcctggggtcagtaattaacccgggtcccaggggtgtcgtcttttccctccagggtggggcgctgcctgtacatgccagggatcttttgcagggcttttcatccagatttgcttcagggttgtccgggatcgatttggactgggctcggaaccggtcctggatacgtaggtcgctgtggcaccagcatgctctgtatcatctttactcacttgaaagcttgctgaagctgttgttgaagtaaacttaaagaaaaaacttgcttaaggaaaatcagtagtttagacaccccctcccccgcctttttttgcagacatactaaaaaaaaaaagatgcttttctctaatctacactcttaattcttttggctatctgatgtcacagttgtatgatgagttcattcagaggctgtacgaattgattttaaagagttggacagttatatcctttctcccaaagtttgtttaccttcata

SEQ ID NO: 5705 - DNA, 6000 bp, Homo sapiens
ttgacaaaggactggtatccagaatctacaagaaactcaaacaaatcagcaagaaaaaaataataatcccatcagaaagtgagctaaagacatgaatagacatttctcaaaagaagatacacaaatggccaataaacacatgaaaaaaatgttaaacatcattaatcatcagaaaaatgcaagttgaaaccacagtgagataccaccttactcctgcaagaatggccgttattaaaaagtcaaaaaacaatagacattggcatagatgtggtaaaaggggaatacttatacactgctgatgagaatgtaaactagtacagcctctggaaaacagtatggagatttcttaaagaactaaaagtagatctaccattcaattcagcaatcccagtacttggtacctacctatatttgtctgttctttctttgctattaagaactacctgatactgcgtaatttatttttttaaaaaagaggtttacttggctcatggttccaaggctttacaggaagcatagtgggggaggcctcagaaaacttataatcatggcggagggtgaagaggaagcagatacctcttcacatgggagagcaggagagagagagggtgaatggggaagtgttacacacttttaaaccaccagatctcatgagaactatcatgagaacagtaagggagaagtcggcctccatgattcaatcacatcccaccaggttcctcctgcaacaatgggtattacaattcaacaagagatttgggtggggacacagaactaaaccatatcattccatccctaacccctcccaaatctcatgtccttttcacatttcaaaacacaatcatgctttctcaacagttccccaaagtcttaactcatttcagcactaactcaaatgtctacagtccaaaagagcctgtacctgtacccttttgtgtatgagcctataaaatcaaaaacaagttagttacttccaagatacaatgggggtacaggcattgggtaaatgctcacattctaaaagggagaaatttcccaaaacaaaaggggtgtatgccccatccaagtccaaaacccagcagggcagtcattaaatcttaaagctccaaaataatttcctttgactccatgtctcacatccaggcaacactgatgcaaggagttggctcccaaggcctcaggcagcactgcccctgaggctctgaaggtaacagcttctgtggtgactgcttttatgggctggtgttgagtgcctgaggcttttccagacacatggtgcaaggcgtgagtggatctaccattctgggttctgggggatggtggccgtcttctcacagctccaccaagcagtgccctagtggggactctatgtgggggctccagccccaaatttcccctctgcacttccctagtagaggttctccatgagggctccacccctgcagcagacatctgcctggacatccaggcatttccatacatcctctgaaatctaggtggaagctcccaagcctcaactcttgccctctgcatacccacaggcttaccaccaagcgaaagctgccaagggtcagggtttacaccctctggagcagctgcctcagacatatttgggcccttttagtcatggctagaactgcagtggctgggatgcagggagcagtgtcttgaggttggtcagggcagtggggcttaaggaagtgggacacccagaccctggggccagcctgcaaaatcattcttccttcctaggcccagcttgaattactcctgagaaaatgggtttttcttttctaccacttggcagggctgcaaattttccaaacttttacactctgttttccttttaaatatgtttcagtttcagattatctctttgctcacaaatataagcttatgctgttagaagcactcaggtcacatgttgaatgctttgccacttagaaatttcttctgccagataccctaaatcatcattctcaagttcaaagttccacagatctctagggcaggggcacaatgcctagaacctctttgctaatgaataacaaaagtgacctttgctccaattcccaacaagttcttcatctccatctgagaccacctcagcctggacttcagtgtccatgtcactatcagcattttgatcacaacaatttaacaagtctgtgggaagtttcaaacattccctcttcttcctgtcttcttctgagccattcaaactgttccaacctctgcccattaccaagttacaaaattgcttccacattttcagatatctttatagcaatgcctctctcctggtaccaattttctgtattagtccattctcacattgctataaagaactacctgagaatgggtaatttataatgaaagaggtttaattggctcatggttccacaggttgtacaggaagcatggctggggaggcctcaggaaacttacaatcatggtggaagaagaaggggaagcaggcacgtcttcacatgaggaagcaggagagagagggcaaaggtggaatgcaacacatttttaaacaaccagatctcatgagaactcactatcatgagaacagcaagggggaaattcacccccatgattcaatcacctcccaccaggcccttcctccaatgcttgggattacaattcgacatgagatttgggtggggacacagagccaaaccatatcactattcaaaggaaaagacgttattatatgaagaagacacatgcacacgtatttttattgcatctcagttcacaattgtaaagatgtggaaccaacgtaagtgcccatcaaccagtgggtggataaagaaaatgtggtatacatacagcatggaagagtactcagccataaaaaggaataaaataaagtcttttgtagcaacttgaagggagctgaaggccattattctaagtgaagtaactcaggaatggaaaaccaaataccatattttcccacatataagtgggagctaagctatgaatatgcataagcatacagagtgttaaaacggattttggagatcccaaaaagggagggtaggagaagggtgtgggattaaaaactacatattgggtacaacatacactacttgggtgatgagtgcactaaaatctcaaaattcaccgctgtataattcatccatataaccaaaacccacttgtacccccaaaagccattgaaattttttttaaaatgtttaaaaaaaggaagaaagacacaaggtaggcattctttaaatgtggaaagaatggctaagggaagcaagaataatgtgagaataagcacagagtagcagtgaatgtggtatacatagggaaaagtgaaggaaaagggtgtccagagacgcgggctctctgtactgattgtgcggaaaccggagttaactcacaattttcagtggcactagcactgtcaagtgctttgtttgttgtttgttttttcacccaagaaaggaagatgttcagactacagattgtggtcaagaaattatatattttaggtgaacaaacagcgaggtttggacatgaaggaaggcacatacactgcacagagaaacagctcttcccaactctaaaatttagacgtttatttgggaaattttgttgggcagtctaaatgcaggaagattaaaaaggacttggaaaatcaacagggtatcctgccttcatgatgctgtgaggcattgtgccccagagtgaaaactgcatttttgtgagttggtgtggcaggcttggaataccacctctttcagcagctcactcaggtctggcgagggctatttgtacctcaacgagggcttctctccaagaaagccctgaatccttttcctcctttttcctgcagattcactataggacactttttgaagcaagagcatgcattttccccctggcgctctgcagcggttctcagagcccagtgtcactcacataggtgggactgctctcagttcagagagcgctgggacacttaagatgaaaagtccctggaagttagcaaacagccatctgtcactctggcatcgatttactaaaagtgacttctagggtattctaaaccacttttaaaaaacaaatgagtcacttcgacttcctcaccccgcaagagataggaaggcagcagtggagtgctcgctcaggagctgtatttgtttagcgattagcctagagctttgattttagggcaaaagcgagccagacagtgcggcagacgtaaggatcaaaaaggccacctatcattcgccggggacgcctgcctccttaccctgataacgtaactatttctctgcataggattttagtttttgtgtttttgttttgttttattctgtttaatcacttcaagtatctcatccattatttgaagcgggctcggaggaaacgtgccgcatcctccagtccttgtgcgtctgtttaggtctctccgaagcaggtccctctcgactcttagatctgggtctccagcacgcatgaaggggtaagggtgggggggtcccctattccggcgcgcggcgttgagcactgaatcttccaggcggaggctcagtgggagcgccgagaactcgccagtaccgcgcgctgcctgctgcctgctgcctcccagcccaggacttgggaaaggagggaggggacaagtggagggaaagtggggccgggcggggggtgcctgggaagccaggctgcgctgacgtcactgggcgcgcaattcgggctggagcgctttaaaaaacgagcgtgcaagcagagatgctgctccacaccgctcaggccgcgagcagcagcaaggcgcaccgccactgtcgccgctgcagccagggctgctccgaaggccggcgtggcggcaaccggcacctctgtccccgccgcgcttctcctcgccgcccacgccgtggggtcaggaacgcggcgtctggcgctgcagacgcccgctgagttgcagaagcccacggagcggcgcccggcgcgccacggcccgtagcagtccggtgctgctctccgcccgcgtccggctcgtggccccctacttcgggcaccatggacacctcccggctcggtgtgctcctgtccttgcctgtgctgctgcagctggcgaccgggggcagctctcccaggtctggtgtgttgctgaggggctgccccacacactgtcattgcgagcccgacggcaggatgttgctcagggtggactgctccgacctggggctctcggagctgccttccaacctcagcgtcttcacctcctacctgtaagtacttccccacgtcactccgggagagagactaagaggggaaggaaggttcgtccaaggcgaggctggaggctcctcggcgcccgcctgctcgtgggggaggggggcgagtttgtcaagggcatcctggccaggcctgttagggcccccagagaaatgcacgtgtctcggggagtagcgtgccggcactttctggacccgcagagaaatggcttcgagtgcaacccgggaaagcgctgctgcgccgcagcttcccagtccagcgctagaaacatcgcagggcgaattcctgcaaatgcaggcatttgcgtgcggagtggacatttgtgacccagagcctggtacccaaaggcaggctgccatctggtccccgccccaaccgcctctctgcgtctagtcgcattccacgaaaagatggtctgtagaaagtttccccaaaggagaaacaacttgcccagctccaaagggtttttagtctgcatcccttgcactgtgacgtgatgtaacctttttggggttttttcctcttttcctcccttccttcctcccttcttccttccttccctccctcctttctttttattttctttcttttttaacggcgtgattaaaatgtggcaaccacaaaccccgattagagctgccagaacgttatctttacctttggctgcccgcgccgccctttgaagtgcccgcggccgctgtgtaatctttaaccatctcttcccccggggaggaa

SEQ ID NO: 5706 - DNA, 6000 bp, Homo sapiens
tatacacacacatatatatacacacacacacacatatatacacacactatatatatatatatgattgtgtttgttgttgttgcagttgcagagatgaaaaagaaatctgtgtctttaaatgaggaggggctgcgtaaggaggcttgggcagcaaaaaggctaatacgctgtggaagagaaggagtttaatctaatttagttggagggtgtctgtctgcggtgttgttttttggagtgtgggaatagaggcgggaagctgcccccttgaatggtccctcctgagccaggagcagtggggagccagtcgacgccagcgatccaaagcccggccttgaaagaggattaaatcaatgctctgatttgcaattcacactagtgcaccccgtggaacctttggtaatatttcaaaccacatttcaagggaagtggccttaaaatagctgcctaaattgtgctggagccacactggacaccccactcatccactttaggatgggggtgcttcggggttcatttctcaccttcccccaaacctccacatctcacagccagtgtttttaggcagaattaaaacttttgcgcctgttgaattcgctgcgacttgcatggcctttctggtggtacaaactgtgttttctttgctaagtatcacttcagatcactaaaggtattttccctggagaaaaagatgggggcacgccacggggagcatgcctacttgatcagaaaacataattttttgtgcatgttttatatctgataagtttctgcagaaacttgatactagatgaggtcagagaaaacaaggtctattcacatcagacttccctgcatgtgaagcaattattggtaaatagatcagttttcattctcatacttgaaggtagaattggaaatgtcccggactaaatacaaacattgacgacacgagaagacaagagaagaaacacaagaatcacttacgtggatcctcacacttgaatgtaccaagagaggtgattcaagcagcagctactgaaaggcgttgcgacagcctgaaccactttttatctcaacattcaccagcacgattttacttctgtttatgagctttcttcctatgccaccagtttactcttgcaattagcttgtaacatgctaagcttatggtttaatttctttctgttgctgaaagactcagtacttttttatcttaaagagattatttgggttttctctaatcccatttcagaaaacctcgcacagtgcttataatttccattgactattacataataagaaaagatacaactttgatttttagcaatatccgtgtcaaagtacttttatacttttgactttgtgagtttaaatggaatgaaactgggcctctctttcaattcccctccacctccaaaaaatatttagttcttgttcaaaacactgcctgactcctgaaatattctctctcaaaaacctcatactttccctggtgaacgtttgcaagaacctgaaggcggataatgtttactgatagctttccgatagacagacatttttaggtggttgggggtaaaaacatattccttgtctctgcacgttatgtgaaatcatgtttaattataaagtttcattaaaaatctttgctcaaaattttagaagcctaataagatttccattaatttaaacatatcactattcccacgacggctccaaagctttcttttccgtctttcatccatggttaaatatgtaaataaaatgtctaaagtcattcttcaaagaagacaaaagaaaaaagagctgagggaaagacagccataaaattcctcccaattctccataacatttgccagaggggggtcggttgccagccagggctgagcagcgggggaccccggctgctccttagactcacacatctcaaatcccacacacaggaaaaaaaataaaataaaatatcttttcagctggggccatcaaaagagccttttcatttattagttacagacttatcttccagttgctgatttctcagaaccctcatttctctataataaagtctatttgttggtttccatctcagctggacagggcgaagcacttctgcagacatttttataaaaaacgagagaaaaaggcaatctgaagtggttatagctaaaataatgggcctgaacgtggctgaattaaaacagcacagaaaagatcaattaggaggcactttctcaaatagctcacacccagctcccggcgtttggctctcactcttgcactaaatatttctaatagttgctgagggagagacacaaaaaggaaaagaaggaaaatagggcccaggaaggacctttgccaggaaaattctagaaaagccaagtgatttccgctgaattaattttaatttaaaggtcctgaaaaattactcactagacaaaaaacaacaacaacaaaaaaaaaaacactataataaaaatggcagtctttcaaaaataaaatcatgcaacttttcacttgggaaataacacagttgaaggtggtgttctaactgcccggagtttctaccttctttttcactttctccctcaccccgacttcctccagcacctcctagtgagacccaggacacccagggacagcgacccaggggtgggtgcctgaacctgcctattaattctgggattctgggcgctcaaatgtctgttgaacggatgaatgaatgagtggaaaggtgagatttccccaagtttcttaccgatgtaaaaattgtagggcttgttttaattaaaagccaatactctccgaggaagtggccccctcctgcacggcgtgcagaaagctggtcagtgaggggggttcctggcgggccccatctccttcccgggcgcttcctagggagaccttgccccgtgcgcagcgtccccaccgcgggggcccgtgcagccgccccccacgccgggtggagcgccgccaacgcgggaagccccagcactgcctccaaagatgtccgcacactccaccctgctccctggaactatcctcaaacgggcagggggcaagcgaggccggtggacgcgggactcgctcctctgacctctccccggccccccgggaggtagcgggagattgcacacgcgatcctgcgagtttccgaactttggaagatcgtgacccggagagaccctgggaggagagggccggccacctcctaggggtgctgtttttttaagggtcaacccaggacgctacgggaagcacctggcgcatccttgggaacagtggggcttggcggtgggcgcccaccgcgaacgccctgggcgggggaagggaatggcggggggacgtcgtgtcctaagtgaccccgtcacagacccgccccaatccgaggggggatgagctcagaggacctgcccaggacgctccttctccactttccaggaaaaccgagcggcgtgcgcgcctccgtgtcctcgcgggagctgggggtccccgggcaggcgctgacgcgctcctcccacgacccactccatcccaccctactccgggtcctcctgcggggctgcagccaaggagggcgctggccgggcacatcactcgccaaatcacataaataccccacgagcgaatgacttcctataataaataaactcagccgccaagaaggcatctccagccctgctggcgcgaggccccggctctgcggcttcggagggggcgggggtcaccgcggtacaaaccaagcccgcacttcccgcggggtgggaggcggtgttcaaagtcccgggacgcttcccgcccctcccccttcccgccttcttagaggagacctcggatgagcggccctaaaatccggattctcgagcccctccccctccccttagctcgtctctttgaaatttcaaagaaaatccctcctcggagcccggagcccggggctggtagcacctccccagcctcaggaagatgcgggcaggtttacaagcaagggcctactttatggcccaggctataaaacgcaaatcccacctccctttgaaagcgccctccgcccgggactcaccataaaaggaagagaagatgcaccccgcgcccctcgccgcggaccacccccaaaccccttctcccgccagtccccgaacttcccgtaacctcggcgtcctcggggtgccggggaccatcccggggaccgccgggaaagggggcgccggcggagaggatagcgagaggcaaagttggaggccaggcagagagagggcgaggagaggcgggcgggactgccggggagggtcgcagcgcgcagagccccgcgcgccaggcgggctgtcccggggctggcgggcgacgcgggcgggactaggcgctgcgccccccgcaggctgggctgcaggccgggggggatcggcccccgcggggcccgggagcccgcggcggggcggcggggaggaggctgccccgggccgctgcgctttctcatgcaaagcagcggcggggcggggcgcgcggcccgggggcggggcctgtcagcgctcggcttttctgcccccctttgcctttttgcgagtcttctcatcccgggacgcaaacctcgaaacagctgccggctggtcccggccgaggccggcgcagggagggaggagccgcccgggctgtgggggcgccgcgagctgggccggcctcggtgtgcccgcgccgccagcccgctccagacgcgccacctgggcgctccaagaagaggccgaagtttgccgcggccgtgagttggagctcgcgccgggccgctgcgccgggagctccgggggcttccctcgcttcccggtattgtttgcaaactttgctgctctccgccgcggcccccaactcggcggacgccgggcgcggagagccgagccgggggcgctgtgcgcagcgctcgggccaggccgggcgggcatgggcgggggcccgagcaggggtggagagccggggccagcagcagcccgtgcccgggagcggcggcgctgaggggcgcggagctccccgcgaggacacgtccaacgccagcatgcagcgcccgggcccccgcctgtggctggtcctgcaggtgatgggctcgtgcgccgccatcagctccatggacatggagcgcccgggcgacggcaaatgccagcccatcgagatcccgatgtgcaaggacatcggctacaacatgactcgtatgcccaacctgatgggccacgagaaccagcgcgaggcagccatccagttgcacgagttcgcgccgctggtggagtacggctgccacggccacctccgcttcttcctgtgctcgctgtacgcgccgatgtgcaccgagcaggtctctacccccatccccgcctgccgggtcatgtgcgagcaggcccggctcaagtgctccccgattatggagcagttcaacttcaagtggcccgactccctggactgccggaaactccccaacaagaacgaccccaactacctgtgcatggaggcgcccaacaacggctcggacgagcccacccggggctcgggcctgttcccgccgctgttccggccgcagcggccccacagcgcgcaggagcacccgctgaaggacgggggccccgggcgcggcggctgcgacaacccgggcaagttccaccacgtggagaagagcgcgtcgtgcgcgccgctctgcacgcccggcgtggacgtgtactggagccgcgaggacaagcgcttcgcagtggtctggctggccatctgggcggtgctgtgcttcttctccagcgccttcaccgtgctcaccttcctcatcgacccggcccgcttccgctaccccgagcgccccatcatcttcctctccatgtgctactgcgtctactccgtgggctacctcatccgcctcttcgccggcgccgagagcatcgcctgcgaccgggacagcggccagctctatgtcatccaggagggactggagagcaccggctgcacgctggtcttcctggtcctctactacttcggcatggccagctcgctgtggtgggt

SEQ ID NO: 5707 - DNA, 6000 bp, Homo sapiens
caccagccttgattgaagaccattctggattagcaactgcagtggcggagggagtcttttctctcccatggtcaatctattgatcccggggaagacactgattggttctgagtgggtcacatgtacacctttgggccattcacagtgcctgtggtatggaggagctgcaagtgttcccactgggtcacaactcccccgcaacacctgcagcttctgacagtcccgtctgagctcacgggtcggtggaagaaacgtccttcaaaaggaaagccgacaggagccggaggggaggctgggctggtagaaacaacacacgcccatggtccatggcatgctgcatcggagctttagcccattccatagcttctttccagaatgtcccatcccttaaccactcagagaaagaattcttgaactccttcgtgtgactttcacagtgaattcgcccccaggcttctaacaccgttcatttccatgtacgttgtgtgctgcacacccctcctagcacactgcttacgaactgctgctccgccttgcttatctacacaggagtaaacgtgatggacacacaactcttgctgcctctcacaaatatgccggcgtatgggagggtctgagctggagggaggcgcaccttggattggtgtgaatcaggcatcaggaactcctgtgctcacagcttgtccagctctccctcagcatttgggccactccacagaattctttgttcaggcccgatctgtcctcctgggacatctgagctgctcagcaccaggaaacatgctctgttgtgcgcagggcatcagctttgcaaataatccagttacgttcccattggtagctggcgtcacactttatgtccttgtaaaattttgagtggagcctaatcacaatgtaaggtctcatttttaatgtttaattagcatcctcccagtaaagtctgaaatattttaccaaagcgtaacaatgtttttcattctttaagtaaagtacacatgcatgtggcccaaaactatgacttgaatgttgaatgtgaggctgcctgccgggcactccccacccaagcatagaaaaaagaaaatcgggccgggcgcggtggctcacacctgtaatcccagcactttgggaggctgaggtgggcggatcacgaggtcaggagttcgagaccagcctggccaacatggtgaaactccgcctctactaaaaatacaaaaaaattagccgggtgtggtggcgggtgcctgtaatcctggctactcaggaggctgaggcaggagaattgcttgaacctgggagctcagtgaggttgtggtgggctgagatcgtgccactgccctctagcctgggcaacagaatgagactccatctcaaaataaataaataaatacaataaaatcttgggttccttgaaggggaattccagccacctagctagccctgagaaatacatgagcaacttgggaagcaagaagttaatagtggcgagaaacaatagtcaagagagttagagtcaggaattcattgcttccctgtagaaactaaagacaacatcgtaacaaacgacccggagttgtttttcagaacctggacccccaccaaatggatctgttgacttacagacctctgatatgggggagcggagagctgaactccaccaccgttctttgttctttgttttttgagacagagtctcactctgttgcccaggctggagtgcagtggctcaatctcagctcactgcaacctccgcctcctgggttcaagcgattctcttgcctcagcctcccaagtatcctcctgagtacaggtatgcaccaccacacccggctaatttttgtatttttagtagagacggggtttcgccatgttggccaggctggtctcgaacccctgacctcaggtgatccacctgcctcagcctcccaaagtgttgggatccacccctccgggcccaccactgttctttgttctaaatttcttcctgaggggcctggaggaggtcatgcccacaggccagagctaacattcttttttgctgatctcaaattttttgacaaagccttgccttcttaaccaatcacaaatcagaaaacctctgaatctactacctatatgacctgtgggcccccagttcaagatgtcctagctttttaggtcaaaccaatgtgcagcctccaggtattattcatgtgggacttagcctgtaacctctgcctctccaccttgaaaaaccctcccccatcagccatcggggagttcaggtctgaagtgtgagctgccaggttctgctcgcctggtgccctgctctaaatgcctcacttcctctcactgcaatcccgacgtccatgtttggctttgctgcgggagggcagagccaggctgggtttggtgacaaacgctgagtgctcaccaagtaccaagccctgttctcggggctggggtgcagagcgaacaggcagaaagaaggtctctgctctcatggggcctacgcctcggtggggagagactgacaataaatgaaataaacgtctaagatatgaagtacattggatcgtggttagtgggatcgagaaaatacagcaggggagggctttagggggagggagacctgctgtcaaggtgatgtttgggtgccgaacaccccgacgtttgggtgatggaatgagatgctcagagacatcagagttgcttggttccaggcccatggaccactcaaggccctgtctcaaatctccaggcttcaggacacgctgctttacatggaggcgggctcttcatctgggcctctgaacaaggcctgagacaggacgcaggcaaatagcatgaggcacgagactgtagtccgggatggagagtcagagtgagtctgaggatgagtgcagatgcctgcagggcaagctctgctgaattgctttgctatctagtttttattacagtcattgaatcggggtgtctcccattatctgatgacaattttatgatgaaaagaaaccatgctggctttgttcggtcatggagatgggaaaggtccgcatattcagcaatctgttgaattcttccaggttaaaactggagctgagaaaaacctgcagctgcctgtccctcccttcacctcttccagcgagaggcagtgggggactggagagctgatgaaatggcagagataaaggttgtaaattagttttccctgaagccgaccagcctgagcaacaggataaaggtcgttattacagacagcccccggcctttggagttcacagtttctccattgctaggagatggaactctctggaacccttctccagctccacagagaggctcaggctatcagaggatctgagcggttgtaggctgcaggcacaagttaaaaataatcacctaacgttttgacagcactttctttttttctgtcccacagagattggaagtcattttcttatcctctttaggaagtatgttggattcaggattcttaattcccatttaaagtcaggacaattgagataactgtatcagctaacatttactgggtgttatgttatacttgctaataataatcatagctaacatttactgagtgataatttttcttaatagaaaatagcagcatttactgagtgccacatattttccaagtactgcctgaagagccttggatctgtcctctaatttattgttacagccctgaggaggaggaactattaacccccattttgtggatgaggaattcgaaaactaagagagatcaagtaatttgcctaggagcacagctggtgaatgttggagaaagtatgaagcggtaaatattacttaaatcacatagcaaatatagctgtgactgcaattctagggtgtgtgtctctgtgtgtccacgtgtatttggagtagatcggataaactttggtcttgggtaaactgaggcatgtctggcgaaggggctgactcttttctatcccattgagaacatcctcctggtgctggggtgggggtatatgtgggatggtgtaattgcgcagcgtaccttgtaattaattccgtagctttcactgacgtccgaaaggattagagagaaaaatgtggtcagcgcttaatatggagggcacagtgggtgtgctgctttctcttttccatccctctgtcaacttcattctcttttgggggcaaacaagactcagatctaaacagagtttatggtttgttttgcattttgtatttattaatatttatgccgactttgaaggtgctgaccagaaggcatcagtaacacacacacgcacacgcacacacaccacacaccatgtctgtttggtttgattctgagcctgagatcctggaaatatttcagctgttgttaagaggctggagttaggacccaggaaggacacagcagtggggatataaatagaaaaggagaacagaacaaagtttgaggagagagacttacatcactcactccccctccacccagagagcaggacggaggtgtgaacttgagccagaccagaaggagctcgagagcggccgcaggacaagcccgaggagcaggcgggcgctccaggggaaaaccacgcacaaaaccttcttcagagaaaagggaagctccaaacctgactgagacaaacggaggctcttgaaataaaaagaaaataccgcaggacaaacagcctcccgtccccgggcgcaggtcgcggtcacagtggtgacctgggattgctttcccaggactgcgagtcgggtttgggtttctcctccctgcattccacagctgctctggtcatcgcaacgtgtttattgatcactgaagaatctcaagttttgagacgaggaagaaacacccattaggtctccaagacagctgtgtttcacaaactttaaggagacagaaattttctcccctggaacctgtgaaaatgtcccttttccaaggaagtgaaggttaagaggtcccgttctcacagaccctcaggaatttcacttggctccgagctttgacctccgagagagccatggaaaagctgctgcggctgtgctgctggtactcctggctgctgctattttattacaactttcaggtaatgtccccaagtggccaggatggcgacaggcttggtttctccggaggctttccctgagtgtgtctcacactgtggtcttttgtgcgcaggtgcgtggcgtctactccagatcgcaggaccatccaggtaagagtgtttccttctcactctgagcaccgctctccccctgcctagtgcaggtatctcaggaacagcccacttgttcatctctgaggcatcagcgaatggcccttgttgggctcctggtccccgacctcactgcctcaccacacactgtgaccctgggcagctctgctacccctcaccggctgagcggtggatggagaagtggttctgggccccttgagctgggtcatatgaaacattgtgattaaggaaatatgatcttcatttgaatgccttctgcctctttctttctctctttctctctttcttcctttcttcctttttttctttttgagatggagtcttgctctgttgcccaggctggagtgcagtggccgcaacctctgcctcccgggttcaagcaattctcctgcctcagccacctgagtagctgggatcacaggtgtgcaccactacacccagctttttttttttttgtatttttagtagagacagggtttcactatgttggccaggctggtctcgaactcctgatttcaggtgatccgcccgccttggcctcccagagtgctgggattacagatgtgagccaccacacccatctcatgtcttcagggcagattcactggtggggagttggagctctggcccatagcagggtctcgggacctccagcctcagagtgctgaccagcttagcctggagcagccgatgagtgggactcgggatagagggccacccttgctccagccccagagccacattccattggccattgtgacacccaaccaggaagcat

SEQ ID NO: 5708 - DNA, 6000 bp, Homo sapiens
acactttgctcatgaagtaagaacttagtcaatgtgtaacccagggctcctgggtttttgggtatgcattgtgaaaaagtacccattcataacaacaacttgagttcgtgttgtctcaaaaagttccaggaagaagctcagccccagcaaaacaaaaaactggtcatatgcagagatgcctgactggagatgaactttggcaaactctcctcattatcatactaaaaactccacccgaggaggagcttatttgtcattttctaaacatgccagtatttggaagcatgatctgcatctgtgctgcctttattccacctctacatacagtgactgagctaactagcccaataaaagccctgttttcagcattgttaggggagacactgctttgggaactctccctggtgtcctccttacttgttgcataaaatcttgctaaatccttcttggtgttgtgatcattggactatcatgcgctatgccattgactttacctattgtataggtaacaaatgtcagtaaatgttcatattatctattattattgtcactagtgtcattgttattactactcctactatgattgccctgtacttggtttaccaaagaggaaaccaaaaatatgtaataaccagtgcagatcctacaggatttcctagtctttgtgaacccaaagtatctgagacaggtctcaatcaatttagaaagtttatttttgccaaggttaaggacactcccatgacacaaccgaacaaagtcctgatgacatgtccccaaggtggtcagggtacagcttggttttatacattttagggagacataagacatcaattaatataagtaagatgtacattggttcaatctggaaatgtgggacaactcgaagcgggaggtttcaggtcataggtagataagagacaaatggttgtgttcttttgagtctttagtctttcactgaatagataacttacatgtgaagagggtagaggaatagtcacttatgccttagtctggctcagtgaatctgcatttttacttaaacaatagggcagaagaagcaatcaaatatgcaaagaaacacaaaaagtggctcaacattcaaagacaggtttattttggagaataaacctgagaggggcttctggccaatttcagtcaggagcattctctgttacagactaagagtattaattggtttaagggtgagagaacttatcaccggcgtggaatgtttctgtataacggagaagtcagttgcagggttggaatgtatctggttggaggggaggttatcttggggctgatatgtctctggtcagggaggggtttggaatgtttctggtaagagatgttatttgtggctcatggtcattctggccttagccattaggctgatgccctttggatttaggtggtttttgatcaaggtgaactttaaaatggcaggatggtgatgctcctgctctgtcaccttgtcttgtgacatgttcatcaccattccatggggaaagtaaaaaaatggggagtttccatggtaaaataaccttggaaaacattgatgaacaaggttaagtaagtttcttttctgaagtttctcaggtcctttttatgtataaatcaccaggagagggtgggatgcatacacagcacttctccaacatatttaaccataaaactcttctcattgcacatatgtaaattgggaatattttgctttaattggaagggaaaatgttaatggtaaaatagctggtaatttggaggatttacatgtatgaaaaaaagaaaatgttttgaacaccgataaaatgccagaaatttaaacaaccatttatataatctttgcagcaactgcattgtgtttaatcaccaagattttacagtgaagaatttgaaactcgaagatgaaaacaaagtcttactgctagtaagtgaaggagatagctgcttccatgaactgaagtacttctcaaatatctggaattatgaagtgaaaggaaagaagattggtaaatgaaagagaatgattattccaggatatgtatgcacaacttccttatttttttcattatttcacccctaaaatttgttaactgaagtctacaaagagtaagagggaaaaggtaagtcttaataatacaaaaagtacagagaaaatgtaaattgctctaagaaaaagcacaaggtgccacataaaatattgtctgttgtgttttctttttcatattttaagaccacaattattttactctctatggggtaatttaatagcaggtccagtgaggcatatgagtagtgcctcatatgtaatagtcctgctttcctttgtatataaaaccagttaaattaagtcaaaaacatgtttaaaactatatggattaaacaaagggactggttctacaatctgcaatgaacatttttttttcctgctttccaggccccatggcatccagcacaaccagcgagagacagatagatggatgatagatagatagatagatagatagatagatagatagacagatagatagatgattgattgacacatgatacatagaatggccagatgcatacatataaacatacatctatgtatcaagcatatatacatttgatatatatggataattggtactgttgtcactgaacaataatatcttccaactgtatccaccaacataacttgagaggttatttttataatttggataattggatatagttttataattggatcagattgtctgacacagatgatttcctgagaggccaccaccctatctcctggaataagaacctccacagagatattggtgagcctgtattgcagatttcctctcctgaaaaaaacctaaaagctcaagtgtgtagggccaagagccacaaaattactaggctgtggccaacaaaccacttttgcaatacccagacactaggttcagtcaacattctttctcatcaggagcactaatagtgtaatttgtgacttaaaagaaagtgaattctctgagtcagtgactattacctaattgcttgaaggattttttccagacaggtggtctggaaaccttttacctattaccttccatccctgaaccatttcaatcttctgcctcctggatatcttggagaaaatgaaccaacacaacacagctttcagtttttagagcatttcccccatacagaacattgtcttacttgatcttcccgatgacctcaacaacaggaaaggcaggtcctttcatttccatttataagacgcacagacccaggattatctagccacaggaagcaggactccagatttcaagtccagcatctcaacgtgacaaccttggtaactctgcatgaacggactggatagtaaagtggaattattactgagaactgcaatgaataaaatcttttgcattttttgcctacgtttcacagagggtgatatttttctgaggcaattaaatttataccacggccacaatactgaaacgttctgaccaacaaagtcatgctcctgcatctacacagcagataactgcagaaacggcttcctttcttccttgtaaaattgcctgaaaacagctcccccttgctgtccgtcgaggcatatcttcaccaacgttaaaacagagctgagggagatcgcatttctgcctccctcccgccctgcagaggggctccagctgttcagagtaacggattactaggtaggtggttgtttcccctccttcccagggcctctttcctctctttgagattgcctctttcttactcctgagcacaggagccgggcgggttttctgtcccttgccctggacagcactgcctggatggccgctgtccggcagctgctctttgtccacccaaaaagatgtccccacgactcagtagtaaccagacggtccccacggaccactgcggccaaatttccgccatccccgctgtgggaatcaggcttttcccgcagaaaaccccaggaatctagagaaaactccttaagtccctagtctccatagagaaaaccaggagacactccccccaaaccccgctgtgaatacaggcacagcagccactggggctgcaaagtgatgagtgcgttcttcccgtcgcaaacatagggtaataaatagcatgcatcaaagacgttactaggaagagatagctctttaagtcacgagcggggagaaatgtttgccccgggaaaatttgcctggggaataaaatttgccagactgctgcacgggtgagctcggtgagaaggaagaaacccggactggaggaggtgaggtcgagagccaggttcaggtgcaggagctagatgcgtggacgccggtgcgtggactggaggtttccaggtaccgcgcttagcgtgcctgttgaagtcaaatgcatggttaaggaggctagcgaggaaggctagtgagggaagcttgtggaaacggctacgagcccagaaaaggcatgactcgtccagttgtccaagtttttggaagggaaaagcgggaaagcgccacgatcccacctactgtgaggaggaatctgcgagtctcccagctccaccccctccacagtgatgcagaggacaaacaccgacgtagggagaggaaaaaataaaactccagggagcggggagtaggcaaccagcagtcttccggcaatagggcgggagggagcgcgtcccaaggaaacaagcaccgcataaatacttgagttgggaacccagtgcttccggaagctcggagctcaccttcccgacctcgccgaagttgaaaaaaggcagagcagggagaggggccagctcaccctgctgagagctgctcagtgggcaggcgggacgctgctccgggagacgcccactggagggatcgcagagcccggcaagctgcgagcgcgccaaagaccctgcgcttcggacgaggagcccaagtcctccgagacggggagggagcggcccgcgagggctggagctccgaagagggccgagtaggagctgcatggacagcatgcgtctctccgccggtcccgacgcggggccctcgggcaactccagcccatggtggcctctggccaccggcgctggcaacacaagccgggaggccgaagccctcggggagggcaacggcccaccgagggacgtgcgcaacgaggagctggccaaactggagatcgccgtgctggcggtgactttcgcggtggccgtgctgggcaacagcagcgtactgctggctctgcaccggacgccgcgcaagacgtcccgcatgcacctcttcatccgacacctcagcctggccgacctggccgtggcattcttccaggtgctgccgcaaatgtgctgggacatcacctaccgcttccgcggccccgactggctgtgccgcgtggtgaagcacctgcaggtgttcggcatgtttgcgtcggcctacatgctggtagtcatgacagccgaccgctacatcgcggtgtgccacccgctcaagactctgcaacagcccgcgcgccgctcgcgcctcatgatcgcggccgcctgggtgctgagcttcgtgctgagcacgccgcagtacttcgtcttctccatgatcgaggtgaacaatgtcaccaaggcccgcgactgctgggccaccttcatccagccctggggttctcgtgcctacgtgacctggatgacgggcggcatctttgtggcgcccgtggtcatcttgggtacctgctacggcttcatctgctacaacatctggtgcaacgtccgcgggaagacggcgtcgcgccagagcaagggtgcagagcaagcgggtgtggccttccaaaaggggttcctgctcgcaccctgtgtcagcagcgtgaagtccatttcccgggccaagatccgcacggtgaagatgacttttgtgatcgtgacggcttacatcgtctgctgggcgcctttcttcatcatccagatgtggtctgtctgggatcccatgtccgtctggaccggtacgtgccgggaaaatagaggaaagtgca

SEQ ID NO: 5709 - DNA, 6000 bp, Homo sapiens
tgcgaactgcttggggtaacatcctagcttcccatggttggcaggatgtagacactcataaaacattagctaaaccagcagagttcagtcaaacccaagaaaaatctcattcttttcattaggtcagcaaagtttaggacttcagtgaagaactttcttcacgccttgcacgagcaaaaagtattcaagggatgctgtgctgtttactcttctctctgttttcttcttccacacaaacatgcatctgggcctttgtattcccttttgtagtcctggcactactgggccaacctcccttttctgtacccttttttatatggctcacacatctcccagtgtccttatttcccactaggaaagaagggaataatccatgtttattgaaagataagagttagtcttctggagggactgctggaagctcctcagagaaaaagagaaacatgcataacttttaagcctccttcgataaaaactgtctaattatttggcttcctcctccctcctttcccaggcattctcttcataccatgcctttgggaccccacgggttacaagcacactcactttgctcaggaccatagtcttggcagtgagtgacttcatatttgattacagaaagcaaagtgtcccatggctttccaaagtacagagcttttttttttttttttgagacagagtcttgctctgtcacccaggctggagagcagtggcacgatcttgctcactgcaacttccgcctccttggctcaagcgatcctcctgcctcagcttcccaagtagctgggattacaggtgcatgccaccatgcccagctaatttttttgtatttttagtagagacagagtttcaccatgttggccaggctggtctcgaactcctgatctcaagtgatctacccgcctcagcctctcaaagtgctgagattacaggcgtgagccaccgtgcttggccaaagtttttgacagcgtttaatgtaatcatgattcaataacactttcttcccgagcaccgtgaccccatttgtcaatgtgcttcgcttttcatttcctctagttcagaagtgctgtgcttgtatttcaaactaaaatgtgcttgccttatattgctgtctttgtcaaaaatacaaatatctgccctgaggccatttctacttcaaagatgcaatatggtgcttggtacaatttgggaaatttcttttttttttctttctttgtttaaaatttacaaatccattcaacaacacatataatgatctgatttccttttttttttttttaagaccatgagagaatgatgcagagattttaatcattagctcattcttttggtttaaaaccataattggtctagagaatttatatttcataaattgttcaatcctatattaaaattcaagatgcttttatttatcatcttgaattgtacgaattaaacccatgcctttttctcttgttttctcctcttgatccatgtaagcaaccccagcccctgaccttcctgaagtctggtcttgtctcctgggcctccagcctcactcctgccctcacacaggcacacatacaattcagggattatgacatattatgcacgaaaacctttttgaggaaagataccaatgtgaagttgtgaatatggactcctgttagaggaggagggcttcctcattaatccgggtgtgctcgcttttctatcgtgtggaggacttccccaaatagttcataatgagtgagcttttgagagatggccttaggaaagattccttctctgtgtagcaggaggaaagggtgaatcgtatttctcaaaaatgaaaccataaacaacaaaatataaaactcttcactggctgggcgcggtggctcacgcctgtaatcccaacactttgggaggccaaggcgggtggatcagtcaggagttcaagaccagcctgaccaacatggtgaaaccccatctctactaaaaatacaaaaattagccgggtgtggtggtgcaaacctgtaatcccagctactcgagaggctgaggcaggagaattgcttgaagccgggaggcggagaagccaggaggcggaggttgcagtgagccgagattgcaccactgcactccagcctgagcgacagagcgagactccatctcaaaaaaaaaacttcagtgtggttctcagtcactgtgatattaacagacacacagtttattagtatgcatgatacatgtgacggctgtggacattgcttttttctctttctgaaatctgtgtgaccagataggttgttgccccttcatatttacaagttaaataactccatatatgttggaatttttgttattaaatggtttgtgattctaattgctcacaaaggtagaagtcaggatttccaatgaaggcatttttggatactataaaccattttcttgaaatgtaatggtttaatttaaaatgtaggcagtctttttttttttttagacggaatctcgcttttatcccctaggctggagtgcagtggcacaatcttggctcactgcaacctctgcctcccgggttcaagcgattctcctgcttcagcctcctgagtagctgggattacaggcatgcgccacaatgcccagctaatttttttgtatttttagtagagacgggatttcaccatgtcgttcaggctggtctcaaactcctgacctcaggtgatccgcccgctttggcctcccaaagtgctgggattacaggcgtgagccactgcgcccggccgacagttttaattataatagttttgaaactagacttgttacaaaggtgaagtgcataagttgcttatgacaatctattcagaagccaacttcatggtttaaaaaatggggaaagggctggacaccgtggctcacacctgtaaccccagcactttggaggctgaggcaagagattcacttgaatccaggagttcaacacaaggctgggcgacatagtgggactcctctacaaaaaaatatttaaaaatcagccaggcatggcggtgcatgcctgaagttccagctacttgagagactccaattctaattttaaggaattttttcagtcctttatttttcacttctgtggccttttgcatggaaatcctttctctttctagaaattgggacgatgaaacacatgagaagtaaatgactgacgtgaggaggggtgaattatgtttctgtactgttgtgtggcctcacctgaccaagagtgtatgttgccatatttcatacctggagacttttcatcagattgaacttttaggaagcaatgagagtcctgctttataaccatgtgccctctggtggtgtgggatgcacggctgactgcagccctagccccttcatgaagggaatgtaaacagaatctgttctagcacttgagtcctctttgcctccgaatcatttttactgtcattgaataacttcttcaatattcttgcagttatattccctgctcagagaggatacacgtagctgttacagaaatggcagcattattccccaaagtaagtcacttcctactcacttggtttaaatccttttaaatgaacagcaagaaatttctttatgacctatatattacattagcttttttgtagcacatgcagttttaaaatatgcagtcgaggccgggtgtggtggctcacgcctgtaaccccagcactttgggaggccgagacaggcagatcacctgaggtcgggagttcgaggccagcctgaccaacatggagagaccctgtctctactaaaaatacaaaattagtcaggcgtggtggtgcatgcctgtaatcccagctactcaggaggctgaagcaggagaatcgcttgaacccaggaggcggaggttgcagtgagtcaagatcgtgccattgcgctccagcctgggcaacaagagtgaaactcaagtctcaaaaaaaagtaaaataaaataaaatatgcagtcgtatagagctttgaaatatttttgttctgcatgaatgttgatttaataagacaaggatatacaagtcgtgctaaaaggcacattttaaaatttataggattttctggaatattttacccacatggattaatatttttcaaaaactacttcaaaataccacatactactaaaattaccctgcatgcactttgacctttgaatcagaatatttcagcatctcttacgctgtgggctgcaaagcttggagtgtgtgaagcacccctttgagaaagggcaggaccaaaccgcctttcactctggggagcagcttggtttgctttagaagaatgtttgtcccctgcttttggatgtctgccctgcagttcagggtaaacggctgtctttttccttttagaaacccaagtctgatatggtgaggacttcccttcgtttactgacgtccagtgcctaccgactgcagtcagagtgcaagaagaccctcccaggggaccccggctcacccacagacgttcagctggtcacgcagcaggtcatccagtgtgcgtacgacatcgccaaggctgccaagcagctggttaccatcaccaccaaagagaacaacaactgacaagggcagggcaccgcctcctctgttttctaggctttataaagtccaatttcaaattcagacgcagaactcttcagatttctacaaaaagaaacatttaatgacggtttaaaactttttaaaagaaaactcagtattatttttgcatgttttctaaccaattttcaactatttaacccacttgccttattttgtgcctatttgctggtttagtttctgatgttcggttgtgttgtcaacaactgttgagttgatcacatacatccaaaagtatagtttcattgtctaaagtttgtgaaaacttttccatcccttaaaactccctgcctatggctgaaactataaatgaaatttttcataaaacattttcttgagagagttcagttaaaaaagaaaaaatcagcgtcatttgttccctgccaagcatcgtgcaataagtgaatttcctggcctacttcataatctctaagtttggggtatctccaagcatgtatgtagagaaaggactttgccgctttttaaaactagtgtcacagtctctcttgggaggaaacaatgaattggttcatttcttctcagtgttttaccctgttacatgttctgttatttaatgttgttatctcaagctcctatctcttgatgttttcttgtcatcttgaaggctccatggaatgagataaagcattgacccaccacaggacatctcatgaagccatgttcagggtaggagctccacgcacatcaccacccattgtcaggtgctctccctcacccctgtaagccagacagtttgttcaaaacctgcagcaaagagaagcatcagtctaacaagccagaactcattttgtgccacccatttaggtatcactaccatgaactatagggaaaagaaatcacctactccctgacactgtgttgtacccttcatccaaaagtcagcttgcttctctgaccacttacagctttctcacatgagttgcttcacatttttcatcatctttaaggacttcttataaggaaagatgtatcgtatcgcagtcatctgagttagtttctcctccatcacctcatgagtacttaaaaattagacatcaactttcaagagttccttagagagtgtgctctagctggctgcctgctaccccaaagctctgaaagagtaaggttgaagtgctggaacatgctcagattgttttttagttactcaaaagccccttcttgttctgaatgtgaaagctcttcccgttcctgcttactgcagccattctgtgtgtgtggttcagaccctggcctagggccggtgatgtggatgagtgaagggagccaggtacacggcagcagggcagaggagactatggggagcccaccgcctacacagtaggggcagtagcccccagctccacgcctgttgccatgtggaaaagtgggcctagggtgg

SEQ ID NO: 5710 - DNA, 6000 bp, Homo sapiens
aagtatgtcaaatagaagcactgaaatgcagttatagaaggcttgctggagaggtggtatttgagctcagtcttaaggatgagttagtcaggcgattgggggtggaatcagtctaagagggagaagagcatggtgcattctgggaactgcagtcaagcacaggggtgagagcagggccagctccatagtcattacctgtgtgatcttgggcaatttattttaacatctctgagcctaatttgctcatctataaaatgaggataataatagtgtttttgtcatagtgtcgttgtgaggattaaatgagttagcacatgataaagctcttagaacacagaatcatcactggctgggtgtggtggctcatgcctgtaatcccagcactttaggaggtcaaggcaggtggatcacttgaggtcaggagttcaagaccagcctggccaacatggtgaaacccggtctttactaaaaatacaaaaaaattagtgggcattgtggcaggtgccagtaatcccaactactggggaggctgaggcaggagaatcgcttggacccaggaggcggaggtcgcagtgagccgagatcgcaccattgcagtccagcctgggcaacaagatcaaaactccgcctcgaaaaataaatttttttaaataattaattaattaattaattaattaaaaaagaacatagaatcatcagggtgtatgttaccaagagacagtatagggaaagagggagagagcccacacatgaaggccgagggacagtgagtgtcttctgtggcctcccaaggagtttgggctttatctgtgtatggtagacagctgttgcaggattttaggacggttgacttttgcattcctgtagtacctggaatcaggtgcagggtctggagtcacctgtaggagtggtagagccctctagtggcagtctgtagaatgcagtgggagaaagacccggaaaaggggagtaattgacgaatgccaccgttggctggcgaggtggctcacacctgtaatcccagcactttgggaggctgaggcaggcgaatggcttgagcccaggagttccaggccagcctgagcaacgtggtaaaaccccgtctctacaaaaatacaaaaaattagctgggcctatgcgcctatatgttcccacctacttgggaggctgaggtgggaggacctctggagcctgggaggtggagattgcagtgagctatgatggcgccactgcactccagcctgggcgatagagcaagaccccgtctcaaaaacaaaaaatgaaaaaaaaaaaaaaccccaggttagacggcttgggtgactaggtgtctctcagaagtgagatttgtatgcaggcgtaactagatagtggtgcttaaacaaattcaaaaagtagacaaaaaacgggtgtcagaaaagcgaataattccagtgtagacatccagatattaggagacccccaggtagtgagagtggtcgcggaggtggctgggtagttgtgactcagtatcaaggagtgggggagccacggagtccacagtttctccgagagcatgtcaggtgggaagaggtcagagagggatagcccgctgatgctgtctccctaccgccagtctggcctaactgtggaacttcctcttagggtcctgtttccagagggactcctctattcttggctcatcggggattaatgatcaagcccttcctgcctagttcccagctctgccccacttttccagctgtccctaccctctcagaggcccccttactgctgtaggaagctctcccgagttctctccacagtccccttagtaagcgggattccagcccgtaccagagagggacaatcggacagccgtggcggtgggcactctctgggaaagagcagcagctcaggaagacgagccacaacagaactgtgggagcatctagcttcttctggagagcgggagggccggagggagggtcttgcagccctgcagacagtgaggggctgggggagtgactccacggtaaactccttcctatttaggatgcagctggggctggagccaggtctggctatcgtggtcgccgctcccctcacaccccccatgaacgcttcgaggggctcacggtgcttaaggctgcgcaggtgagcacaggaggcacccgggcccgtctgatgcccagacctggaggagaggctgtgcaggaagccgggccccagggcctgggcttttgtgaaggagctttcttgggaccgagactacctgataggacccagcgtggagaaaagggatgttctgagagctggggccggggttgttgtcatggagagagaaggagcagtttgggctgatggacagagctggatgctgacagactccaaacccatgggtggagagcggcagagttgggcaggggctagggccgagaccaccctccccttgccttcctccttttctgccctgcctttcactgcctgcagctggcccgggctgggacagtgggcagtcagggtgctaagctgcttctggaggtgagcgagcgggtgcggaccttgacccaggcctacttctccccggaacggcccctgcatctgtccttcacccacctggtgtgccgcagcgccatagaaggtacgacagggaccccccactgctcttctccaacctcaggccctgcccccaggacactgcccccaagagccccggggtggacgtgcacggcctgagcccacagggtggcagatgggcacaggggcacagaggtacccccagacccctttgtgtcctaggagagcaagagcagcgcatggacctgagtcacccagtgcacgcagacaactgcgtcctggaccctgacacgggagagtgctggcgggagcccccagcctacacctatcgggactacaggtgggcagcccctctagtggtcaggcaggtgggcagacaaaggtcatcccactgccggcctgggcctgggttggggtctcactgcctcttgcttttttccctccccagcggactcctctacctcaacgatgacttccagggtggggacctgttcttcacggagcccaacgccctcactgtcacggtgcgtggagtggggggtgtgacggtgtgacaaagggcccagctgtggggtcaggattcaaaacagaaggctccagaggcaaatgcagggaaatggccagggcttttaaccctttcacttccccgcctccgcagccctcccgctgcttcctccgtagcaaggtctctaagtggccgaatcaaccctaccatcagtatttgtctcgcctcctaaagaagggtgaatgaagcacagcttgcaggtgcctccaggactccatggccctattctagggatttggggaacttgaaatagtccttcctctttgcagcgaggtgagcacagtggctggcgcacagataccagggccgccttgactggggctcggattctgaacctttctgaggtttagtttcctagactggggtgataataatagtacgtattttaaagggtcattgtaggaagtaatttaggtaatgtacctaaaagaatgaggcagcgcctggtaatgataagcaattaatgaatgttaggtgggaaatttccggacaccaggggctaggattgggtaggaggagaggggcagtgattgttcatctgggtgtggggtgtgaaaatggttccaatatctgtatccccttctgcatagagtctggtactgcatgcacagccccagattgcttcaagccctggattcaaagggctgagtgggaaaaatcagggtaccaggggtcaggaaccaacaggagaccatccgtggagacccctttttcctttggttcccaactcctcttgcatttttgctctgcaagttgaagctgatttctcatttgccccaagctagtccctgaattaaggagtaggaagtggtagcgagagagctgatcctctctgtgcccctgtccccatcctgctctagggagtgagggccaagttctctgagagagccaatccctggagctgaacctgccctcatccctccaggctcgggtgcgtcctcgctgtgggcgccttgtggccttcagctccggtgtcgagaatccccatggggtgtgggccgtgactcggggacggcgctgtgccctggcactgtggcacacgtgggcacctgagcacagggagcaggtaaggagcggggtaggaagggatgtggttctcctggtgcgtgaagggtgggcaaggagcccccgagaaggctcacagtcggtgagggtcaggggctgagctgacccagggaaggtgggtgcagggaatgggccacactctcctccccaaccccaggagtggatagaagccaaagaactgctgcaggagtcacaggaggaggaggaagaggaagaggaagaaatgcccagcaaagacccttccccagagccccctagccgcaggcaccagagggtccaagacaagactggaagggcacctcgggttcgggaggagctgtgagtggctgagccagctccttgaggatgtggccacttgacttgtggaaggccatcttgatgccaggacacacaggaagcccctgtgtgacatcaggagcagaacagcaagctctctgtccctgcacccccaccatcttggggacctacaagggcctggactcagaggacagtgcacaggctagcctggagctcaccaggcctggggagctgggacggggccccgctgccggacctgcagccctggacagatggggaacactgtgcctccctgaacagaaatggcaggggaggaggctgatgctttaaatgaagaggatggtggggttgggaggtataaccctgctcctctctcccagtctgtgcaataaaggtcgtgaagatctctcagccaggggccagtcaagtgtatcacagattctgtgatggctggaggtgggggtggctctggctggcctgggaggagacaggtgtctttgggcctcccagaggcggggcgcctggagcctgtgatttgtcagggaaatctcagccacctgctcccctcatgcaaatgacccaagcccctggcagctgctccttaggcctccaagtgtaagccctgtcttccctctctgagctttgctgagacttagggccgcctgctttctctctgacccctgctttcacagcctcgagagggcaaggagggggccagaccccagcctgggagcagcgtgcgggccttccctccacttgaaatccgttgcccgcccacaataggggcagacctgtccatccttctctgtgggtcccctgtacctttctcccccaacaggatcagacccagaggcagctggttggggtttgtcgagaagaaggattatccagatcagtcctttctaatctcagctcctgcctgtaccctcccatactcaccaaaccctcttccccaccaccctgagctgaggagcacagtttgaggtactgacaatggggccatctatcacccttatatcccacctcctggcctggttgctaagtggccctgactgccaagatcatcaccatggatgggggccgggaccaggggggccactggagctgtagttgtctgctcctttgcacccctcccaaaccccaacccttaatcctcacagctttgctctaatcctgtggggcctgatgctcttatctctgcctgcagagactgaccagggaagcaccccttcaccccctcctctctcagggcttgtggtgggggctgcccctctctatggccccacactcctgcccccaaccctcctcccggctgggcccaagtctctctggaatccgtacacctccctccctccccccaccccttccccccacccctgccagctgatttcatttgcctgacgttgtggttggctctacccttccctgtcaggcccccccaaccccccgccggtcggggccaggccaggccaggccagctcctctggcagcagagcctgggcaggtgacgggcgggc

SEQ ID NO: 5711 - DNA, 6000 bp, Homo sapiens
gtacatttcaaaggtgtattgttgctgtaacaaagtacaaaaaacagggcagcttaaaacagcaaaaacacgtattgcctcatagttctggagggtgcaagtccaagatcagggtgtaggcagggtaggttccttctggaggctctgaaggagaagcatcccatgccttcagtcttgggttcctcggcttgtagcagcatcactccaggctctgcctctgtcttcccaaggccttctctgtgtgtctgtctcctctgtgtctctgtatctctcttcctataaagacaccagttattggatttagggccacaggaatggctcttcctctcacacatggcattgtgaccatccctacttcatgccttcagtgcccctctgcttctgagtctgggactccagactcaagctggccactggacactggccagatgcctctcctcttgcccacaggttgtgctcatactttctttcttttttttcttagagtctcgctctgttgcccagcctggagtgcagtggcaccactatagcccgctgcagcctcagcctcctgggctcaagtgatcctcttaccttggcctcctgagtagttgggattacaggtgtatgccaccaggcctggctaatttttttttaatttttgtagtgaggagggtctcactacattgtctaggctggtcttgaactcctggactcaagaaatcttcctgcctcaaagtctgggattacaggtatgagccactatgcccggtgtgtgctcacactttcttaacaggcagggctgacacatgcctctgtgcttctgtgcattctgccccctctgcatgaaatgcccttcctgatccttgcccctcttctcttctccatctgaaaagccttaactcatcctttaagcctccctgcctcagtagtgcctactctgaattccggggtgagtattgactgcagctttttgtgcctgaccgtggtccttgtgcattttttctggtgtgacacctcacacaatgcattgttttttttttttggtttttttttgtttttgtttttttgagatggagtcttgctttgtcgcccaggctggagtgcagtggcacgatctcagctcactgcaagctccgcctcccgggttcacgccattctcctgcctcagcctcctgagtagcagctgagactacaagcgcccttgaccacgcctggctaattttttgtatttttattagagatggtgtttcaccgtggtaaccaggatggtctcgatctcctgacctcgtgatccgcctgcctcggcctcccaaagtgctgggattacaggcatgagccaccgcgcctggcccacaatgcattgtttttgtttgattactgcccatctctccaccagactgagctgcttcttctttttttttttttgagatggagtttcactcttattgaccgggctggagggtaatggcacgatcttggctcactgcaacctctgcctcccaggttcaagtgattctcctgcctcagcctcccaagtagctgggattacaggcatgcaccaccacacctagctaatttttttgtatttttagtagagacgacgtttcactatgttggtcaggctggttttgaactcctgacctcaggtgatccacctgcctccgcctcccaaagtgctgggattacaggtgtgagccaccgtgcccggcccacactgagcttcttaaatgcagttttcttttgattctccagcagagttacatagaagaccatttatagttgctaaatgactcactcaataaacggacattcccttcagaggataaagatcgagtatggtctttctcgtacttctgttgtattccctacaatgcatggtgcttaggtggctctcaaatgcttccagtgattgaatggaagaaccactattagcaggaacctggcaggagctgtggttcaccgacactagcagctccaataaagtaataacctaaggaaatggaattcctctccgccttcctccaaccaactcaggtacttcttatatgagatttaattgaggtcagggaagggaacaagtagcaccttccatcctgccagtaaaaaagcaaagggagagaaaggggaagccccaggcctgaggtcctgcagccgggaattccaaggcggcattaggaagggggtcaggatcagggcactggcagagccgtctcttttcttgcttccttcctgcaatcaagagtggggatctcggtggtgatggttggtggacatcagaagggaaggggtcagcagggactgagttctgggacttcctgaatgaggcagacccaggcccgtgatcttgggccataggccccctaacccctgcccacacgttgctggccttgcagctgaatgaaggtcctctacaccatcagatcagcctctctttttgggggaacatggcgcccttattgtggggctctctcttctcctctcctcatttccagtctggtgagctttcttctgtgttgctcaacaaagctacccatcactttcaaccgggtgacactctaaggatgataactagagttgggagtgaaacatgggtctccagacccccgtcctactgtttctttcatttattcccaagaaccctcaaccttggtctgcagaccattttaataggatgagagacctaggaagtgaatgattccatctactggtcctgtccttcttctcctctggggcatctcaaaatcactcagataccccagaatcactcagctattccacctgccctagtcctccctgtcttcttccagagagccagcccccagggacacaggtgcagggccgggactgggagaggcaagcaaggggactagagctcaggatttaaaggggcactcactcttaaagttgtggagtgcctccttgaaatctgtgctctggttgcctcattggcctcatctagtcctggctttgtgcaggcaggtgtctccataaagggataggaggagaccaagaggttaagaggagagtagaaaagagagtactaagaggacaaggtgggacatccaaagtcaatggcactactcaggaggctgaggcaggaggatggcttgagcccaggagttggaggctgtagtgagctatggtggcctgtgaatagccattgcactccagcctgggcaacatagtgaaacactgtctctaagaataacaacaacaacaaacaaagccaatagcaaagtgaagagcaatgactgaagacaggttcagaacaagcatccccacacatgctctctgtctcacacaccctggacctgccagacagataccatccagagaacagtgaacaaaggaaagatcaaatacactcatcacattctcattaggaggacctaatgggaatgtggtcctggggagggggtgtagagatagggtaggatccccaaaaccacatcatctttgttctttcaccatcctcagacttgacgtcttttgctcgatgtcatgaaactcaccctagacatggtgattcagactccgtgctggaagagccaccagggacaactagtcctcactatccagtgtggtagccacaagccacacacactttttgagcaatggaaatgtggctggtccacactgacaggtgctttaaatataaaagacacactgggtttttgaggatatagttggaaaccaaagaagtaaaatagccccttaatatttttaaaaatattgattacatgttgaaatgatcatatttgggatcatatttgggtaaaaaatatacagtgttattaaaattaattttcctgtttctttgtacttcttttaatgtggctagaaatttaacatgacatatgtgggccaggtgtggtggctcccacctgtaatcctagcactttggaaggccaaggctggaggatggcatgaacccaggagtttgagaccagcatgtgcaacacagcgagaccttgtctctataaataataaaaagaattacttgggaggctgaggcgggaagactgcttgagcctgggaggtaaaggcttacagtgagccatgatggtatcactgcaccccagcctgggtgacaaagtgagagtgtctcaaacaagaaacaaacaaaaaaattagccaggtgtggtaatgcacacatgtggtcctgggtgcttgggaggctgaggtggaaggatagcttgagcctgggtgattgaggctgcagtgagccgattgtgccattgtactccagcctgggtgacggcgagaccttgtctaaaaaagaaaaaacacacaaaaaataaaaaacaaatgtggcttatgtttgtggcttgaattatagttctattgtacaatggtagtctagttcaacttcttgaacagacgagaacgctggggtccggagagaagccctgacttagcggatggcacacactataaagcactgtcatttgcagtcccaccagtctctcagtacccacccccactctgccacacacacccctgggagtcttaggtgtgaaatgggtggactcacagacccctgggctgcatacctcaaagtgttccaacactcaaggcactgcctgtggttttttgggagtgaaataaaaacctaacaatggtggggtcacagtctccagtaggtcacattttaaaagcactttaggctctggagacttggggtgtggggagaagtgaagagaaagctggggagccctgggccttcccccatttcttcatatgcagaataatccagattagtttaccaagcgcgctgataaccactttaaaaacagagtccctcctgcctccccgtggcatggggtagaacctggcttgagccccgacacaggcgggcagccactccaggatcgttccacacgtaaacaaagacgagtttcggtccgattggcttgatcctggaagaggagtgggcagtggagggaggggaaaccaggcaccaaagcaaattccttcatttcataatttcatctggcgcccccgttcaatcagcctgcattgtcgaggctttaggagaggcagttaggaaaggagagatactgatctctcagccccagggcagcactaatggtgcctgtctagactctgacaggtggagctgctgagctaactacggacctggtgggggaagttttccttggctttcacgtggctttggctggggagccctgagaaggtggctgcctcctttttctgaagcctggcttcccatacggcagtggctgggggagagtgatggagagaaaggctaagctaaggtcaaagaaagtggaggaaggctggcttgtcccgctggacttgacggcggagctgctgcaatctcgcgggctgggcccttgccccgggtggacccgagtgcctgcggggaggcgggtgtggctcccccgggaggtgacagctggcggggcccgtaaggagctggtctgctccggctcccctctcgtagccggcgccctgggaccagcgcgtgagcacgtctcggaggagtccgatgcgctgggcagggccgggtggtcacccccgcccagcttccaggggtgactgtgcctctgacgtcagacggtttttgggtcattccctggcacggggactttattttcataacagcatgaagtgccgtggaactggaataggcgtgtcctctccctcgaccctccccctccttgtccctctgctcacccctcgctcgttccctccctccggcgagggccgcctttataacaactgctcagagtgcgagggcgggatagctgtccaaggtctcccccagcactgaggagctcgcctgctgccctcttgcgcgcgggaagcagcaccaagttcacggccaacgccttggcactagggtaagtgaggcgccaggagcccagagcgctggggcctccggatttaaatcgtctggggagagcggggcgttgggaggggtgggatagaagaggagagaaatcctggtaatggaatacagttggctatgagaaaaaaattccctaggaaaca

SEQ ID NO: 5712 - DNA, 6000 bp, Homo sapiens
gtgttaccttatatacatataccaccagatttttattcaagagttaatagatatttggtgttttccccacaggttttgactattataaataaggcccacatgaactttatgcatgggtgtgcagtggataatatgataagggtaactttattagaaactgacaggccaggcacagtggctcatgcctacaatcccagcactttgggaggctgaggtgggtggatcacctgaggtcaggagttcaagaccagcctggccaacatggtaaaaccccatctctactaaaaatacaaaattagccagatgtggtggcacatgcctataatcccagctacttaggaggctgaggcaggagaatcacttgaacttgggaggcggaggttgcagtgagcagagatcatgccattgcactccagcctaggcaaaaagatcgagactctgtcctctgtctcaaaaaaaaaaggaaaaaaaaaaagaagggaaaagaaactgtccaattattttccaaattggatataccacttttacattcctaccaatatatgagagatccagttactacacatcttcatcaatacttggtattgtcagtctttttaattttcagccactctggagtatgtagtatatttttctaatgactaatgatgttaagcattatttcaaatgcttacttacattggtatatcttctttagtgaagtgcctgttcaaatatcttgcctattttactttgggttgtcttattttactgagttattagacttctttatatattcaagctacatatcctttaatacgtagcaatataatattaaaagcctgggaggtttttcatagaaatttgcaagctgattctaaaatgcatagggcaaagcaaagaccctataacagccaaaactatgagaacaaagttgaaggacatattacttcatttcaggacctactctaagccatgtaatcgatgtatacaggatcgacatacagaaaactacaaaatcatgattttaaaaaccaaagaagatataaataaattggagaagacacaaataaatagaaagattctgtgttcatggattgaagactcaatattgttaggatgtccatttttcccaatttgatctatagattgaatgcagtatcaatcaaaatcccagaagctattttatagctattaatgaactagccctaaattttatttggaaaggcaaaagccatagagtagccaatacaatattgaagaataacaaagtagggggactcacaccatctgatgtcaagacctacagatggcgaataagcagatgaaaagatgctcaacattataagttattagggaattgctaataaaaacaacaaagagataccactacacacctattagaatggctgcaatccaaaaaactgacactatcaaattcttgggagggatgtggagcagcaggaactctcattcattgctggtcagaatgcaaaaaatgcaaaatggtacaggcactttgatagtttgacagtctcttacaaaattaaacataatcttaccataccatccagcatttatgcttctaggtatttatccaactgagttgaaaaatgtatgttcacataaaatctccacatgaatatttatggcagctttacagtcaatcctccttacctgcaggttttatatttgtgattcacctattttctaaaattaacttgtaaccccaaaatcaatgctcatgatacttttgtggtcattcaaagatgtgcagagagtagtgaaaaatttgagtcacctgaagtggacgttcccaactgagcttgagcaactgagcttcccaactctgccttcttgtttcaattctcatattgtagacaagtaactcttttgcagtcgatttagtgccacattttttatgcatttatgttttttgttggtgatttcactgtttaaaatggtccccaagcatagtgctgaagtgctgtctagtatttctaagtacaagaagcctgtgatgagctttacaaagacaatacctatgctagataggtctgaatcaggcaaaagttacagtgtggttggccatgaattcaatgttagtgaataagcatatgtacatccagacaaaggaataggaaattcactgatctgtatgtgaggtcctatggaaagtgctaaaataacaggacaaagctatgggaaagatagaaaagcaactaaatttgtaaatttatgaaatgattagcaatatttaaaatgcatagtgccctctcacccctccttttcaacatcattctggaagtcctaatgcagtaagacaaaagtaaaattaaagtatttatgtgtgtgtgtgtgtgtgtgtgtataatacatatgtgtgtgtatatatatatataaggaagaagtaaaactatctttgttcacagataatatgatcatctgtgtaaaaaaatccaaaagattgatgtaaagactgctggaactaacaagcaattattgcaaggttgcaggatgcaagattaatatacaaaagtcaatcactttcctatatttcatcaatgtaaaaattgaatttgaagttaaaaacacaatatcatttacattagcacccccaaaaaagaaaactacaaaactggtgaaataaatcaaaccataactaaatagagagatataccatgtttgtgaataaaaagactcaatattgtcaataagtcaatcttttcaagttgatctatagattcaacctatgtcaatctattgactgatttatagattgaatctatagattcaatgcaatcccaaccaaatcccagaaagttattttgtgactatcaacaaactgactgtctagtttatatggagaggcaaaatgcccaagataaccaggataaccaacaatattgagggagaaaaataaatgagaggactgacactacctaacttcaagacttactataaagctataaatatccagatagtgtggtattggacaaagggacaaatagacaaatagattactggaatagaatatatatatacagcccagacatagatccacataaatatggtcaaccgatctttgacaaaggagcaaaggcaatgcaatggagaaaacataatcttttcaacaaatgattttggaacaactggacatctacatgcaataaaatgaatctagacacaggctttatgcccttcacaaaaattaacctaaaaatgaatcaaatgcctaaatgttaaagacaaaactctaaaactcctagaatataacacaggagaaagtctaaatgatttggggtatggagataactttttagatgcaacatcaaaggcatgatccatggacataatcattgatcagctagacttcattaaaattcagaatttctcctttcagaaagatgttgtcaagggaatgagaagacaaaccacagactgggagaaaatatttgcaaaagacatattccataagggactattatccaaaatatacaaagaacaataagaaaatgaacaatgcaatttaaaaatgggcaaaaggacagacacctcactaaaaaataaatacagatggaaaataatcatctaaaaagatgctccatataaatgtcattaggtaattgcaaattaaaacaacaatgagataccactacacacctgttagaatagccaaagtccaaaatactgacaacaccaaattcttgtgaggatgtgaagcaacggaaattctcattcactgctggtggggatgcaaaatggtatggtcactttggaagatagtttgtcagtttcttaaaaaactaaacatactcttaccatataatcatttgggtatttactcaaattagtcaaaagtgtatatccacacaaaaccttgcacatggacgtttatagccactttattcatagttgccaaaaattggaatcaaacaagatgaccttcagttgagaagtagataaactgtcatacatctaaacaacagaatattattcaaccctaacactaaaaagaaatgagcaatcaagacataaaaacacatgaaggaaacttaaacgcatattaccaggcaaaagaagctactctggaaagggttcatagaggatggttccaactatatgacactctagaaaagacaaaactatggagacagtgaaaagatcaatggttgccaggggttgtggggagggagggatgagtaggcagagcacagaggatttttagggcagtgacaacattttgtatgatgttataatggcagatacatgtcagtatacatttgtcaaaatcatagaatgtacaccaagaatgaatcttaatgtaaactatagattttgggtgataataatgtatcaatgtatgttaattaattataatgaaaggaccactctagtgtgggatattgatagttggggaggctgtgcatgtttagggacagaggtatatgagaactttatacaatttcagctcaattttgctatgtgttgggagaaaagctgaggcaagacttgctagtctgacataatataaaaagagtcttggaacatgtcctgggtccagagtttaaaacctcttgtgccctatggaacaccaagctctgtgcttaagggtggaaggctgccctgctgcattacaacctaagcccagggcataaaacccctcatggcttgaatggaatccagggctcagggcataaaaccccccatggcctctggaatgtgtctagacttgctggctccttgcttctagcagttccagtcacatagattgattgcatcttaaactagaagaacatgtttcccgttatctccatatgcttcagagaaaatgctaaaccatcacagctgtagatcacgcacttgatgaatcactacctttcaacccccacatcctcaccacctgtttctttgtttgatcaccaataaatagcgtggggtcccagagctcggggccttcacagcctccatactagcattggctcctggaccaacactatgtactctttaacttgtcttgtgtcattcctttgactccaccggacttcatagcccccatggcctggtgttgggtctgatcaccccaacatccctggtgcccaatgtggggcgacgaagattctggcaatggaatgctagagcgtgtggaagtggaggacgcatcatcagaggacacccgaggacgactgaaggaagctcagcaggtaagctgggtgctcagaagaaccagagtaactatggggcaaagtgcaagcaaacatactgcttatttaaatttcttgaggcatttattacagagagggggagtgaaggttagtactcagaatttgttaacacttttcagtacagtagagcagttttgttcatggttcccagaacaagggactatggattggatgaatgggacagaattggaagagagtttaaaaaggcgtataaagatggagcaaaaattccagtttctgtctggtcagtgtgggcattaataaaggcagctcttgagctatttcaaacagatgatgaggcagattcagaaaaggaagagaaagatgagtgtaaaaaactaacttcagattctgaatgcgaggagcaaaaaccagaggaaattaaagaaaagaaagggaaactgaaaagggtatgttttactagcccattggctctgcctgctgaattgaatggccacctcctccccatccctctaatgggcaagaagatgaattagctgcaaaagttaccactcctgtagtggcaacattaaaatttggagcaattggtggtgctacacaaaattctattcaaaaggctagagctacgggagaccttgaagcatggcattttccagttactataacccggcaaggaggacagaatataactaattgggccaccttttcccttacattgttaaaggaattcgaggaggccattagtcaatatgggccaaactctccttttgtgcaaactttgctaaaaaatatggctcttgatagtaggttaataccacatgattgggatacttta

SEQ ID NO: 5713 - DNA, 6000 bp, Homo sapiens
gcagagacgctcctcacctcccagatggggtcacagccgagcagaggcgctcctcacatcccagacggggcggcggggcaaaggcgctccccacatctcagacgatgggcggccgggcagagacactcctcgcttcctagatgggatggcggccgggaagaggcgctcctcatttcctagacgggatggcggccgggcagagacgctcctcactttccagactgggcagccaggcagaggggctcctcacatcccagacgatgggcggccaggcagagacgctcctcacttcccagacggggtggcggccgggcagaggctgcaatctcggcactttgggaggccaaggcaggcggctgggaggtggaggttgtagctagcccagatcacgccactgcactccagcctgggcaccattgagcactgagtgaaccagacaccgtctgcaatccccgcacctccggaggctgaggctggcggatcactcgcggttaggagctggagaccagcctggccaacacagcgaaaccccgtctccaccaaaaaaaaacgaaaaccagtcaggcatggcaggctgaggcaggagaatcaggcagggaggttgcagtgagccgagatggcagcagtacagtccagcttcggctcggcatcagagggagactgtggaaagagagggagagggagaccgtggggagagggagggggagggggagagggagagggagagcagaaatcttaaatgaaattatgtgcagaccaaatacaagacatctacgaggcaggctcagcctgtgtgccatccctgtgggacccctggtgtagacctgttttggggtatctggctggggaccctggggatgagtcatgcagatttacccaaaaccccagtgatctctgacctgatgagaagtcaaagtttttggcatccattatacaagttagtttctttcttttttcttttcttttcttttcctttctttttttgagatggagtctcgctctgtcacccaggttggagtgcagtggcatgatcttggctcactgcaacctctgccttctgagttcaagcgattctcctgcctcagcctcccaagtagctgggactacaggcatgcaccactacacctgactaatttttgtatttttagtagagatggggtctcactatgtttcccaggctggtcttcaactcctgacctcaaatgatccacccgtctcagcctcccaaagtgctgggatgacaggtgtgagccactgcgcccggccccattctacaagtttccatggtgtcctggcttctcacctgtccactagcagctggacgggaaaatggcaaggggtcatttcctgtactgtaccgtgaggcagtgattagctacgtgtggctcgtccaactagagatgtgctgtgagtgtaagatgcacactggatttctaaaactttgtgcaaagaaaagggaaatatctaattagtaatttcatatggattctgtgttgaaatgacaatattttaggtttttgagctaagtaaaaatacattattaaaattagtttcaccttttttattctacttcttaaaaatgtgcttgctgctagaaaatttaaaatgatagatgtggcccatattatgtttctgtgtgatagactgctctggatcaagagtcggcaaactatggccctcgagtcaaatctggcccgttgcttgcttttggaaataaagttttattcatgcatgcccatttgtttgcatattgtctgtggctgcttttgcactgccatggcagagttgagtgtttgtgacacagggcgtgacccatgaggcctgacctcgttcctgtgtgacactttaagaagtttgctgcccctgctccggctcagtgaaggcaggatggtgattattccctatttcattaattcttaaggccttgcactctaaggtctcaaaaagcatttatctcataaagataaacaaatgcatgatgagttttgatgatgtgctctaagaatttagtgtctcagagtgtgaggaagaacgtgagtattctggagatggcggtttggtggaaatatgggagagttcggtcagcctctaagtttaattctgatgctgatagttggagacaaacagttaagactgtgtgtgaataatgcagatgagtgaaacggacatgagcgtatgaggcagtggggatggcggggtctggagtgggctggggacacatccactaagccggtgccgctcagctgtggtcaattatggttttatgggaatgtgggctaaggggtgtccaagagtctgcttttttaaaacgaagtagaaaattcacgttttcatttaagtctcctgattaggaaacagtagaaattaatttcattgtttccttagaataatagtgagccgaaccaaacatggttttaaggtgacctgaccaagggcctgagtagcttctgctttctagagaggtcattttcagtgaacacgagtgcttccacgtcagtttggtttctcgccccaagaaaagcgcatccagcaggtcatgattttcccacacgtctctccactccacgggctttcactgagggcctgccgtgtcccccaggcgctgtgctagggcccctgccgtcactgagcagtgttcattctgacgttccggtgctggtcactgactcgacagggctgccacaggagcaaataagataacgtccataaaagggcttcgtaacatatcatgtggtccatgactcagctatttttgttgactgccgtgcataaaactgaactggtggttgatagagacccattggaagatgcggggaaaactgaaggtcttcaagtttgttgcctaaggacaggtgctgagcagtgtcattttgtccacctttagaccttcttaaaagccgtgggagagatccttctactgcctggttggattgctctgtcagaggtaagagaaaagaacatggtcggtcatggtggctcatacctataatcccagcactttgggaggccaaggcgggtggatcacttgaggtcaggagtcaagaccagcctggccaatgtggcaaaaccccatctctactaaaaatacaaaaattagccaggcgtggtggcgggcacctgtagtcccagctactcaggaggctgaggcaggagaattgctggaacctgggaggcggaggttgcagtgagccgaggttgtgccactgcactccagcctgggcaacagagtgagactctgtctcaaaaaacaaaaaaaaaaaaaaaaaagagagagagagaaaagaacattttgatcttcaaaacgtatgtgcctcgggaaccattttgtcttcctagaagtggcataatatggcccagtcacatccacaaaaagaatgatgtatctcccagtcctgacatctgggatataagagctcattttgagtagacatgcaactgattcagaatgccttgtcctctaaggcaaaagaaatgcacgtgtgtcagtaatgtgttactgtcctaaacatggaagaaggaaatgatggttttttccccatgagaaatgtgtacttggttcatcctggtcatttcatgtaatatgtattttttttttctttaccatcccatcattcttgaatgacaatagaaagctttttatgttaaaagtcactggatttagtaagaaaaaggagaatacatgacaatatgtacttcatgattaaggtgcagaaaaaaagcttctcttgttctctttactcaaaatagctagaaaggagaatgaaataatttttcctatatttctgaaaataacttgattgtacttatttaaaaagaaaacaaataaatagttgtggagaagttagaaaatgcagataataaaaaacaaaataaaaatcacttcaaatcctaaaactgagattattaacattcttgtatatttccttatagtctagttttcaattcacttatatatgtattcaacagatatactgtatatttgacttaatttgtttttccttaattatgtcaataacactttccaatgatactaagtattcacctgcaacactgtattagtcaggacaggccagggtgcactgcagtaacaaatagatccctacatctcagtggctcagcacagtagaaatttacttctctgccatgcaaagtccagagtgagtcagaggagcctcttctccacccagatactcagggatcctggctccatctgtcttccggtgctggcttctcaatatgtggtttccaaggttgccaggcaggggcagagaagggtgaggaggactcttaactgccttggcccagaagggtcccaaccacaccaccatgatattaaagtgctcattctcctaagccctgataatatttgaaaatgtttgccagtttgagggcagaagtggcattttattctctcattattaataagattgcgttagagtttacatttgataaacttttgtttgaataatttcaagtggaatgagattaggtttaacagtggcaaagggagaaaaaaaggctcaagaatgtaagatggatacagtcttacctagaaaacaattcctttttaaaaggtttgacctctttcatgatttcaaggggactttgtgtccaaagctgcaggctgggaacacccagaggacagccaatggaagtatccaggcagacgtattttgtgcatgattttaattaactgcttttgaatgcaaaatatgcaaatctgttacaaaatatgaataaccaggaaactgtccagactcaggcagggtccaatatgcattaaagagaatgcatgaatcggtctctaccccacagaactgcatgccagaaacacagacttccatgtgcttaactgggcctggtgactgaaatcaggctatgggcctaaaagcaaatatctaaaattggcctcagcattctatttccagctcatgaggctcttctgaagtgcgtgtttgtgggagaatgctgaggacttagcagcaggcaggtgcttccccagaaaggcaggaagagaagcagtgaaggcagagctcactggcccagctcagcagggcttaagagaggcctctcccctggtgatgtgtgtctgaggatgagggccccctgctttcttgggggcagtgtctaccaggatcctctgctctggaactcagaaaggaaagagggctcttggagtagaaggcaagctcctgggaagtcaaggcagccagagatagctctgggtgccggcacctcggaagcagccacccttcatggagaaggggacagagctgctggtgtccccatcccagagtggacctgggggcgatcagcccctcctcgtgaagcacagggaggtagggggagggtctgggatgtgctgagggtccctctgtgagttcagggaggaggcaggaccaggagttgggtcccctcagtccccgtgtctaagtgtagaaatgcaggagccggcgatggctggggtgatgggtccacctgggctgtgtccatgctccgtgagctcagtcgggtgtgtggcctccgtgtggtcccctcctgatccatgggaaggggcagttgtgtgacttcttcctccctcgtggccaacgtggggaaacttgattttgtgtgcctggtgcacctgcctggtgccctggctgagtggggtggattttcatggctcctggtgcttgtgttgctgcaggacagcgccgtggtactgagtctcatcgacactattgacaccgtcatgggccatgtatcctccaacctgcacggcagcacgccccaggtcaccgtggagggctcctctgccatggcaggtagctgtcgcttgtaagggtgagccacatggcaggggcgggggctggaggctgcgtttcactgcctgtctttttacacccttagcagagagccatgctctgtctccctgactgctctgcctggcacaaaccacatttggaaggaaaacccgtggtcagatgagggcaggtgtgttcggccatgatatgcagatgg

SEQ ID NO: 5714 - DNA, 6000 bp, Homo sapiens
ttgagacagagtcttgctctgtcacccaggctggagagcagtggcacgatcttgctcactgcaacttccgcctccttggctcaagcgatcctcctgcctcagcttcccaagtagctgggattacaggtgcatgccaccatgcccagctaatttttttgtatttttagtagagacagagtttcaccatgttggccaggctggtctcgaactcctgatctcaagtgatctacccgcctcagcctctcaaagtgctgagattacaggcgtgagccaccgtgcttggccaaagtttttgacagcgtttaatgtaatcatgattcaataacactttcttcccgagcaccgtgaccccatttgtcaatgtgcttcgcttttcatttcctctagttcagaagtgctgtgcttgtatttcaaactaaaatgtgcttgccttatattgctgtctttgtcaaaaatacaaatatctgccctgaggccatttctacttcaaagatgcaatatggtgcttggtacaatttgggaaatttcttttttttttctttctttgtttaaaatttacaaatccattcaacaacacatataatgatctgatttccttttttttttttttaagaccatgagagaatgatgcagagattttaatcattagctcattcttttggtttaaaaccataattggtctagagaatttatatttcataaattgttcaatcctatattaaaattcaagatgcttttatttatcatcttgaattgtacgaattaaacccatgcctttttctcttgttttctcctcttgatccatgtaagcaaccccagcccctgaccttcctgaagtctggtcttgtctcctgggcctccagcctcactcctgccctcacacaggcacacatacaattcagggattatgacatattatgcacgaaaacctttttgaggaaagataccaatgtgaagttgtgaatatggactcctgttagaggaggagggcttcctcattaatccgggtgtgctcgcttttctatcgtgtggaggacttccccaaatagttcataatgagtgagcttttgagagatggccttaggaaagattccttctctgtgtagcaggaggaaagggtgaatcgtatttctcaaaaatgaaaccataaacaacaaaatataaaactcttcactggctgggcgcggtggctcacgcctgtaatcccaacactttgggaggccaaggcgggtggatcagtcaggagttcaagaccagcctgaccaacatggtgaaaccccatctctactaaaaatacaaaaattagccgggtgtggtggtgcaaacctgtaatcccagctactcgagaggctgaggcaggagaattgcttgaagccgggaggcggagaagccaggaggcggaggttgcagtgagccgagattgcaccactgcactccagcctgagcgacagagcgagactccatctcaaaaaaaaaacttcagtgtggttctcagtcactgtgatattaacagacacacagtttattagtatgcatgatacatgtgacggctgtggacattgcttttttctctttctgaaatctgtgtgaccagataggttgttgccccttcatatttacaagttaaataactccatatatgttggaatttttgttattaaatggtttgtgattctaattgctcacaaaggtagaagtcaggatttccaatgaaggcatttttggatactataaaccattttcttgaaatgtaatggtttaatttaaaatgtaggcagtctttttttttttttagacggaatctcgcttttatcccctaggctggagtgcagtggcacaatcttggctcactgcaacctctgcctcccgggttcaagcgattctcctgcttcagcctcctgagtagctgggattacaggcatgcgccacaatgcccagctaatttttttgtatttttagtagagacgggatttcaccatgtcgttcaggctggtctcaaactcctgacctcaggtgatccgcccgctttggcctcccaaagtgctgggattacaggcgtgagccactgcgcccggccgacagttttaattataatagttttgaaactagacttgttacaaaggtgaagtgcataagttgcttatgacaatctattcagaagccaacttcatggtttaaaaaatggggaaagggctggacaccgtggctcacacctgtaaccccagcactttggaggctgaggcaagagattcacttgaatccaggagttcaacacaaggctgggcgacatagtgggactcctctacaaaaaaatatttaaaaatcagccaggcatggcggtgcatgcctgaagttccagctacttgagagactccaattctaattttaaggaattttttcagtcctttatttttcacttctgtggccttttgcatggaaatcctttctctttctagaaattgggacgatgaaacacatgagaagtaaatgactgacgtgaggaggggtgaattatgtttctgtactgttgtgtggcctcacctgaccaagagtgtatgttgccatatttcatacctggagacttttcatcagattgaacttttaggaagcaatgagagtcctgctttataaccatgtgccctctggtggtgtgggatgcacggctgactgcagccctagccccttcatgaagggaatgtaaacagaatctgttctagcacttgagtcctctttgcctccgaatcatttttactgtcattgaataacttcttcaatattcttgcagttatattccctgctcagagaggatacacgtagctgttacagaaatggcagcattattccccaaagtaagtcacttcctactcacttggtttaaatccttttaaatgaacagcaagaaatttctttatgacctatatattacattagcttttttgtagcacatgcagttttaaaatatgcagtcgaggccgggtgtggtggctcacgcctgtaaccccagcactttgggaggccgagacaggcagatcacctgaggtcgggagttcgaggccagcctgaccaacatggagagaccctgtctctactaaaaatacaaaattagtcaggcgtggtggtgcatgcctgtaatcccagctactcaggaggctgaagcaggagaatcgcttgaacccaggaggcggaggttgcagtgagtcaagatcgtgccattgcgctccagcctgggcaacaagagtgaaactcaagtctcaaaaaaaagtaaaataaaataaaatatgcagtcgtatagagctttgaaatatttttgttctgcatgaatgttgatttaataagacaaggatatacaagtcgtgctaaaaggcacattttaaaatttataggattttctggaatattttacccacatggattaatatttttcaaaaactacttcaaaataccacatactactaaaattaccctgcatgcactttgacctttgaatcagaatatttcagcatctcttacgctgtgggctgcaaagcttggagtgtgtgaagcacccctttgagaaagggcaggaccaaaccgcctttcactctggggagcagcttggtttgctttagaagaatgtttgtcccctgcttttggatgtctgccctgcagttcagggtaaacggctgtctttttccttttagaaacccaagtctgatatggtgaggacttcccttcgtttactgacgtccagtgcctaccgactgcagtcagagtgcaagaagaccctcccaggggaccccggctcacccacagacgttcagctggtcacgcagcaggtcatccagtgtgcgtacgacatcgccaaggctgccaagcagctggttaccatcaccaccaaagagaacaacaactgacaagggcagggcaccgcctcctctgttttctaggctttataaagtccaatttcaaattcagacgcagaactcttcagatttctacaaaaagaaacatttaatgacggtttaaaactttttaaaagaaaactcagtattatttttgcatgttttctaaccaattttcaactatttaacccacttgccttattttgtgcctatttgctggtttagtttctgatgttcggttgtgttgtcaacaactgttgagttgatcacatacatccaaaagtatagtttcattgtctaaagtttgtgaaaacttttccatcccttaaaactccctgcctatggctgaaactataaatgaaatttttcataaaacattttcttgagagagttcagttaaaaaagaaaaaatcagcgtcatttgttccctgccaagcatcgtgcaataagtgaatttcctggcctacttcataatctctaagtttggggtatctccaagcatgtatgtagagaaaggactttgccgctttttaaaactagtgtcacagtctctcttgggaggaaacaatgaattggttcatttcttctcagtgttttaccctgttacatgttctgttatttaatgttgttatctcaagctcctatctcttgatgttttcttgtcatcttgaaggctccatggaatgagataaagcattgacccaccacaggacatctcatgaagccatgttcagggtaggagctccacgcacatcaccacccattgtcaggtgctctccctcacccctgtaagccagacagtttgttcaaaacctgcagcaaagagaagcatcagtctaacaagccagaactcattttgtgccacccatttaggtatcactaccatgaactatagggaaaagaaatcacctactccctgacactgtgttgtacccttcatccaaaagtcagcttgcttctctgaccacttacagctttctcacatgagttgcttcacatttttcatcatctttaaggacttcttataaggaaagatgtatcgtatcgcagtcatctgagttagtttctcctccatcacctcatgagtacttaaaaattagacatcaactttcaagagttccttagagagtgtgctctagctggctgcctgctaccccaaagctctgaaagagtaaggttgaagtgctggaacatgctcagattgttttttagttactcaaaagccccttcttgttctgaatgtgaaagctcttcccgttcctgcttactgcagccattctgtgtgtgtggttcagaccctggcctagggccggtgatgtggatgagtgaagggagccaggtacacggcagcagggcagaggagactatggggagcccaccgcctacacagtaggggcagtagcccccagctccacgcctgttgccatgtggaaaagtgggcctagggtggccacagctttgatttttcaagagacaagaaacctagatgttttttggtgccatctctccatttataaatgttggcaaccaatttgaacactttcagagaccatgtgcaggtgagctgtgtcctctaggctgccagctcacagcccccaccccagggccctgtaagctgtgcagtgtgagggcctggcttccccggacacacctggagcagcctctgagtcttacccgtaatggagccggccaaccctgtgtgttatgttgctgtcgctcctgtttttaaccatatgttctgtcccatagcagtcattcacacatgtgaagaagacacaagaatcaaagtacaagttgcctcaatacatgctaataactaagcttctattttcacaggactgatcgatgcacacctttatagcttgaccatatgctgtcatgaaagtagcaccccgacggtgcttgctttactaagtcaccgtgtgtggatgcttttgtcgcattttgcttcactgtgagtagcatgggaaaagggtccacgtctccaaaagactcttccacttgtttgtcccacagccctaagtgccacattgctgttggatgctcccgggatgccttctagaagggggcctcccaccttaagttcaggcgccatctgatagccttttctgcaggcttc

SEQ ID NO: 5715 - DNA, 6000 bp, Homo sapiens
gcaaacaccacatcaatctctgtcaagatttagagtcatcaggttcaaagtccctcataacgatcctgtccctcataacaatcaggtaattatgaaaacaactacttgtccacaaacagtaatacctgatgggtggggaaggagcaattggcagagaggggcagggagagggagagatcaaagggaagagggaaatacctttcctgctagacaacaccctggtgattaatctgccggggtgtggagagacacagtgaagtgcacagggcctgagttccttccgctcgccgcccttgaaggaaatagggtcttcctcttccacattcacggtgtagcctgggagagccctcatacttcctctttcttatgtcaaagaggggaccaaagaggggacatttgtaggcaagacggatcagacttgggtgcttggattgcaggggctgtctatatctgaacctcatttgcctttttcttcctatttctcattctgcactgccctgtagaggtatagcccattctttgtgctctgcttgtggtagcgatggctgtggtgtagcttccaggagggtagagtgtttaggtgacagacccactgtgagggaaggcggtgggaggcccatggccatagtgacaggtgccatccgtctctctcttctactgtggtagaagtggaaacgtgtctgtttctggctttaccatggagtgcttagagcagtgatcagcacatagtggtgctcggtaaatatttgttgaatgaatgactacataaaataaagttgagattggagagccaaattttattaaaattcgggaagatcgatttaagctatatctggtgtcactttaacacactatacataatatcgtgataatatatattcacatgatattcacatatgtatcatacatatgtatgtatatgtatatattgcatatatacatatgtacaatcttcctacttgctatatgaattaaataattttggtaagatgactatctcttctagtggaaaagaaaattttgtggtttttttttttttttttttgagatggaatctctctctgtcacccagcctggagtgcagtggcatgatccccgctcactgcacctctgcctcccgggttcaagcaattcttctgcctcagcctcccgagtagctgggattacaggtgcgtgccactatgcctggctaatttttgtatttttagtagagacagggtttcgccatgttggccaggctggtctcaaactcctgacctcaggtgatctgcccgccttggcctcccaaagtgctggaatggcataagccactgtgcccggccaagaaggttgttttttccgagctgttttttctgctctaaggaaagaggcaggattcaggggatgctttgtatcttttcctgcttcccaacccgagtccttcctcttgttttggatttcttgctgcatcatctctgtccttctttagggctggaggtgacctctgcgagccttcccttcctctaactctggcctctttcctgctgcaacatagttctcttctagtccgttcaaaactttttattgccacgtgaacaatctcattgggaaacaaaaaactcaagaaaaaaaatcccatgcccaaaaagcatggaacacaacaaaaagaatagtgtagaagacacttaaataagcaataaaataatttgaatgaaattgttgacaaactggactatagttatgtctagccttgttgaatctcaacatcttattcgacattgactttggaatttgtgagccacctgttttgaggaaatggggacactcctttctctttttcgatttcccaatttatcttcccacttgtgccctgaatcctgaggacttagatttcctaggggtatggtcaaggagctgggtctaaaattcacacgaagattgtaggggcagagaaagaagcctttctcctgacaaaggacagatatatgggaagtaaactgtaatacagctagtggcttcctgattatccgaatgagtaagtagatttctcactttgtggatggtccgttacctgggatctcctatcctcctggggctgaactaggagagtggaaccagagtcataatgaggcatctgatgaggggaggggtagggagagagagaaagagacgtagagaggaggagagagagaaggatatctcagatctcattttaaggctaatttgagaggagacacgtagagtacttgagaacctgggtcctggcaccagacaacctggattcagatcctggctgtgccatttcctggttgtatgatgttgggcatgtaacttgacttctctgcctcagtttcctcatctgtaaaataggataatagttttacctcatagggttgctatgaaatgaagtaagtaatgtatatatagagtgattagaagtaaaaattcgaggctgggcggggtgactcaacacctataatcccagcactttgggagggcaaggcaagaggattaattgagcccaggaatttgcgaccagcctgggcaacatggtgaaaccccatctctacaaaaatacaaaaattagcggggtgtggtggcacacgcctgtaatcccagctactcaggaggctgaggtcgggggaggatggcttgagcccaggaggtggaggttgcagtgggtcgagatccagcctgggtgacagagcgaggctctgttccccccatccccccaaaaaggagtaaaaattggagcaatactaaaaatgaacatgttagctatgaagattattttttgttggattacccgctatttatgtgccatccaggacgttcctctttacaggtagccaatttagagctggttatgacagacaagacccctttcataacttttcggaattagtggagccatctttacacatcttaaggaggaggccgggcacggtggctcacacctgtaatcccagcactttgggaggctgaaggagtttgagatcaacctgaggtcgggagtttgagaccagcttgaccaacatgcagaaaccccatctctactaaaaatacaaaattagctgggcatgttggcgcgtgcctgtaatctcagctactcaggaggctgaggcagaattgcttgaacccaggaggcggaggttgcggtgagccaagattgtgccattgcactccagcctgggcaaaaagagcgaaactccgtctaaaaaaaaaaaaacaaaaactcaaaaacaaatcttaaggaggaggggcagaataattctgaaccacagagcctaagaagaggacccagccgctggctcagaagggaatgctcggccttctgtagaaaaatctgctattcagagaccatcatgggtaacacggtgaaaccccgtctctactaaaaatacaaaaaaaaaattagccgggcatggtggcacatgcctgtagtaccagctactctggaggctgaggcaggagaatcacttgagcccgggaggcggagcttgcagtgagccgagatcgtgccactgcactccagcctgggcgacagagcgagactctgtctcaaaaaaaaaaaaaaagagagagaaagaaaaatctaccattcagataactcctcttatccatgagagaataggatgcttacaaatgataactgtatcagggccaaaggtagaggctgcaacgttatgattaaagtgttaacttcaagtttagatagttccatgttcactaattcctaagaaaacactagtaaaaaaatatcaggaaccctggcaggttatttgtaatatatacacgtatatatatttcaagagacagggtcttgctctgttgcccaggctggggtgcagtgacgtgatcatagctcactgcatccttgaactcctggactccagcgatattcccacctcagccttttgagtagctgggactacaggtgcgtgccaccatgcccagctaattttttaatataaagatggagtcttgctatgttgccctgtctggtctcaaacttcagagagcaaatgatcctcctgcttcagactcctgaagtgctgggattataggcatgagccaacacgtccagccctgtgaagttttttgagattaggcttcaaaatacctcttcagagtgttaggttctctggctttaaggtaaatattaatatagttaaactgggggaagggacatatgggatttcttcctggttcttcaacaggttttagaatttactacaggaggtagaggaaagttagtagctttacttaatgtagtaagctcaaagtcaaaaccctggctaaacatgcaaaattggtttcctaatccttttttagtcttctgtgtctgaggactgtgttaggagattcaataccttctccccactccaacattccttttctgcaggtccagaatggctacaacagtccctgatggttgccgcaatggcctgaaatccaagtactacagactttgtgataaggctgaagcttggggcatcgtcctagaaacggtggccacagccggggttgtgacctcggtggccttcatgctcactctcccgatcctcgtctgcaaggtgcaggactccaacaggcgaaaaatgctgcctactcagtttctcttcctcctgggtgtgttgggcatctttggcctcaccttcgccttcatcatcggactggacgggagcacagggcccacacgcttcttcctctttgggatcctcttttccatctgcttctcctgcctgctggctcatgctgtcagtctgaccaagctcgtccgggggaggaagcccctttccctgttggtgattctgggtctggccgtgggcttcagcctagtccaggatgttatcgctattgaatatattgtcctgaccatgaataggaccaacgtcaatgtcttttctgagctttccgctcctcgtcgcaatgaagactttgtcctcctgctcacctacgtcctcttcttgatggcgctgaccttcctcatgtcctccttcaccttctgtggttccttcacgggctggaagagacatggggcccacatctacctcacgatgctcctctccattgccatctgggtggcctggatcaccctgctcatgcttcctgactttgaccgcaggtgggatgacaccatcctcagctccgccttggctgccaatggctgggtgttcctgttggcttatgttagtcccgagttttggctgctcacaaagcaacgaaaccccatggattatcctgttgaggatgctttctgtaaacctcaactcgtgaagaagagctatggtgtggagaacagagcctactctcaagaggaaatcactcaaggtacagatgcagcctggctaggcagagaatcccttgtagaaaggtgggggagaatcataggatattataactgtaaggaacatgcaagattttccagattatacccttgatagaatagataagttccttaaggctcagatcttgcttaaagtcgtccagcctgttagagacaagtagaacacgaagctggcctctggagtctttattgagtactttgtacaattggtgtagactgggagagccctcctcacttcccctttcttgtgctgtaatttcctgtggggcagaacacctcagaggtttctgtgcatcaaaataagatgcagcaaagacatggaaaaaggataacgagacaaattcccagcaataagtagatgaggttgtgttttttataaaagataacgaggcattccttccagaaatgtggagcctttgtagatttcagtgcataaaaccaagccatgatttcctgcagtgatcacagagcagagaagggagaaagcccttttatcacaaaccagcaggaagtctctgtaaaattggtaaggattctggtttagtgtgaagaaccacattttttgtgtatgtttctgggcccatgggaaggaacagatcatatttgacatacaagaatcaaatgattcaggccaggcatggtggctcactcctgtaatcctagccctctgg

SEQ ID NO: 5716 - DNA, 6000 bp, Homo sapiens
cctgtctgagccctggtgaattaacaatatttcagagttattaactgctacacatatttatcttatatatgatttctgttttgttttgggacacttaacctaccctgtaaaattgcatcctgaaattaacccaaaactctggcttagatcttgttaaaggacataagaaaataaactcttcttggccgggcgtggtggctcacacctgtaataccagcactttgggaggccgaggcaggtggatcacctaacgtcaggagttcgagaccagcctggccaacatggtgaaaccacctctctactaaaaatacaaaaattagcaaggcatggtggcgggcgcctgtaatcccagctacccaggaggctgaggcaggagaatcacttgaacctgggaggcggaggttgcagtgagccgagattgcaccactgcactccagcctgagtgacagagcaagactctgtttcaaaaaaaaaaaaaaacggaaaagaaaaactcttcctgattgaaactgcataatatctgctgttgcttacctacaaaactgagttcaacataattaaaatttgttgccataaactttaaatgtcttcagtgagaattactgtgatatacaattataaggagagctctgagcatctgtttcaccagtgccctgttgagtctagttcagtagcccaggtcctgtctgcatgcttaggaatgtccttcctctccagccctattactgtatccatattggttttttctaattatagaaattagacgtttttcattgtaagtcatttaagcaaaagaaatatgtaccataaaaattaagttttcagtcagtatcacattccccaaagacagtaatcattaactgacaacaactcattcattcttctttcctgttcaggaatttgattttatctgttcaaccaggaataaggaagttctgaaaaggtttattaaattttggtgaaggcacagtgacaagagtctttggataagtttaaagtcttaaaatggcctgggcgtggtgccttacgcctgtaatcccagcactttgagaggctgaggcggacagatcatttgaggtcaggagtttgagatcagcctggccaacatggtgaaacccatctctactaaaaatacaaaaaaattagctgggcgtggtggtacgcgcgtataatcccagctactcaggagactgaggcaggagaattgcgtgaacctgggagacagaggttgtagtgagccgagatcacaccactgcactctaacctgagcaacagagtgagactctgtctcaaaaaaaaaaattgggggccaggcacggtggctcacacctgtaatcccagcactttgggaggctgaggtgggcagatcacgaggtcaggagattgagaccatcttggctaacatggtgaaaccccgtctctactaaaactacaaaaaattagccaggcatggtggtgggtacctatagtcccagctactcaggaggctgaggcaggagaatggcgtgaacctgggaggcagagcttgcagtgagccaagattgtgccactgcactccagcctgagtgacagagcaatactccttttcaaaaaaaaaaaaatttttaacttaaaaaacaaagtcttaaaaaatacctgctctttgatttgataattccactcttaggtattaactgaagggaaatcatcagagatgttatatgtagaacaacacaaacattagaagcaactaagtaataaagaggaacaattagtcacattttaaaatagtacatgctgcactttgggaggccaaggcaggcggatcacgagttcaggagatcgagaccatcctggctaacacggtgaaatcctgtctctactaaaaatataaaaaattagctgggcatggtggcagacgcctgtggtcccagctactcgggaggctgaggcaggagaatggcgtgaacccgggaggtggagcttgcagtgagccaagatcgcaccactgcactctagcctgggcgacagagcaagactccgtctcaaaaaaaaaaaaaaatacatacttatctttttttaaaagaatatgtaattgtcttagtcccttttgtgtggctataaaagaatacctgagactgggtagttcgtaaagaaaaaaggtttatttggctaatgattctgctgactggaggattgggcatctggtgagaacctcaggctgcttccactcatggaaggtgaaggggtgctacatgtgcagagatcacacggtgagagaggaagcaagagagcgaggagggaggtgccaggctcttttcaataaccaggtcctagcaggaactaatagagcgagaactcactacaaagggagggcattgatcagttcataaaggatccacccccatgacccaaacacctccctttagtcctcccctccaacactgaggatcacatttcaacatgagatttggagggaagaaacatttatactatagtagtaattatatgagacaaagtaataaagtttgattttgttttgtttttttttttttgagacgagtctcactctgtcgcccaggctggagtgcagtggcgcgatcttggctcactgcaacctctgccacccaggctcaagtgattcttgtgccttagcctcctgagtagctgggattacaggtgtgcaccaccacacccagctaatttttgtattttttagtagagacggggtttctccatgttggccaggctattctcgaattcccagccttaagcgatctgcccacctcagcctcccaaagtgctgggattacaggcatgagccaccatacctggccaaataataaagtttttaaaaggttttgtataaccccagttttgtaaggaaaacatatttatgtaaatatgtgtgtacaagtgagtataccacatgtaaatataaatacacaattgatcctcatgtgcacatcccatatttacaaattcatctacttgctaaaatttgtgacctcaaaattaatacagcattttcaaggtcattgtaagaaatgtacagagcagagaaaaaaattgagtcaccaaaagcacatgtttccagctgagattgaacagggaggagactccttgacttcttgtttctgcactcatgctataaacaagtgtctgtggtctatttagtgccatgttagtcatatttgtgtgcttttcattggtcatttcactgttttaaaatggccccctaccgcccaggatcaattgagtgcccaggagattgaggctgcagtgagccatgatcacgtctgcaccctagcatgggtgaccctatctcaaaagtgtctccttggccagacgcagtggctcacgcctgtaatcctagcactttgggaggctgaggtgggctgatcacgaggtcaggagttcgagaccagcctgaccaacatggtgaaactctgtctctactaaaaatacaagaaaaattagccaggcatggtgacgcgtgcctgtaatcccagttactcaggaggctgaggcaggagaatcacttgaacccaggaggtggaggatgcagtgagctgagatcgtgccactgcactccagcctggatgacagagtgagactccatctcaaaaaaaaaaaaagtgcacacctgaacaacatagcaaggccccatctttaccaaaaaatttaaaaattttctaggtgtgttggcatgtgtctgtagtcctacatactcaggaggctgaggcaggaggatcacttgagcccaagagttagaagctatagtgagctatgattatgccagtgcactccagcctgggtgacatagcgagaccctgtctcaataaaaaaagaaaaaaagtggcccccaagcatagtcctgaagtgctgtctagtgtttctaagtgcaagaaggctgtgatgtgccctacggagaaatgtgtgttaaataagcatcattcaggcatgatttatagtgccgttggccatgagttcaatgttaatgaatcaatactatgtattaaataaggtatctttaaacagaaacacacgtagaacaaggttatatattgattggttgataaccccagaagcactgatctaatattggccaagtcacagcaactttttagaacataactaccaagaggctgggtgcggtggctcacacctgtaatcccagcactttgggaggccgaggtgggcagatcacgaggtcagaagatcgagaccttcctggctaacacggtgaaaccccgtctctactaaaaaaatacaaaaaaattagctgggtgtggtggcgggcgcttgtagtcttagctactcaggaggctgaggcaggagaatggcgtgaaaccgggaggcggagtttgcagtgagccaagatcgcgccactgcactccagcctgggcaacagagtgagactctgtctcaaaaaaagaaaagaacataactaccaagcataacaagaattgactgtgtgtggctataagtgctcggagaaaaacctagaaatagatcaacaaataacaatggctataagtgattatcttacttgttcattagtttctaaattgaatatattgactattctgtaattatatttatgtgttttaaaatatttaaacagttaaaataggatctatcctttattattattattattttttttttttttgagacagagtctcgctgtcatccatgctggagtgcagtggcatagtcttggctcactgcaacctccaccttctaggttcaagcgattctcctgcctcagcctcccaagtagctgggattacagatgtgcaccaccacgcccagctaatttttgtatttttagtagggatggggttttgccatgttggccaggctggtctcgaactcgtgacctcaagtgatccatctgcctcagcctcccaaagtgctgggattacggatgtgagcccctgcgcccagctaggacctagtctttttaaataaccaccattcatcacccagatatcatccatccattgtttcctcaacatctctgggaaacaatattagaagtcagagtttgagttgcctgaaagaaatcagagagacttgggtagtttgtgaaatcttttgttcaaagtgtattagatcctctagaataatccctgctccctatgggatagacactccctgtaacatgcacatgtgtatttgtttgattcattctcctttatctctttctctcgctgagatgcaggtaattgactaaatgccaatgtttctattcttttttttttttttgagacggagtcttgctctgtcgcccaggttggagtgcagtggcatgatcttggctcactgcaagcgggttcatgccattctcctgcctcagcctcccgagtagctggggctataggcgcccgccaccacacccggctaactttttgtatttttagtagaggcggggtttcaccatgttaaccaggatggtttcgatctcctgacctcgtgatccgcccgcctcggcctcccaaagtgctgggattacaggcgtgagccaccgcgcccggcccagtgcttctattgtttgagtgcctaggttctggctccagtttaacaatttgctttctgttttgagtgacattaccttgtaaatatgttataggtattcatagaattacagtttatcttccattacctacagccttatcttcatgacctggagctaggctctatctctagaaacttgggaacctgccttctttatctgagcagttccttcctaagccatctgtttaatttgcccatatttggcaggtagatgagaggaatgctggagtctcttatgtagctgtccacctggttgaaaactttttctgttatctctgtattggtgtgaatataacgttgccatttctgtcattttttttcagtccttgttcattttgtttttgtctttgtttttgctcttagagacagggcctcactctgatgcccaggctggagtacagtggtgcagtcatggttcactgcagcctcaatctcctg

SEQ ID NO: 5717 - DNA, 6000 bp, Homo sapiens
acctcaggttaggagttcaagaccagtctggccaacatggtgaaaccccgtctctactgaaatacaaaaattagctaggcgcggtggcaggcgcctgtaatcccagctattcgggaggctgaggcagtgagccgagattgtgccacggtgaatccagcctggataacagagccagactccatctcaaaataaaataaaataaaaactctattgaggtgaagggtgaagggttaagccataacatacctcatcttcatacttaaattatttgcaagagggagtgtgctgacacataccacacacatctatgtgcatccacagagatcttagccatgcaaattagtccaatttttgttcaccttattgcaacgacaaaataagcctacctgtttgtagctgaggttcaggatgttggaaagttcttgcatctgctggaggctgaggtatttctgtctctgaaatctatcattgagtacacacagctgggtggaagagaacacagttctggtcttctgtttcttgaccgggaccttgtcttccttttttgtggcactcttctctgcagtagtgggttgtttgcctttgggactggtggaagaatcatggctgtcctgaataggcagatccatggaggaaggaagaggagagactgttggaaacaaataaaaggatgcttttctttaaaactttttccaaatattaaaatattctgttaaaaaagttgttttcaaagtactttgataatccccacaaccccagatctaagtaataagcaccttcttatttatttatttatttagagacagagtcttgctctgacacccaggcaggagtgcagtggggtgatctccgctcattgcaacctccgcttcccaggttcaagagattctcggcgggggcggtgcctcacgcctgtaatcccaacactttgggaggcccaggcgggtggatcacctgaggtcaggagttcaagaccagcctgaccaacatggagaaaccccgtctctactaaaaatacaaaattagctgggcgtggtgacacatgcctgtaatcccagctacttgggaggctgaggcaggagaatcacttgaacctggaaggtggaggttgcggtgagccaagttcacgccattgcactctagcctgggcaacaacagcaaaactctgtctcaaaaaaaaaagaaaaaaagattctcgtgcctcagcttcctgagtaggtgtgattacaggcacccgctaccatgcctagctaattctttgtatttttagtagagacagtgtttcaccatgttgagcaggatggtcctgaactcctgacctcaagtgatctagccgccttggcatccaaaaatgctgggattacaggtgtgagacacttcgcccggccataggcatctttttttttttttttttttttttttctgagacaaagtcccactctgttgcccaagctggagtgcagtggcgcaatctcggctggtggcaacctccacctcctgggttcaagtgattctcctgcctcagcctcccaagtagctgggactacaggctcgcgccaccatgtccagctaatttgcttgtatttttagtagagagaggatttcactgtgttggcctggctggtcttgaactcctgacctctggtgatctgcctgcttaggcctctcgaagtgctgggattacaggtgtgagccactgcccccggcccatgataagcatcttctttttttttctttttgagacagaagtctcgctctgtcgcccagactggagtgaagtggtgcaatctcagctcactgacctccacctcccgggttcaagcaattctcctgtctcagcctcccgagtagctaggagtataggggcatgccgccacgcccagctaattttttgtattttagtagagatgggggtttcaccgtgttgcccaggctggtctcgaactcctgaactctggcaatccgctcgcctcggcctcccaaagtgctgggattacaggcgtgagccaccacgcccggcccgagactgtgtcttaaaaaataaaaaataaagccagcaactcactgcccagctctcaatgctagaaccagcaggatatgtgaattttgataggcttctgtttcagtccaagatttccctttactagctctctgacctcatctccaaaattattccttcgtttattaaaatgaggtaaccaattaaaatggtccagcatagggcctggcatatactgattttgtaactaaagttggttcatttttaaatttttgaaaactactgaaaaattgattttccaaagagtgatagtggctttatgagtatcctgagtatcccccaccccttgcagctaccagtcagaagcgtaagtactagcacaggttttgaagccaaactggatttctagctacgttctgtttgactgtcagtagattaaactttctggaattatctttaccataaggtttcatcaacacttcccaggactgatgagaagtagacataggaggtgctcccaaactcagagctgcccagtaacatccacaaacccagagaatggagaagagacagccgttactgccatagaaagaaggtaattacataaattatatattaattacagaaatctcaccatgatttgccatgccatttttggcaaaacaaaaacatcatgcttatccctgagctatgatgttaggtcttccggttaattagcaataaatctgctatagctgtgtgtccagtgctatgtgaagatgtacgcatcaccttcatttaactataataatacattttttttttttttgagacggaatctcgctctgtcacccaggctggagtgcagtggcgcgatctcggctcactgcaagctccgcctcccaggttcacatgccattctcctgcctcagcctcccaagtaactgggactacaggtgccctccaccacgcccagctaattttttgtatttttagtagagatggggtttcaccgtgttagccaggatggtctcgatctcctgacctcgtgatccgcccacctcggcctcccaaagtgctgggattacaggcgtaagccaccacgcccggccaatgatacatttttgtttccaccatgcctaagcccataggttctcaaatttactgcatactgttcaactgccgaattctgtgtccttcaactcagtgcacactcctgagacctgggatatagttcaaagggcaggtgccaccaagttacaattgaaacaggggttttttcagaggattaggtgatattaacacttgcttatagtaatggggtattattgctcaagagtgaaatgatcccttaaccctctctccttcccttttctcttaaggaacttggcctttctttcaaggataaatttctttcttaccagtctctgtgtgaggcatctcagcagaagacatttgcaaggatggatggttttcttcaggcccacaaatcacaggtataggtgaccagtctttacagtcagatgctttggagcaaggcaggctttatggacaagctggatccacactcatgtcattattggagaagagtgggaaaaatttaagagctggactggaaaaaaggctaagatggctttaagacttttttctggaagatcttagagaaatatgacctccagcagcaaaagtatcaagaagttgtgatgaagtgagtcgcctccacaataacaggaggaaaccagctcagtccagaaaaatgctaaagtcctggagtctttagatttataatgaaggctctatcacccttagacccacccctcctgggggggacacccccccacccttgtgaattctcagttaatcccgtctaccagtctcaccaaggccattgtaatgcaaaagtagctgcagagtaacccagactaggtggggaactagaaaaccgagcaacagaacctgaagacaaacccagcaacaaatacttctaggttcaccacgtttccaacttttaaatcaggaatgatgatattgtcatgtctttcaacattaccccatgcccatcttgtgtgtttgggtttgtttgtttgtttgaggtgagagggaggtatgttttccaaaggaataaagtttttagagttgggttccagcactaacatttatggacataaatagtctaaagtagctgggtgctgtcgttcacgcctgtaatcccagcactttgggaggccaaggcgggcggatcacgaggtcaggagatggagaccatcctggctaacacgatgaaaccccgtctctactaaaaatacaaaaaattagctgggtgtggtagcacggacctgtagtcccagctactcaggaggctgaggcaggaagattgcttgaacccgggaggcagaggttgcagtgagctgagatcatgccactgcactctagcctgggggacagagtgagactccatctcaaaaaaaaaaaaaaaaaaagtctaaagttttccattttcctttctattcccaaacctaacattcaagaaacctggccaggtgcgaaggttcacgcctataatcccagcactttgggaggccgaggtgggcgaataactctgaggtcaggagttcgagatcagcctggccaacatggtgaaaccccgtctctactaaaatatacaaaaaaattaaccgggctgtagtggcacacgcctgtaatcccagctactcggcggggctgaggcaggaaagtcgcttgaacccaggaggcagaggttgcagtgagccgagattgtgccactgcactccagtctgggtgacagtgagaccctgtctcgaaaaaaacaaaaaaaaaagaaataaaagtaagatttctttctcttttccaatttcccaaacagaaagtaaactcttagcaaatcgcaattacgtaatttttgaagacacaactctgactcattctcctctgcactctgctcctgggtctgcactgggagcagctggctttgctcccacacaacctgacttttgttcacaatgcaaagactccaactgttgagagtagaagtactcctgggtgtgaaacaaggagatgaaatgcggcatttctttttttcttctcagacctccactctggagaagagtcagaatgggggcgtcggggaggaggtaagtggaactagatagatcatgcttcaaggcaggtagtccatgtcgaggatgatttctttaaaaaagggaaaaacttgccctcctgtctctcttaatcagcacagtgtgttaagtgggggctgtcaaggccaccaagactcaccgaggctgagcttgcccgcagctgtccaaagggcaggtaccagaagctttgttctttgctgaagggggactttgcataaaagcctgagctgaattcccccatcccccgctccctgtcccattgcgtctagggtaagagcctccggagtgaaagaccaaagggaagggggttggtggctggaaggccaacttactatgttctttgccaaggaaagcaatttgaataaagttgaggtttaggaacctgtctgacttcagatttgttggactaggctggcataagggcgtgttaaaatgagctaacaatttagtagagttgatcaaaataaaccaaaaaaacaattataatgttgtgtgataagtactgaaaaaagtgcactggatgctaagagagtacaaataatggaggatggggtcgggaagggatgggcagggaagactggacgatcttcagtgatctgagaaggaaaaatgtggagagaagggaattgcagaaaattaacagtttgggtaaaggcatgagagaaaatgatgggttccaatactgttgtttagcaggactcaaaggcaggggtgcaacaggagggagttgtggcagagaacacggcaactaacacttagtgagcagattactatcagagctgtgtgaaccagaacgactccatcttcaataggagctgggtaaaatgaggctgaaacctactgggctgcattcccagatggtta

SEQ ID NO: 5718 - DNA, 6000 bp, Homo sapiens
ggcagacccacccttagtctgggtgggcacaatctaatcagctgccagtccagctagaatataagcaggaagaaaaatgtgaaaacagagactggcctaatctcccagcctacatctttctcccgtgctggatgcttcctgccctcgaacattaaactccaaattcttcaattttggaactcggactggctctccttgcacctcagtctgcagacagcctattgtgggactttgtgatcatgtgagtgaatacttaataaactccccattatatatgtatctattccattagttctgtccctctagagaaccctggctaatacaccagtattattgtgctaattctacttttttagaaggtcaagaaacctttagattctgtgatttagagtatgctgaatttattgctttgttttactaattgactttctttaaatgtatgagtatgggtatgaacaggtgtatagtaactatagattgagctcttcaaaatctgagtcctattcaaacagccaccgatctatattatttgatgactttcaagctttcattgttgtacataccaaaaataaaaatgaattacagctattcttgaatattcggagaattttcagaaattaaagaaagccagctttctctgctatcttcaagtggcatttagccttttgtttgtttacagattaagctgagaatgtaacaaacccaatggatcattttcccagaaaaatgttcttatgcacatacaagaacaatttttacatacaatttcaagtgtccacagcatcccctgaagcacatgtttgtaatggataaattagtaaaactaagagagaagtgattccatcttcatattcgaaggggcttctaacaaagcagaatttccaacactgtgcattgcttcagtaagtccttggtgaggatgattaatatactttggaaccagattgaatgaaattgtgcataaggaattctaacttccaaattgaagtttgacaagatggcctcagagaatacgctgttattttattattggatgtaagcaaagatagcatatttaatttaatagatagactttcagaacatgaaagtaattaaaacacactgtattactatctgccactctctattttctcatcacaaaggcaatactagtgtttgaggtcctctcccttgatccttcttaggacctttgtttcaagatggtgggctgaccacagacaactatttctttccatctctaaacctattcaattgataggaaagataatcaggaagggtaaagtccacagcaacgaagaaaataatgacaatgaagtcaatgggcaagaaaatcatacattccagaagatgaaaaaagataaaggatgaagcagaagtgacactgaactgcagactggaaaaattgggaaggaagctgcaaaagacaaagtcaaggataaattcagcctgactaaggagactcttgagtggctttgcctcagggacccaaggtcagcagagagtagatgtctcccaggacttggatgaactatatcctgctacctggcacttagctatggacaaaaatcacagggcttttctccaaagaaactgcatcatctacctctggttaatcagtgaaattctaaataaactgtagagcacagttttccttattccagcattaagaggctttttggtttaatggctacccccgcccactaaccttaaagtgaagcctgctgaacttgaccacacacagagcttcctatttattccttctaagtgtcagtataaaacaaacattcaacataaactgcaggatatctgcaacatgaaaaacatacaatagaaaccgataatttgtgtaacataatgatgaaaatttgttcaaagtcaaatatgttttctcaaagattaaagaagatacagtatccaccaaataggaatgaaaggctatgaaaaaaaaatctaagaaaaagagtgcttttagaaattaaaagaaaatgattggaggactaattaattggaagataaaagttaaaaaaatctcagatttatagaaagatagaacaaaattcaaaaagacctagtcagaatccataacatctaagaaatgatcccccaaaagggtgaaaatgaacaaattttaaaatacaaggcaagtttaataacttaatgttagttttaagttaaaaaaaaaagaaacagtgttcatagctgaagtttcccagtgttctggaatatgctgaacaatgataaggtaccttaatagggttttcacaaagtacagaatggactcaaatgaggttgtcatcaactctatcctggaatttttcagggtcaccaaataacatataagtagactactagaatatgactgagaattcaggattagaagagacagaagtaagtgattctagaaaaagggaatagcacacgcaaaactctggtgtggacaaatgcaaactgcctgctgtcctatggtaatcttcggaatctgtaataagcaccagctcatcaggacagatgtagcaatcaattcggacagataccagctcttcacaaccaatacagccatacctgactaagtgtcatccctgctgtcactgagagagaagggcaagttctttagtttaagaagaacaaaaaggatgaataaaggaagcaaaaaaaaaaaagatgaggtagatttgctgttttaaggcatacggtttatggagtgagaagacctactgtgctataaattcctgccctttgtcctccagagtctatcctttgtctatgtatacatgtgtgtggcgggggaggggggagcctggaagaggaagatgaattaaatatatatttgattttaagctcaagataaagcttaatatgtttgtacttctgggcaaatgcattgttactttctgggcaaagacttcattttaaggcaatagagggctgattgacctttcagtggaggaggttttcatggtaaagtctcagggtttcttgaataccagagggggcaagagaagagttaagggttataaggagacagggggtactgaaaacaaagattcattaaaagctcaccttggttcaggtactataacctaggacatacagatatggattactgggatgataaacaagaaaaaaaactgaattcataagagccatgagaggagtaagtttggagtgataggagaaagggggaaaaattaatctattcttagaaatgactcaacccaacaggatctacaaatctaaggaatgtaagctacaagaaaccaagagcttttttacttcttattcatctgagagttgcacaagttaggtttgttaatttctaatgaattaattgaatgggtgattatgctgattatgttttattttgaaatagtagtaaatttactatagccaatttatttttcatattttgtcaaaaaattttgcttaaagtgtctctatttttctaatttaaattcatgccaggtgcagtggctcacacctgtaatcccagcactttggaaggccaagacaagtgggtcatttgaagtcagaagttcaagaccagcctggccaacatggtgaaaccatgtctctactaaaaatacaaaaaaaattagccgggtggtagtggtgcatgcctgtaatcccagctacccgggaagctgaggcaggagaattgcttgagcctgggaggtggaggttgtggtaagccaagatcatgccactgcactccactctgggtgacacagtgagaccctgcctcaaaaaaaaaaaattctctgctgcatgtctctgcttcagtttgcagaatctcaggcatagtgaataaaactcattccagttcaggaaattccattttcaggctggactcagtggctcacacctgtaatcccagacttttgggaggctgaggtaaaaggatctcttgaagccagtagttcgagaccagctgggaaattaaacaggacctgtctttccaaaaacaaatttaaaaattagcctggtgtgatgatgcacacctgtagtcccagctacaaaggaagctgatacaggaggttcgcttgtggctaggaacttgaggccactgcactccaacccaggcaacagagagacctgtctctgaaagaagaagaagaagaaataaattcaattttcagaaaatggcccattagaagtctccaattaatgaagtgataaattgagttgtgcattaaaagttaccataaattttatatttcttatatagcaacatatttctctaacttagtaattagtctattgatttgttcataaatgaaatttgagacacaagcaaggtgagttgttacatgttaaatcagttattataaaatcaggtttttgtcaaattgtacttatctaaaagtaaataaataattagctgatccttcacacagtgttttccaatgtcctcattactgtcttctgcacaaaccactagggggcaagacagtctaacatattagagtagacctaattgtatccaacagagggcagtaatacacaaactagggagacaagtcaattacattacatttcagccattcgcatctgccatttcctctggggattataagagggagggaagaaaggaaggaaggaaggaagaaaggaaggaagaaagcaaggaagggagggagggaacaaccctctcaataaacaattcattggctgacttttctgaaattgttaaacaagtgaatttaataaacaattttttctagatttaaataatttaactttgaagtgaaaaaccataagttagaagataagtgttaacaaatagaaacaataaaatgtgaaaatcatttccaatgaaagggagcaagtgttaacaattttatttttatgggcaaatgcaatatcatgttacttttaaaggataagtagtgaatcaacagcataaataattatttattagacaaaaaacaagagctgagtatcagtgaagtgttagacattcaaagtcatagtcaagggattagcaatgtctcataaacatcttgaagaagaaacctcggttatggggaaaagtcaagagtcagaaagcctgggtttattactgactatagtatctgatggctgtatgataagtggtaggttggtcaatctacacaggcttcagttgcctcatgcaaagttacagaacttgtaacgtaaatggtttcccaacctggctgctcatagaggaaaccttgcattgtcattctccataccttgtgaattagcactgactctccaggaatgaaactcagcaacatctatacatacatatacatatgatacaatttaagatcatattatacacacatgcaattctagataattctgatggtctgtcattattataactattgggctaaatgatggttaagatttatattttctctataaaattctgagttgatgactatttgtgcataattacaactagtattttaggatataagatatttttctcacccagcactaaacacatacacacaccaaaaactccatcacattaaaaaaaacaaatagaacttgacagagttcaagatgtgctatcctaaaatgtggcaccttgacatatggaatattttaagttgaaggaatttgtgaaatagatatgcaggaagatatctctgacttctccttcacttctcccctagagaaggtcatagggcttcatgtgagaggtggcttctcaatacctagaggaaaggagcatccttacctccaaagacacagatcacagggacaccaagaggaatctgaacaaaaaggcccaagttcccctggtttattacccttaactcatactctttcttccttctttccttccttccttctttccttccttttttctttctttcttcctgctctttttttttgccttatgcttttccatgattctctattcttcctcaaacctatttaaaacacttcctcaaatctatttaaaaacactcaggtttaattgtttttttcagtcttcacttctttatgaaggctcctgtgtca

SEQ ID NO: 5719 - DNA, 6000 bp, Homo sapiens
atatgcacaagcgtatccataaaatacaacagatccacacactttgcaggccaaagctcaacagcagataggaccatgtccccctctctcctgactccaacacatccttcagggtctcagctccctcttctatcctaggtagtgattcttctgcccttgacccttaagcctttctcctaggggtcagcattctgacttactcccctctccccaaggtcccacccacgcagatggcaatctgcatgtgtgcacaagtacccagctcctaaccagcaacacactcactccacaaggctgaaggaaacaccttagtgcctcaggggcgggggcagcaagagacgcaactctaacccaagaattgtttgacaggagaaaaggggcggagcgaggggggctggcatgtttataaatagcgtcatgaagggtttcccctttatccttagcttctctcccactatcctcttcatcccactgccaccttgccctaaccatggaaacttggaaactaataggaacacttaatcattccaggaacctcacaccttccaatactactaagtcaaaacaccccagtccctgggctatagcagatcacatatatacttgtatacttgtagcaggatcacagtcctgtagctgggtcatctgagctgaagagtggcatgccaatgagcaggtttccaatgaccagggtcctcctgggtcctccccagatggggaggtccctaaagtacttctgccctattccctatttatctccttctaaagatccctaggaaatttcatcttaagagcacggaggccttcagttgatgttcatttgaaacaactttcccagcattggacaggggcatgagagtggatttaaagtgtttagagggcttacagaagaacccatttggcacatgccaatcacagtgagttcctgaaagggaagcactctcagccttttgcaagttgttctacgcccttccctacccttaccctagcaccaggttaggacactgaggttaaatttaacctttctccagcccccttccagtcagccctccagatacagcccccagcactcaaaatatattcaaatctcaccagctacaagcagcttgtagcatctgattcttttgatctttccgcaccgttctcctttgacccatcccacttcctcaccctcttcacttccccatttgtgaagggcagcccagcatgtagagcctcagagactgaggttccttggttctattccaaatcctgctggactgtccctaaccatccgtgcctctctgatgaagtgttttttgtttttgttttgttttgttttgtctttttggagacgaagccttgctctgtggcccaggatagagtacagtggcgcgatctcggctcactgcaacctccatctcctaggttcaagcgattttcctttctcagcctcccgagtagctgggattataggcacacgccaccacacccggctattttttgtatttttagtagaggtggggtttcaccatgttggcctggctggtcttgaactcctgacctcaggtgatctacccatctcggtctcccaaagtgctgggattacaggtgtgaaacaccatgcctggcccccagtgaagtcttgatgcctcagtttcccccttccataaaagagatgaacccataaaccctgccaaagcatcgtccctggagggaagtgaatgaaacttaatgagctggtggctgccacacattccacgctccccaaaataatggcacgaggctaatgttcagggctattattagaaaggcaaacaagaggtacttccatttctcagtccaaccaacctagttacccagacctctctctccagggccctgtgccacggggcttgggcagaacctgagtcaggccacattcttctctgtgtgctggaagactgaaaggaaatacccatagaagctgggaaaggcagccaaagggcagggtccatcacatccacacgacgtctaatgaagactacagaactgggagaaaggcagagaaaaacagacacatagacattctcggagtgaaagaccgatcctggatgaaacatgtaagatccacaataacaggctcagttttcttcccattttatctgaaaggccactaattgttctaatgccaatgtcaggtaataaggtgtgatgacttcctgccccatacagaatgctagaacaaagagggcagtggctaggtgtagcacatgaggagttaggctgcctgagtttcaatcccagctccactattttgattgttgtaaggattaccttgagttaatatttttagagcacttagtaagtgctaaataaatgtagctgttgtttttaaatggggaaaaaagagaatactagaaattaaaaattagcaaactgacagactatagaggtagaagtggaagcagcaagcctgcagtggtttgcattacaaagcctgcactgcatctgcaatggttttcaggatgtcagaatctcaaacttttcctttagagataatatcacccagtactggctaatgctaggatcaggaagactctaaggatgaaggaatgaggaactatcatctcttatcttcccgggggaactaggtgtagtcataagacatggtctgggaaagcacactctctaaaccacagttaatcccactcagtagccacctacttctaactgattccagagaagcaagcagggttagggaactcagtccaagcagggccagttaaactgcgtggcggtggtgtacttggagatgttgtgatatagttcaccctgagccattcaggcaggtgcacgccagcatctggtgaagtactttataagaaacaggctgctgttaaccagcgaggcctcttttgtaaaaggtaggggaaggagttctggagttaggagtcaaggatcctcatccttctgagaccagaggtatcagcaatgaagctctcttattagtcctagaagaaatgatcccagcctgagactgggttgccctgctgcttaaaggactgtcctgtagaccgtcacgagggctcccattgactggggggaggccaagcctttcccctcaggtggccatccttaccaccacctatccatgtccttgtacagaggcacctgcttctagaggcccaccagaaacatacaattctaggtaactggagtatagtctgaaaagcacataagtacctgtctccacacacatacccacttgaaacagagagccacattcacatgaattaagaagtatatgcatgttgtcctatagcacagccacacaaacctgtgccctatctcatataccaccagtagcttccaggacaaatgactgtactcaggaatttaggtagacctcacccatgccccagagagaggaggaaatatgaaaggccaagtcagatgaagcctccttcacaacttgtccttgctgtgagacagaagataaggtatctgctaatggtgaggcaggaaagcagacaaccagctagtgacctctcctaaaaacagcctaggcttcaggggaggatttcctggtacccttttcctgccttttctgaagattctggactttgataattccctagcttatgaaggaaaactttaacacaaggttcgagggactcagaactgaacaagaaacaggaagggagaggatgagactattaggtacttttctggaaggaaactttatatactcctcagaagtgaaatctctccagtggtcaacttgtttaactggaagtctggacagaagcggagcagcagccctcctcccttcgtatccaggatctaatttttcctgaagaattgtgagcaaaaaacaggagtcgagaaggggactggggcagtggttcagggccagcatcaaggaagcactttaacccgggagttggcattcccctgcacactttcttctcgcctcagaacatgtgggattcccattttccctttggattttatgggcagaggcatacatccagctaggaatggaaatgtcaggagaggaggcctcttggtatctgagataggatgagcaggaacagattgcttttcttgtcaagggagctataattgcagtaagctggagggaacacctctggtgaacactaagctgacctcggcatgccctgggcaaggccaggaccccagatgccaccgtgattttcatgacagcccactctccaggggaaaaggcccaagggtgaagggtggtatgggaatcttaccactggttgggttgtgtaaatcactgctacacagtatgcatgttctcaaaatgcagctgttttccgataacccttttcctcagcatgaaaacatccacttccctaagggacctaaaatgaatcccatccctttagtccccaaacactaagaaacccatttctcagagcttctgcagcaagatgtgggttcaaatccaggagctcccttggatcacatttcccattggattttctgagtcatcactctgtcttccccggcagtgaaacccacgatccaccagctcaaccccctacacccactagtgccagacaatgacagagagaagatgaaagaaagcactaacctgtctccaaggttcctccggcaaagggagggaaccacctggtactggagtttggggttggagggattcccctcttcagaggcaggtgacggctctcatcctcagtggctcttcctggacgaggctgagcctcccaagttggtgaggggaactgggtcccctgaggatgaggagtcaaggttggaggagggggagggggaggagaaggaggtcctacttggggaaggtggcacaccccccacaccctgcttgttacccgggggaggaggggaggagcctctcccaaccaggagttgtctcctcccccttgggggagttcccctcccccccaaactggatctttctgaggtggagggctctttctgtctgctggagataggagcggaggggctccaccccgttccactgtctaggcacgaggaagttgagggggaggtcttcccctctccagaaggctgaaagccgattcctcttctttccctggagtggcttctgaacgtaaggactcctgtctcctgtgaatagtggtgggccgagggtgcctactccacaggcacagccccgtctctctttgcctccaaagtcctgaactgttgagagtgtgtgtttggaggggcgggggcgcgctagggtggtctcactctgcttccctacggaaagctcccttctttccacttctgggggtctcctccccggccagtacaggggtcttcctcgcctctaggcaggagagaggcgtcccctccaggggtctcttctttccctcacccgagtggtaagggtcttttctctccaacagggggagaggttgctcgcgtccccgctcccgcctccgctcccggggtgccccagagggtggggctttcgtactcccggctgtccctgagctggcctgggcagcacggtccgggaggccgcggctcgagactccggtccctgctactgtggcggcagcacctcctctagggccgtcctgtcgggtccgctcccttcggcgcgtggggctccccgcgctgccaccgctcgggctccgaccagtctgggctcccggggagccagaaggcgggcagacagtgtcagggctcggcgcgggctcgggctcggctcggctccgctgcaggccccggctcctccccggcctccgcgccgcgctccgcgcccctccccctcccccgcccgccggccgctgccgccaccgcctcccggcgcgggttaaggaggagccgggagacgccgagccgcgggcagcgccgagccgcgagcctcgctacccggtgtgcgctccgcctggagagccacggccgctctcacgccggcgagggatctcgccgccctcgcccacctgcggccgcgtggctccgggagttcgccgtctacccgggatgacaactcactgctccccgtcgggagagtcc

SEQ ID NO: 5720 - DNA, 6000 bp, Homo sapiens
tcctggagaatgctgctcgggcattccccgagggtgctgggctcaatctcagtcttaccgggggagaaatacatctgctggagaggcaggcccgaactcgagatgctgcaagccagcagctccatccaccggacactgttgacagaacacctcccgcgtggtgccgtgctgtgctcgtgacatgccaggagtaaaaacagatacaatttcttaaacagtgagtgacagataccatgacagaaaagagcaaagagctgtggaaaataataagtggggtagggcaggacctcatggtgcaggttgggttctaaggttataatacctgtctccatccgtatgaccaaagttgccggaactgccggcctcagcgggaatgtgggacccagatgtgatctgagtcgcatcgaggagcttcctgatggtggaacacggtgtgagagtcacctattggtgtaagaacccggaggtgtgcttccagaacttgctgcgtgtctgtgcagtcacttggaattcaggttctttgcttcgcagttgcagaaaacgccacgcactccttctccaagcagggcttgtcgtagggctcaaaggaggtaatgggtgtgagggtcctttccgtcacttggtgacacgtggtgtgaggtcatcaaactggagggaggtggctgagggggtgaggctctaacagcgcaggtgggactggcaggcagagagatgagaatgctgctggcttgggtcggggtcagggttgagggaaggaaggaaggagtacctcggccttagccagaggggctgaagcgacgggggtgggggtggggatgggggggtgtagggcagccgagtcagtgacctgcttccctagcctggaggggtgggcgctatatcttagagttcccagagaagaagacccaaaaggaagggagccctctcttgtctggaggccacacctgttagagaggaaaggcaagcagtgagagcctgggggcaagttgaacagggagagcagaagcagaggtggcgggagagttacagactatgcccagggctgcgggaaagcagcttgttaggcactgagcccaccaggctgcgcggggcctcagaccttgcccacatgaacacccaggtctcagatccacacacaggcatgcaggcaccagcccctccttatcctcagagacatgtgcacatgtgcacaaactcagagacgccacagccagctgagcattctcctgtagaggggcttgcaggcctggcttggatcctggccctttgacttactaactgtgtgaccttaggcaagctaacctctctgatccttagttttctcttccataaaacaggaatactgctacttacatcagtgttgttagagtccagcagatgctatagggacagctgccctggggacacattcagtcaaacccatcctatttcccatagctgcagccccaccacatcggactgtcagcatcacagaaaagttcaggaagagtttagagatatccttgctgtccccagtctcagactaggttgcactgggctccaggaaggaggctacacatttattgagctaagcattttttttttttttgagacggagtctcgctctgtcgcccgggctggagtgcagcggcaccatctcagctcactgcaagctccgcctcccgggttcacgccattctcctgcctcagcctcccgagtagctgggactacaggtgcccaccaacacgcccagctgattttttctattttttagtagagatggggtttcaccgtgttagccaggatggtctcgatctcctgaccttgtgatctgcccgcctcggcctcccaaagtgctgggattacaggcgtgagccaccgcgtccggccgagctaagcattttcactagaaggcaaggaagacgtagtcctaaaataatcctggtcctgtggcctgagggtgctactccacactcttcaccaagtgacaacacagagcagtactgtccaagataagcaggacctgagtcatctgagccctctgattctggggaaacaatgtcctcccagaaaagggaaaactgtaatcatttttcccccttcaagttccattcatccactcgttcatccatccatccgtccatcctccatccatccatccatccatccgtctgtccatccatccatccgtctgtccatccatccatccatccatccatccatccatccatccatccgtccatccatctgtccatccatccgtctgtccatccatccatccatccatccatccatccatccatctgtccatccatccatccatccatccatcctccatccaatgaacactgagtgcctattctgaggcagaattgtattaaatgctagaggcagaaataaagaattatgaaatgagacccctgacatatagatattcatggtcaggggaacagtatgcttcagtggaacaagcatagatttttggagccaagaggcccaggttcaaatcccagcaccatcacttacttgtgtgtggccttaggacaaatcacttagcttctatttattcaccccagtttcccgtctgtaaaatggggctaataatttttacatttcaaagttcttaaggggatgaaatgaagtaacatgtaaaactcctcgtccgagttagatgctcaggaaataagtcctattccaggccctctgaaagtatggatgagattagaagatgagggtggtgagaacattctgtggtggccagtggttcctactgcagcaaaggtgatagattcattcagctacctgtcgtcttcaccctgcacactcctcagtgtggaaacagcccagtctcagctaggctttccaggatgcctaccttttgcaaagatgagagtctctggcctccaggagtttactaaccagtctgaataccaagtgggtcttggaggctaggagaacttgagtgaggaagggctcaacattagagagtctctggcctccaggggtttactaaccagtctgaacaccaagtgggtcttggaggctaggagaacttgagtgaggaagggctcaacattagagagtctctggcctccagaagtttactaactggtctgaataccaagtgggtcttggaggctaggagaacttgagtgaggaagggctcaacattagagagtctctggcctccaggggtttactaaccggtctgaacaccaagtgggtcttggaggctaggagaacttgagtgaggaagggctcaacattagagagtctctggcctccagaagtttactaaccagtctgaataccaagtgggtcttggaggctaggagaacttgagtgaggaagggctcaacattagagagtctctggcctccagaagtttactaactggtctgaataccaagtgggtcttggaggctaggagaacttgagtgaggaagggctcaacattagagagtctctggcctccagaagtttactaactggtctgaataccaagtgggtcttggaggctaggaaaacttgagtgaggaagggctcaacattaagatggtgggactaaggccagaggcagtcagataaaaacagggagggaccaggtagctcttttgggggaaagtcaaactgtaccccctgggccaggtcaaccaggcagctgttctctgacaaggtgaaggagaggtgacaggactgctgggctgttgctgttcatcctcacagaaagcatgtcacactgtatgtgctaaatataatttttgagggaaccaacaaggaaattcaccatcttggcttgtctgatcctctcccctctttctcctttttatggagaggctggtgttttgttctggagtagctgtagctaggtgatcacatggactttgatgtcccctctgcaataactctgtggtcaatccatggtggacctgacatgcagggacaggccacacctgagcaccggggtagctcaagtatggattctggctgggccatgtcctactgtgccacagctgacccccagcccggcttctgctttcatagaggcaatgggtctgagagctgagacctgctctgccttcctcttcatgtggaaccccacaggagaggctgagaggggcccgagagacatatcgtgggggtgcttgatggaaaactacagactgagagtctcacttcacaccccacccctgctgggaagttctaaaatacacagaggaagcacatgtaaaaggaaatttccctttctccctgcaacttcctctcccttcataccacctagagctgaagaagcacctcctttgtcttgaaggaggcaccagctattctgaatgaagggcggtgggacagtgctgtaccccacaccaggtgggcgtgctcagggacagtgaccaggacgctgttctggaggagctcactgggcacacggcatagggcacatgtattcaaaaaatacccttccccattgatagctggcaggccactccagacaaattctagctaggtgcctggtgctatgcagtgaccagaggtgcctgggaccagacaccccaccatcccagcctctgcttccagaggacacacaacaaacacccacacctccccttaagcacctatgatatccctgcaccctcacagcaaccccgcaaagtagatattgtgttgttacctacctttgacagactgggaaaccaaggctgacccttgcctagctgtcgtgactgatacatgatagaggaggagaagaaactcaggtctgtctggtcccaatcctgggtcctctctacattgcttcttgaggtacgctctgggtgctttctctaggaaaatcccaaggagaagggttgtgaaggtccagggccttgcctagaagccacagagggcaggtacttggtggaaaactccagcgtgtgattcaccctcctcccttgccctcgtcagtgaggtcacctcccctcccaaggttctcagtttatagcctggagtctctggtaagagagggctgtcccctgtgctgcacatacccgtctcctcatccctgggaaggagatggttctggagggggataggggaaaagggggaagggggaagggcaaggaggaggaggaggggagatgaggtcagggtgtgagtctctgagccccttcccctgcccaagggagcagcagctcagcccagctctggaggggccatcatgggactgtgcccacggggagggcaccggtctggagacagtgggttcacagtgggagtgggatgggggtgggagcgctggggacagaggacttgacttcctgaggttggatgttgtaatctcggttcacaaacttttggcctcagtccctcctgctgctcctggtatttctctgtcctttcactccccaacacacacagcccccgccccaacacatacacacacggcttctttctgtctgggagtccctggacaagtcacatgggattctgcgctgggaggaacagggtaaggcgtgaacgtggagggcagtttccctttcaggtcccggctctcttggctttcccataagcagctgccttgggactctcctggagacctgatgcccacagccaagctgaccacaggagccggtgctggggactgaggtgagcgggaagtggaggggctggctctgtctttgcagtctccaactgctgctcagaggggctggagggatagagccctgggaagcgagactctgtggaactgcgtgtctgcagcggggggcaggacctgcaataacctcaggccaaagggcaagtctgatgcccacgactctcaggacaaggggtgccccctagctccgccccatccagcgtgggagcagctcagtgattagcctgtggagcaggaaagtccagcgatgggcagctggtcacggcagtgggtgaaagcaggggtggtcatctgacgaggggaggggaagcaggtggtgcccagcaaggtggaaggagaagtggacaggagaaacctcggggcattcccgagggcccaggaactgcaa

SEQ ID NO: 5721 - DNA, 6000 bp, Homo sapiens
tccatagtgtcagggtgtctccattcactcagaacccctgctcactaactgttcatcagccaagagcttcccactgagactagttacataagtgttgcaaactgtatgtactctgagagtcagacaagaaatcagggaaacagggattggaagaaacaggataaaattgggaaataactgcaattacttttctagagttaaagacaaaaggtatgattttccttaatagggcagagtagtaggagagaattgtggaacacattgggataggaagagagccttctgattagatttttaaagtattattcaggtctgatgagattttcagtgaaagcaacatttttcttgtcattttcgttattcacctctttcctaagaaagttatgtttaatcccacgggccagcaatagccaaaataaacagtactagagctgtgctttttagtgtttttcttgtcttttttcctccccctctagacttaaagtatagatagcatggtagctataagtaaataatggactttagaattctacaaacctgagttcaaaacctgggtctaccatttactagttatgtggcctagcaagtaatttaattatctctaagcctttgttttcctgtctttaaatggtcatgtcagtaattcttgtgtcgtaggtttgttctgaggataaatgcgatggtgcctgtgtagcacttagcaccacgtctggcacatttgaaatgcacgacaaacgttactaatggtaatggttgacgtcattaatattctttgtcataagtcttgtttctttcagatcttgggtctggcatggtggcttacgcctataatcccagtgctttgggagtctgaggcaggattgcttgaggctaggagtttaagaccagcctgggcaatatagcaaaaccctatctctataaaagattaaaaaataattagctgggcatgatggtgcaaacctgtagtcccagctactggggagactgagttgggcggatcctttgaacctgggaggttgaggctgcagtgacctatgattgtgccactgcactccagcttgggcaatagaatgagaccctcatctcaaaacaaacaaacaaacaaacaaagaaacaagaaaacaaattggagttgatagaatttaggtgaattatcccatctgggatcaaacagaaaacgcttcacagttttcagtgacacctctggtttccgcacgtaacatcccagagcttttcacagcagggtcaagtacttgggctgtaatagagtgtaaacaaaaatcttcaacaacaacaacaaaaaaaaaaaaaccaaaaaaactttattttaagctaattttagacttacagaaaaattgcaaaaatagtacagagagtttccatctttcactcagcttcccctaacgttagcatctttcacaaccatagtacaattgttagaacgaggaaattaacattggtagagaactattaaactaaagaccttatgcaactttcaccagtttttacattcatgtccttttctattccaggatcctatctaggatcccattcaggaccccacattgcatttagttgtgattttcccttagtctcctgcagcctaaaacacttgctcagtctttgttgtcttgtctgtcttgtctttcatgacacttttgaagagtagtgatcggtaattttgtcaaatgcccctcactttgggttcgtcttatgtttcttgtgattgaaccgcatgtttggcaagaataccacagaaatgttgtgtcactcttagtacatcatatccatggttcatgatatagagagatattgatgtcttattactatcttattactggtgatgttgaccttggtcatttggttaaggtggtttctgcctggcttctctacttcaaaatcactatttttccctttgtagttaataaatatcttgggggagacactttggaattgtaaaaattctgttcctcctggaactttcacccactagttttagcattcattggtagatcttgtctgcaacaattattatagtggtgtttgtctaatggtgattttctgtttttctctttccttctacatttattaagacttctttttctttgagatggggtcttgctgtgttgcctcaaactcctgagcttaagtaatcctcccacctcagcctccctgagtaactgagattacaggtgcatgccaccatgctcggcatccttctatatgtattaattggaattcaactgtaaggaagactagtccttttatcccacttattaacttgttggttatttgtatcagcatgaacttattagtgaactttgttctttgggctacaatccaatactatcattattcattttgttgttcaaattatttcagttatagcaaaagccataatttgttgtttagtctgttctacttgctcttttcttttctttcagtgtgatgtttgaaaagggatccaaaaagtcaacaggtttctgactcctgtggttaaacagaactatatctcttaatttaaaggtctccagaggagaacccaccacttcctttgccaccttgatgttgctcagaaatgttctttcttgaaacaaatcgtgctgcttttaaaatttgtttctgtgaaatgtcaaactagaaaaaaattttatttgttcttattccactcctagtagagtcaaacaatttttgggagagcgtatcatggcgtactgtcatttaaacatacctgggatcaacttggtacaaaccaggactcctaggcctgctttttgcgtggttcactttgttttatacaatcctgttgttggaagcacagccttcaattatcctcactgacaatctctagtgagtcttaaaacttatgcagcctcttgagtaagaactgttgaatacggattctgttgttacctgttttcaggtttcttgactttgcacccagcagaccaaaggatgatggcaacgtgaggtagatgcaaggctagtcatgcctgttttgtgtggaaccccagacgggaagttgtgagggactgtcgccaacatttatctaccagtggttctcaagctttttttttttttctttaacttttgtcaacctaagcaggacaaaaaacctaccatagccattcccactttatagaggaaaaagaaattggggataacaaagatttggagaggaataaaataggagtcaacatggtaacatggcagcagttatgtaaaaacaaaagagttggtaagtaaagccaacattccttcatacaacagcagcagctcacaaccaactcaggataagcctgatgatgtccttatcactgacagtctttcctggaagctggaaattgcaaccgtttgcatatgtgaggacacagaaggggctgtgcaacattgccaaaggctgaatggtatctgagaaaacacccgttatctggtaattttagattacaaatgccaaagtttataatgcatagtaggccattagtaagtaccactcagtgatacgtaaaaatggaagtcaatagcactgctttgaagatggtcttttttttacatgagtttgtaggctgtctcaggacgcttttggtttattgctttacagagctcagtctaacagatgaaagcttgaaaggggagaggaacaggggccgctgaaacataagaataataatttccaagaagcttctgggaagctctccaggtattaccatgcagtgtttccatgcccctaccccatgcccttgagttagatgagggatcaaggaaacggaaactaccttagactcttcgatccgtctttctttccacacttctccgtcatctcaagatgtctctatcacctcactcactcattgccgcatcccctacctaactcattctcacagtctggccagagcccagcttagctcaggggtctctcagtcccgtctccttcaagaagacttccgggctcactgctcactgtgaataatcccttaaggatgaataacagctgccatttacagttagtcatcatctcctgaaatctcaagctagacagtggcatacgtaggactcagaccccacactctctggtgtcaaagtctgagcaggtttccactacatgtactgtgcttcagcacatggctgaggtgggactctgccctgtcctagactccaggctgaatgaactactctcacagccgcctctgtgggctgttcctgcagagaaacgaagctccctggatgacctcggcctcgcgctcaccgcctgctccttcccttataacagctttagggctttgctttattttaaacgttggcacttccttttctctattgatttaaaaaatattttaaaattctagcatattaaaaaatctaaacaatattgaaaaagtggggaaaaaatctcccttactgccatctcctgatctcagttccactctacaaatgtaactactattaatcatttagcgaagattttttcagactttttctatatgtgtataaatgtctgtgtatgtttgggaagtttttctgacatctcagagttctgtatctatgtatctttgttctaaatcatcgtccattccacattgcaagctgcgaaacggtaagataaatgtatttttaaattaatctacacagcacctgaccaaaggaatacctattcttgatggatttataggagcacttgtgttggagacaggggtgggaggcaggatccctccagagagaccctgagctcaccaggtgggaagcgcacatgagctccggggaggagaccacacttcataagctcaccagcaactggcccgacctgccagggcgtgcacactccccagactgcgaaatcactcatgtgtgggttgtccagtggccgaggggaggggaggggagaaaaggggagggggaggcacaagggtggaatgtgggctgggccaagtttagaatttcaagtgccacagaggcgttctggaaccacactttaaatagccagcaccttctccttcccccttagataattcttctcccctgactggacctctggcagcagcttcactaaggttcgaaatgttttcttctcttttttttctatttctgcgtctcagactgcaggttggtgggatccatgggacttacaaccaaaggacttttttcttaccctcgcctagaaagtacgcttctgacatgtatgtgtgcaaatgcaaagattatgtgctattttcttgactttctgaaacttgggtggctgttgacttaagtgacactgtgatttggaaagagagagccctagattgagaggaaagacaactggatttaactccaagaaaacaaagtctttcttctctgagaaaagagaacaatgatcaactctgacaggactgaaagaaaacaaaaatttgagtacctgttattctattaagtgtgtatacatatgtatatttcctcatttaattcttatagctaagtatatcctatctatcatccccacttttacagatgaacaaactaaggctcagagtcattcattaacttctctgaagtcagacattggtatgagaaaaaactaatgtttgaacctggcctcatctgactctacagctcatgacctttcagacacaacatgctacctctgagaagcagctctaatgaggctaagggagccaggagaaggctactgtttctcctagggtctgggagggtggagaagggaaggctttccatcactgggagagatccatcagctggtaaagggaggggaggccagcacagtcagtaccttagacaaccttcccaaaaggactgaggagccctcttgggaccagttacttgagtttctcctttgtagaaaggagctcattccctaatttatcagataaacatagatgcctgctgttccctgactttttttttttttcttttttttgagacagagtctcgctttgttgcccagactggagtgcagtggcgcgatctcggctcactgcaacctctgcctcctggtttcaagcgatt

SEQ ID NO: 5722 - DNA, 6000 bp, Homo sapiens
atttactgcactaccagctccctccataggccctcagaaagcttccctttgccatccctgttggccctgggattcctggagaagtgaatttgaaagcagctgagttcatgtgtaaatgggcataagcaagtttgtaagaatgttttgaagtcagcttttattctcacttctgtatcttgtttgacgtgggtatgccctactcagtctccatgagcaggggcaacagacagtggtaattttccctaaaatttttctaattacataaattttccatcagggaaggtcttattggtaaaattaaactaaaagcattagattcttcttgctctgcttcaattttttaaaaagccaataatttctagccctcaacttttacacactgaaattcagacctgtatctgagattttatattgttacacaggaagtatttaatataaactttttttttttttttttttttttgagacagagtctcactctgtcacccaggctggagcgcagtgttgtggtctcggctcattgcaacctccacctcctgggttcacgccattcttttgtgcctcagcctcccaaatagctgggattaccggcatgcaccaccaggcccagctaatttttgtatttttagtagagaggggttacaccatgttgtccaggctggtctcaaactcctgacctcaggtgatctgcctacctcggtgctggattacaggtgtgagccacgacacctggccaaaacacacattagaaacagaatttaagagctagagggatcttaggaatcaactcttttgatagcttcacattcacaaacaagaatgtaagccccagagaagttaagtgacttgcctaaaaacacagtgactcagcacacagagaggaatccaggccacctggctttcaccctagagcttttcccacaattcaaaattaaaggatcttcttgctgttgccttcttcagtaccctacaacaatgctttgctccttctacatagcaagatacctagggtctcattgtagacccctcattccatgaaactagactcagagtagtttctgagtcactctgagtgtctacttatctgtaagttcaaggatattccaaaatatgctttccaagagacagtctccctaaaaatgtccctctggctttacaccacaaaaatcaccctagcagtaaagaacaatagaaaccatttccacccacagtgataacctccacgtaggtgcagtttcagcaccagccaaatggcagcaacactcttcactacagcttcccttgccatcagttgtctcaccagggcgtgcatgtggtgcttttatatccccgcagtgtttaacccaatatccacgtggtagagactcagtagttgcctctcaagtgggaattagacttcaaagactctgattaaatcctagagcaggggtcagcagactatagcctgtggagccaactccggtctgtttttatgaatatctgactctttttgtaaataaagttttattggaacactcccacactcgttcatttacatgttgtctatgactgctttcacattattatagaagtgagtcatcgcagcagaaaccatatgacacacaaaggctaaaaaatattggctctctggccccttacagaaaaagtttactggctgggcatggtgacccacgcctgtaattccagcactttgagagatcgaggtgagcggatcgcttgagctcaggagtttgaggccagcctgggcaacatggcgaaacccccgtctctacaaaaaatacagaaattagccaggcatggtggcacgcgcctgtaatcccagctactgggctgggggttggggcctgaggtgggaggatcacttaagcccaggaggcagagattgcagtgagcagagactgtgccactgcacaccagcctgggtgacagagtgagaccccgtctcaaaaaattaaaattaaaattaaaaaagcttcatatagcaatttgaattttataaaagggaaaaatgaaaaagaaaaactttgctgacccctggtccagggttacagcgtgatatggtagataaaccattttccaaagccttttttctgtttacttccaaatgatgcttatgagatggggaaaggtccaaatccagaaagatcttgccaaaccaaaaccattattataaccaattacagctgtttccttttcaaaccaatgtgcttattaataggaaattttttgaaatatattcgagtacttttctcttttgcatttttttgttcctgtttccctctattcagccagatgtatccatattatttaaaagataatgaggattttcacaacaggagtgcaaagagaaataaatagttaatattttgcttctggcatccgaaataaggttttccagaaagtttttttttttttttaagacatggtcttgctttgtcaactcaggctggagtacagtgtcatgatcatagctcactgcagccttcagctcccaggctcaagcaatcctcccacctcagcctcccaagtacctgggactacaggtgctgcaagctgccacatctagctaaattaaaaaaaaattttttttttgtagagacaggatctcactgtgtttcccaggctggtcttgaacccctgggctcaagtgacctcctgcctctacttcccacaatgctgggattacaggtgtgagccaccatgtccagccaaaaagttcttctacagatgggatctcactatgttgctcaagctggtcttgaactcctgggctcaagagatcctccggctttggcctcccgaagtgctgggatcacaggtatgagccatgctgcccagccaagacaatatttttgacaaccaggttttcttgagagagaggattttctaaatttcttcatttccctttgaattgttgtcatagagttctacatcagatacatcccagccaaacaggaaaaaaaaaaaaaaaaagaagacaaagcgtacattttctgattctagattaaggggactatgggaagaagtaatctcagctactcgggaggctgaggcaggagaatcgtttgaacccaggaggcagaagttgcagtgagccgagatggcgccactgcactccagcttgtgcaacagagcgagactccatctcaaaaaaaaaaaagtgcttagaatagtgcttgatacatagtggtattattatgagcggtggggtgatagatattactggtagactttttaaggagtgctgagaagagtgggttccaggtctcatttccattcaggaatgtggaaggagatcacctcgcagactgccctgtgtcagttggagcagccacatcagagcaaactctgctggaagtggggctgagcttgcctttcccctgcccttcgtcagcagccctcagtccccatgtgcctaagggggctcaggagcactggtcaagcatctcacaggaaaatttcgaggggcttatcttagagatgtgggccactgagcggatacagtgggatgggggcacatacaagtcaaagccaggtctcaggatggtccacattgccacgagccaaggtagcgcagacagcaagggagaacactggatctcaaaggcagaaagagaatcacccatgagtgactctggcctaatatcagacatcagccaccaaggccagcagaagacccaggagcaggacctgtgtctcctcagcagtcagcaattcgggcgggcccgtgggcccagcagctccagaacagaaaggagccgagatggagaggccacaggatagatgcaagaaccgtccccaccccgccctcctgtgcacctaggtgccatcttctgcaaatccgaaagactgagcattgtgtctaaagtggactgtttaccatttaaatgattaaatccaactatgcttcatagattagactaaaatatggcccccatccaatcatccaaccctccctcgcaccactgtccagagggatgggaacttataaaggcatttcatagaactgaagaaatcgcctttttttttttttacatttgaatgtggtgagggtaaacgtgttgactctgcctgtcttcctcctgcccgcacctcttcaagccctgaattggattacaggttaacaccctgccatgcacgtctacagacatacccacacccacacctgcacaagcttgtgtctaaaccttgcttcaggaacaagccagaagagttttgggctctaaggtaaacaggagaggaaaaaaaaaactttctaaaaaaagactccctcctggtaattttattttaaaagtagggagaataccactgtttgcataaacaagcttcgaaggtacaactactccctgctccctctatggctaatcaagggaggagttgaaggaatcaaacaatccgtcagtaaaaacgtattgttcactcactttgcagaacaaagcctatgctttggagcctattaggtaaactacaatttttttaaaaacttttagggatatagggaacaaagcaaagaacaacggaaatccctctgcctcagtattgagactgtgctggaggtcactccacccgtggcgactggggactggacccagcggtgaagtcagatagcgttgtcctcaggctgtttttcaatttgcttgataaacatgcaggatttctttgccagtcataaagctactagctcaaagcaggctgggtgacctcagatggctccgctgggactggaaggtcactggagccactggtgaaaatgatgctgtcactaccaactcaaaaggtcacctatcagtgtgccatgtgccacctcctggagcacacacatgtgcacacacatacactcacacgtgtgtgcaggtgcacacctcccccagaggctgcagccaagacgggcatcccacatcagagggatgaatggcaggtctgtcccgccagctgtgtgctctctcccacccgaagaaagcagcagagactcagacggcggagcctggaggagcccacgcagtctgttcccggcacccggtgcgtgtgaagggacttgagggcagcgagatggaatcagcaagagaaaacatcgaccttcaagtaagttctctctggaagagagcagaggggagaccgggagtagaggtgaagctggaagaacagaggattgatactttagtcacttgatattctccctccccgttctcttcttactcactcccttctccaaatgctccctaggctttgtctctttattttctctttctctctgtttccctatctggttcttcacttgttttgaaatatctgaaaaacagattggttaactcccttttggcctctgcttcctcttgtcagtcaaagagctaattagatccgtattaccagaaaatgatttcacattctgagcagtgctttccccaaaccccaggacagtagagacttctcttagagctgccggggagacaggaaatatatgagttttgaggctaggaagagaggcagctggccaactttgcattttacaggttggaaaaaacttgagccgtttctcggctgtcttcacaaagctctactgtgtaggacagaaagcgtctcatttggacagtgcaaggaaaggaaatcagtctaatctcctaggaagaggcagagatgtgtgtccctctgtagctgggatgggcttggaaggcatcagaggttccagtccactgctggaggggaaagggtgggatgttacggtgagaggagagccagattgctgggagctgcactctgtgactccttgccaatggatagaatagaacgaacccttctatgaccactgctgaggctgtgtaacattgcagagaatcaaacaaagtgtggaaaaggacttttgagatcaagaatttctgatccctgaacctggtcctcgaacaaaatcttaagcagccacccaatatacacttcggattaaagaagagctgttttgttgaagcagagtatgtgcacgcgtctctctctctctctctctctctc

SEQ ID NO: 5723 - DNA, 6000 bp, Homo sapiens
tgctccctcctccagccctgggcacccaccattctgctttctgtctctgtgaatctgagaaccacgtatcaatggaatcatacagtattcgtctttctgtgactggcttatttcactcataatgtcctcaaggttcatccatgttgtagcgtgtgtcaggatttccttcctcttaatagttcatcatgtgcaataccacgttttgtttgtttgatgacacttggatttatccatgatccatgtccatccgtggtggacacccgggttgctcccaccttctgctgtcgtgaatcacactgcaatgaatagtggcgtacaaataccacagaaggccttcgtgatgtcctgtgtcacttgaagatgaaatgagccgccggagacacattcgtaaaatgaacgggaaatgaaagcctttgcctggctacatgggggtttccaaactgaccctggggccctggggctcctgttcaaaggccccagagagcggaggcggagacaagcaggacttggcccaagcgccctcacctccacccagaatcacccccctttcaatccctccttcattccaatcacatttttatttccttgtgctgagggactgggcatacagcagggacaaacagcccgcaggccctgccccttatggaggctgcgtgctagaggaggaggcctgtatatggcacgtcccatgatagccactgaggagaagaaagatgctgtgaagaaggacagggaacgtcaggggtcgggccaagatggtggatcttgtagccaggaaagtcttcactcattaaaaaggtgattttcaaaaaaaaaaaaaaggttttttaatggagaagtaattcacatgccgtaaaattctccatgttaaagtttgcagctcggtgcttgacaggctattcacaaagccgtgcgtcactgcccaccactctctcattcaaggacactttcatcataaaaggtggcgttgaagaccttgagccggacgcctcctgctggcccctccgagtgctctccctgccctggggggctgtcctggggggggagcgagggcacgcggataagtccctaaggttccccgggtggaggcaccagcaggagagcgggggaggcagagggtgagtgggtgtccacggccccagccctcccacgggactgctgtggctggccgcatcccttgcctggcggccacagtcccccccatacagcctgttctctccagggtacagtggctttcccgtccccgtccccgtccccctccccgaggcttaggggctagctcccgcggtttccagccctggccactgcagtgtccctgcaggactccgtccacacctctgtaaatagcctctctgttaaactcgtctcaagctgcccgatccaggggtaccagctcttcctgcaggaaacccgacgccagacactgatggaaatgagagggccggccacgcagggggaagcaggcagacacagccgcggcgcggactgcaagctcgggggtcagccgcaccgatggggggcgcgcctgaggcacccaaggagcagcgggagcccgcgcccagagaggcgcggtcaggagaagccagctccagccaggtggggcctcgtggctgtgaatttggtggcattcatcagcttcttaaaatttgtaatttggaatgatttttaaaatcaagccagctccagccaggtggggcctcgtggctgtgaatttggtggcattcatcagcttcttaaaatttgtaatttggaatgatttttaaaatcaagccagctccagccaggtggggcctcgtggctgtgaatttggtggcattcatcagcttcttaaaatttgtaatttggaatgatttttaaaatcaagccagctccagccaggtggggcctcgtggctgtgaatttggtggcattcatcagcttcttaaaatttgtaatttggaatgatttttaaaatcaagccagctccagccaggtggggcctcgtggctgtgaatttggtggcattcatcagcttcttaaaatttgtaatttggaatgatttttaaaatcaagccagctccagccaggtggggcctcgtggctgtgaatttggtggcattcatcagcttcttaaaatttgtaatttggaatgatttttaaaatcaagccagctccagccaggtagggcctcgtggctgtggtcaaaactgtggcttttcctctaagggagatgggcagccctgggggcttcggagcagagggagggagccacagggtctgacttacgtttgaaaagagccttcggttgctgcattaagaatagatgatgagaggcagggtggggaggcccggtaccagacaggggcccgcaggaaacaggtgggaaagctggtttccaaaggactccttggaaaggggtggatgtaggggacgcaggatgcagcccagctgtaccccctcctccaccagtcagggaaggaagccgtcgctggagcctgaaggggaagtgggcagaggcagccgcctggaggccggcggtggccttgggctgagaaggcctggttttgaggcttcctaagtatgtctaaggggcgcacaggacacaggccgccagtgtgtctgcgaaggacggagctttccaagccgctgtcacgcttgacacagtagagggaggcgaaggctttccggacagggtgctggaaccccgtgggggcagtgggagcttgtataatgtgggagtggttacccataaaagaaaaataatgcaaatcccaggtacaaacataaaaataaaagtgaatatttattatcgaaagcaggatctcgagagatatttgcacacccgtgttgacggcagcatatttcacagtagccaaaaggaggacaccaccccagggtccatcgatagaggaacggatgcacaaaatgaggtctatccacacaatgaaatattaacccatcattggtcacccccaaaaagtaaggaaattctgacacacgcggcaccgtgggtgaaccttaccgacattgtgctaagtgaaatgagccagtcatggaaggacaactatgtgatgacttcccttctgtgaggtccctagaaccgtcaacatcagagatacagaaaggagagtggtggccgccagcggctgggggaggagggaacgggagctagtgtttaatgggttcagagtttcagttttacaagatgaacgaattatagagatagatggcggcgaaggtggagcaacatgattaatgtatttaattacactaaaccgtacacttaaaaagatgattaagatggcacattttatgccacaataaatattgggccacaataaaaaagttgaaaaaaggtgaatatttattcagttttaaaaatcattccaaattacaaattttaagaagctggtgaattccaccaaattcacaaaacctagagaagttacattctttttatgtattgactgcccagtgtgcctctgtagtattttttctaaatgtgtttgatttgtaatcctcaaaacatgtacaaaatttatgtgaaattaaggcattcataggaatcatttagatgcctttaaaaaatacattgtattcagccacaaaactgtgccaccagattactctgatactacagcactgacttattgatgaatctgtgtaggagttttgtcatcagaacacttgcttctgcaagcatttctctgcgttggtggcaattttgcttaccattttgctggaaccaccagattttgtgaagacacagtgcaccagttacactaagaaaataatctgatacggggactgcataaaatctatgacttcacccccggagaacccatgtggtactactactggtttgggctcacaacacaagaattttgatcaattctaatttgtgtaactctcatcagaacacaaagcaatgtacggtgtaattatattctttcaatatccactattttcctaacaggagagaacttctgtcctggccaggccttggtgagaaccaaatcctccaccaacgatgttacctgtgtggctttttgtagattttctgcagatgagctcctgactgttactttgccctccccaccacacatggccagggtgggtgtgacagcgtgcgctcacatcacggcccagcctctcttgctgcatctgctggtgggatgtcctgtgggatgagtgttcctggaagccctgcctacactcagctggaggtaacttctctgtacaaagaagtcactgtgaaccatgtcagcatatcccactaagcccagattaagtgtttccccagctcactttcctcttaactggatcccccaagtgccctcagccacccaaacatcatccaactaagagtccctcagacggaagagaagttgggatggaaagagacagacagtctcaaccggttatggttaaactatctcaacttttgcatattttacaaaaacatttggccacaggaacacattgctagggcctctccgggaaaggggggagtctgtggattcaggggtcctgaagcttcatcagttgcacagcaaatgcgtccccagccccgcccacgagcagctgagatgtggaggcgtgggtccactgacttcacctatgacctatgacctgtcccaaaggcaccaggcctggaaacaccagccagagtcccagctctgcccctgggactccccgggcctcaagagcctctgccaagcagggatgaggacacacccccacctcagggtcaacaagagatttgtgggtcaatcagagtactgtgcaaactcagctgctgtcctctggccatagtcacagcaagcccttcctgggtccagaaggtggttccacaggaacggggctgcctctttaaagcagaggggtgcactatagccctgagggaaccagctgcagttgtggtaatcttgggaggcagctccccaccccctgccaccccctccctgctgtcaggagaggattagaggagaggccagcggattaaagggtttcatgttgccacagcctctcccccagtccctgtctccgaggcctgcttgctaggtggggcgactcttctgtgagctgcagctgtggggcagagagaagccctccccacccaggactgagaggctggagaccccaggctcgccaaggcacggaagacaaaggcctggggcgtcctggggtctgggaggaaggcagacagagctcatggtctgtggctgctctgccctccttcccctccccaaccccaggcccaccatgcctgcaactcccaacttcctcgcaaaccccagctccagcagccgctggattcccctccagccaatgcccgtggcctgggcctttgtgcagaagacctcggccctcctgtggctgctgcttctaggcacctccctgtcccctgcgtggggacaggccaagattcctctggaaacgtaagcatcacgttcaaccccaccccaaaaacccggtcaccctttcccactttcttcccgggctgggcctccatcctctgcccactcctcccgcccctgccctccctctgggcttttccccagtggctgcgactgaccactctcttgctgtaaagccctttgcttctccggcctcctctttctcctcccaaaagctctgtgagttctggagtcccacctgcctctccccaggagccggatggctttaggaagaactgatcatcagggctgctgtcttcctggcctgacaagcagcttctgggacacctgaagggcgggtgctccttcaggataatcgctgagatgaggcagcctggaggagccgggttatctcagcatcgcagctccccgaagcatttggcaggaaatgcgtattttgacattccaaaaaggggaagcagttctgaacccacagaacgtctcatgcgcacaggaggtggcttgtccaggaactggggaaaaaaatggattttggtggccgcagtcttccctttctacacctttctgcctccttccaaccttgattctctagccggccatt

SEQ ID NO: 5724 - DNA, 6000 bp, Homo sapiens
gagacgagacacaaatctgcacatcagacagtgttcttcccatacatgcttgtgtttgtgagcacaaataactttcaggatcccaatgctaatgccataatttctgaatatagaattacttgcctggactaagattttttgttttagattagggtatttcttttctgccctgggttcacaggtccatgcttgtttacagatagagaaaggaagagtgaaaacatgaatactttcagtgttcaatcattcattcttgacagcccctgcaattgctgtaaccaaatctcagatcgaggaagcactctgaaagcatgtctttctatgattcccatttgaatggtttaagaatgtgaagtcaggaaaccatcagagaagaagaattctctctaggcacactgcacgtggaatttgattaggagactgttacctacaaaaccaccacaaagggtctttgttggtcaactcattcaagaggcttcgagatctttaataaggacaataagccaggctcagggccttaaatccacagcaacatagtatagtatgctggtctaaatgttttttttttttaattcatcctcttaatgtaattggcaggctttccctttacaatgaaattatctagaaattaggaggcagactaatatgtagttagggttgatttagatttcgagccatctaaggacagaaaactcccagtgttcagactggaatggtgagctgggattaaatttttgaattcccagtgggccaagtagagattcagatctgaatgccactaacccctgtgtgaaaggaaacccccatgtcagcaacctggagtcagcagtacccgaagagaggccttcacaaaggtgcctagggatcttctcggtccccagagaggcagggtatgcccttacatcaccatgacttcgcctttcctcttaccccaaggcaggaatgaagagatagtaattatacttattgactacttcattgcccattagcttctgaatgtagttacaagcacaagagggttgctttagccatgtggtttttagagtctacaatgatacaaaggcaagtcttcctcattttacatcaccatagcacagtgaatttaggctcttcctgcaattaaaattgtaccattaagtgagttaagtccagcaataactatatctctgcatatttcgggccaggaacagctgaggtgaaccaggataactgaattccctccctgtggctggctttatttggttactgtgaaagggacctatttccagcccagtgagggcactggggctgaagagtgttctctagaaccccagccagtcctcaagtttcatctctcacctgtcctgtaggtgaggagcctgagtgcaacgacatcactgccaggctgcagtatgtcaaggtgggaagctgtaagtctgaagtagaggtggatatccactactgccaggtaagggctctgcttcaataagggctgggtgtggagggctgagcctccgtgttcggatacctatccttagttacattctagaaggatctggaaaattcgcagggaagagaagggaaataaactggaagcatttttttttaagcaaatgttttattgaagtaactggaaatttttgactccaggaaaaaaacaaaaatggaggaaagactcagcaaatcctttacagaaaatggagagttatttatgcaagatgggggccacaattcttgaagatcagtcaaacatatataaaattttcctgcataaaacatgcataatcaggcataaaacattttatgcattaacatgcataaaaattgcagctagaggggtgtgggtatgatattattaccatagagaagaggacatgtcagacctatgatcttcctttacaaattgcctagctgtcctgggtgcttctgggtgagatcagacctgccttgcttggagggggtcagggagaaagcaggctgccccagagccctgcctaagccaggacttcccaccattgtgaagctcccatcttcctctgctttcttgcagggcaaatgtgccagcaaagccatgtactccattgacatcaacgatgtgcaggaccagtgctcctgctgctctccgacacggacggagcccatgcaggtggccctgcactgcaccaatggctctgttgtgtaccatgaggttctcaatgccatggagtgcaaatgctcccccaggaagtgcagcaagtgaggctgctgcagctgcatgggtgcctgctgctgcctgccttggcctgatggccaggccagagtgctgccagtcctctgcatgttctgctcttgtgcccttctgagcccacaataaaggctgagctcttatcttgcaaaaggctgctggtgcactgtgtcgtagggctgagatggcaacggtgggcaggggctgagttctgagaccggttctgaggaaggaagcacaggccccatctgcaagcctcagtgtcagtgtgagatactgccaacttctggggaagagtgatgtctttgcctccaggggtgggaaaggcatagcatggggtaggcctcttctgaaactcagcacaaagtaaaagggattttcccagcaacactggattctccagtctctgaatggaggggcttctgaacatagcagaggggtgggtcctggagccaggctcctgctgagatagatactattgttgtcacatggctggcagtgtggagaaggtgtctgaccaggtgtgcaaggatttctctgagcccgtggctcacagggttcctgtgtacccatagtggcccctgtgggagggagaggtgctgacgactgatggggacctggaaacagggtgctggcaggtgcagtagtgtggtcacccaactcagcctgaggccatgagccccagatttggaggcagacctgggctccacacatggccctcgctcagctgtgtggcctcaaacaagccccttggtggttctcagactcagtttcctcatctggaaaacaggagtgttgttctcactcataaggtggtaaggataaacaacctcagcctaaaatagggcctgcaagtccttaggtaactgtaaattgctctgtaatcatgtaagaagtggcgagaataacaatggggagatcaaggctttcggtagggaataagagactctaatgttaacagcagagcattagagatttcctttgtggtgagggctggaccggctgggtttctatcaggctttatgcttgatgccaaggtcctacatactccagacatccttcagtggaagaggaagtggtgtagataacaccaaacatcatccagtccccaaatcactaactggtactgtcacttgcagttagagatggtccttccttaaaatgtatggaagaattttcatgtacatgctggcaagatggtggggactcttgctggggagaatacccatgagaaagaaggggatgtcctggattacaagaatttgatgaagaattgattttcattccaaatacttttgacacaggagagactcagctcattgaaagtactggataatggaatcaaaagggacttagacatcatctagtccactgtccctcctccactcctttacaagtgatgaaagcagctcagagaattcaagtgacttgccaaaggtcataactgctgggtggcagggccaggttcagaacccaggtgacttgacacctgcataagaactcccaggccaccccatcagagccacaccatccctgttgcttacactcctcccgtgctgacatggggaccagtgactgctgcacccttaagttcccaccacttctgttactgcctgagcttaaccttaagagaagccacattacaggaaaatggcatagattatgctgagtaggcttggtggggagtttagtggggcagaaggaaggaagaatggatagaagttttatgtaactactcagtaattcaaaggttactgtctctccatccatcaccccactcccaactttgggtagcctctaaggtctctcttggtaggaaaccagatccagggacagggaattaactgtcactcttctgactgatcgcctaacactctagctggggacaaggtgttattggaggcatcagctctggagaaattcagcaggaaggctaggctaccactgcagcataggtggttgattttccaactgcctgtgtcttgctagcttgaacttctcatgtttactgatatgtcattttaccgtcaagaaaaaagctgaatcggaaaactgcatgttttgattattttaaaaaaacccaaaacgatggaagagagctgggtaaaaaggatgcaagaagagaaacttgtggggctagtgtgtgcggagcggtgtctcggcagtcttcttttatttacaggtattccaaaggcactatctgtacctggtttcagggaccctcttttttactcaccctcagaccaggcaagacagagtgccccaaagtggatgttttaaggggagtctcaaggaaggagtatatagacactaagaaactgctggagggaaagaagaaagggaatgaatgaaagagcaatggtgaccatttttcaatcgtttggggattgaaaagacatgataacggtccctggaagtagacagggagaaaggggttgttagggacagaaaggagcagaatagcagagtgttatgccacagactccagggcaggctgcctgctttggaatcctaggatcctcttagaggcaagttacttgccatttaacactgcagttctctcatctgtaaaatgggcacactgcagtgattgcctcatatacttattgttaggattaaaataactaccatagggaaagcactgagaagggtgttgggtggagaggaagtcctgtagaagcattagctggtagtacttgcagtggatggaataaaggcctgggttgggacatcacatcttgtggttttccttctgctctgccctcgactgtggtgtcacttactcccctttgcttccccaggctccttctctataaagtgggatctatcatgaccagcctaccttatcaatataggagagaaaatcttcatgcctgaaggtcagtgatcacaaatggcatacttgaccttaacatagtacttcttcattttgggggtccatggtattaatgaacttgttttacttctgtgcatcttggagttgcagattccatcgtgcagaagggccctttggaggtcttccctcccatccccctgcccaggtccgtgaactgtcccggggagatggcactcctcttcccctctggggatggagcttccatcatctactccctcaaccttccttaaccctcctagcgtctcatgggagagctcttgtaaaatggacccctcctcctgcctctggcagcccctcctgttttgcggtcccttgtgcacttactacctgcctcttctcccttttgttctgcttaacctaggggaaggtgaggacagctggtctccacctagtatggagacaggtgtgggagatccgccgtccaggggctcgcccccactcccgccccagggctaactcttgggcagtggatgaccctttggggcggcgggaagaaggttttgctggcaggattggaaactaatcagccagacagttcatgagataatccgactgaatttttacactcgaagcaggttgtggggcgttgccccggctctgggggagcagggagcgtttactgtctcgcccctcagccccacggacccgagtgtgtcctggactcaacccggccgcgggaccgcgctccattctcgacgccccgctcccagcacccgggcgcccagggcgcagcggggagagctgggctgtggctgcgcggcgccggcggccgggagggatgggggaggaggaggcggcagccggcgaggggcgggcgcgccgggacggagctgagccgcgatggaattagccccgcggcggcataagcctgcccagaagcgcgcggccgcgggccggcggg

SEQ ID NO: 5725 - DNA, 6000 bp, Homo sapiens
gaggagcccctctgcccggctgcccagtctgggaagtgaggagcacctcttcccggccgccatcccgtctaggaagtgaggagcgtctctgcccggccgcccatcgtctgagatgtggggagcgcctctgcccgcccgtgaccccgtctaggaggtgaggagcgtctctgcctggcagccaccccgtccgggagggaggtggggggtcagcccccgcccggccagccgccccgtccgggagggaggtgggggtcgcctctgcccggccaccccttctgggaagtgaggagcccctctacccggccaccaccccgtctgggaggtgtacccaacaactcattgagaacgggccattatgacgatggcggttttgtggaatagaaaagggggaaaggtggggaaaagatagagaaatcagattgttgctgtgtctgtgtagaaagaagtagacttgggagacttcattttgttctgtactgggaggggttcttctgccttgggatgctgttgagctgtgaccttgcccccagccctgtgctctctgcggcctgtgctgtgtccactcagggttaaatggattaagggcggtgcaagatgtgctttgttaaacagatgcttgaaggcagcatgctccttaagagtcatcaccacttcctaatctcaagtacccagggacacaaacactgcggaaggccgcagggtcctctgcctaggaaaaccagagacctttgttcacttgtttatctgctgaccttccctccactattgtcctatgaccctgccaaattcccctctgcgagaaacacccaagaatgatcaataaaaaaaaaaagaaaatggccaaaagacatgaaccaacatttcatcaaataggataatatatacaaggcaaacactttaaaagatatttgatatcattagccatcagtgaaataagaattaaaaccacaatgatagcactgaacacatattagaatggttaaaataagaaaaatacagctgggcatgatgcctatagtcctagctacttgggaagctgaagtgggagaattgcttgagctcaggagtttaagaccagcctgggcaacacaggcaaaggcagtttcttataaaactagagatgcaattaccttactgcccaagcattgcactcaggcatttatcccagagaaatgagaatttatgttcacacaaaacctgtatgaaagttcacagcaactttatttgtaatagcccagtgctgaaatcactccaaatgtccttcagcaggtaaatggttaaatgtaccacggaatattaatcagtggtgaaaactaatgatacacacaataacttggatggttgaaaaagtaatgatacacacaataacttggatgaatgaaaaaagccaatcttgaaaggttacgtgatatagaaaaaagcatgactacatttacataaggctcttgaaataaagttacagagatggagaacaaattagtgttgctaaggtttagggatggcggtgggttggaatataaaggggtagcacatgggagccttgcagtaatgtgaaaatgctgtatcctaactgtggttgtggttacacaaatctacacatgatacaattgcataaaaccactcaaacacacacgaacacaaaaagaagtgtttggtggtacatgccagtttggaaaatcggtgaaatttgaataaactctggattttgctaatgataatttcctggttttaatattttaataattttaaactgtatttatacaagatgttactgttgggggaactgggtaaaggggtttaggggaacctccctgtattgtattttttttttttggccaccttatatgaatctataattactttaaaataaaaagtttaaggccgggcgcggtggctcacgcctgtaatcccagcactttgggaagccgaggcgggtggatcatgaggtcaggagatcgagaccatcctggctaacactgtgaaaccctgtctctactaaaaatacaaaaaattagccgggcgtggtggcgggtgcctgtagtcccagctactcaggaggctgaggcaggagaatggcgtgaacccaggaggtggggcttgcagtgaaccgagatagcgccactgcactccagcgtgggcgacagagggagactccgtctcaaaaaaaaaaaaaaaaagtttaaaaaatgccaccccctcaaccccgtttttttgagacagggtctcactctgttgcccaggttggagtgcaatggtgtgatcatggctcactgctttcttgacctcctcaggctcaggtaatcctcccacctcagcctcccaagtagttggaactacaggtgtgtgccacaatacccagctatatttttttgtatctatttcttgtagagacaggatttcaccatgttgtccaggctagtcttgaactcctgggctcaagtgatcctcctgctttggcctcccaaaatgctgggattataggcgtgagtcaccattcaatgattttaagttttttttcaggggaaagttggtgggaataaataggcattcatgctgccagaaatatttcctcccattcttttttcttttctttttctttctttctttctttttttttttttttttgagacagtctcattctgttgcccaggttggagtgcagtggcaagatctcggcttactgcagcctccgcctcccgggttcaagtgatcctcctgcctcagtctcccgagtagctgggactacaggcgtccatgcccagctaatttttgtatttttagtagagacgggattttgctgcgttagccaggttggtcttgaactcctggcttcaagtgatccgccctccttggcctcccacattgctgggattacaggtgtgagttactgcgcctggccctttttcttttcttttggagatagggtctcattttgtcacccaggtgggagtgcagtggcgtgatctcggctcactgcaaccggaacatctgggctcaagctgtccttccgcctcagccccccaaatagctgggactacgggagtgagccaccacgcccggccccattctttttgtctttgggggcttataattttttgcaaattttcccaaattgtcatttttccccctaacttgccattttgatgtggtttcaggaggagaatgggataaacacatatgatgaatgcattatgtttccaagtgcaattgtttccttaagaagacttgtgacatttggatagataactttggtggactttttagagaatagatgtaaaggatggcaagactggaagcagaatgatgtatcattgatcttaggaggcacttgggttttttgtgtgtgcttgtttgtttgtttttttgcatttcaatatcttctaattgggatgtttcactttagctattagtcagacagcagtcaaactatatttgtcatacctgctcatgagcatcaaagcttgccaaatgggtgtctgaggcttggaagaaaactctagagcctggagaggaacactcttaggaaatgctgcatcaccaaagcccttatgaaatgcacagaggactacattgcgtggaaattagtggacatccaagactgagtcaaaaaagtgaatcattaacaatcagtctctgtgaagttttagggatagttaccatgttattgttttctatttccctttttatgcatgcacaagagtgaaatatagaaatcggtatgtatataaacccatattttcaatacatgtaaaacaaaaatgctaagtggtaaggaaagcatttgtcacagataatttgcaaccttttttctttttttttttgaaacagggtcttgctctgttgcccaggctggagtgcagtggcgtgatctcggctcactgcaaccgtcggctcccggcttcaagcgattctcttatctcagcctcacgagtagctgggattacaggcgcccgccaccatgcctggctgttttgtatttttagtagagacagaggtttcgccatgttggccaggctggtctcgaactcctgatctcaggtaatctgcctgactcggcctcccaaagtgctgggattacaggtgtgagccactgcgcccggccttgtaaccttttttcttagcgggacataaaataatggtgaattttccaactgatggagtccaggaaagggataatagtgagcagaggggagataatcactggaatgccaagaaggaaaaatcaactcgatttggcagattactgggggagaggtaaaggtgaaggggaggaaatctaggatggtttccacgtttctggtctgggcaactgagtcgatgtggtaacctcgactggagcaggtttgggagggagttcaatttaggaaggctatgttgaaagaaacgaatgaacgaaagcttcgtgcttgctttggtgggacggaaccccgcatccggtatctggcaccaggagcttgtggctgtgtctcgaggctcctgcaccctctcagagcgttagttagaggcggggcggtggtgcggagcgagggccagagcagggcaccagggctgggcgcgcaccaggaagccgccgcctccagctgaatgcgcgagtcccggcgcggggtggggcaggggcgggcacggtcttcagtaactgcctagcgattggttgggaggcaccacaaatgcctaacaaactgctgaagcgccctccgaagggacagacctcatctccaccccgccccgtccctccgccagactggagcgcaaactatggtcgcattgatcactgaaggatcctcacagcaaccgctcctttccggagtcggatgagaggagagttgtgactggcaattggcaggggcggggcgggctaggcctgtagcgctgggcgaccgtcctgggcatggattgggccgcggggttgtcaccgttatccgggaggcgtggtcagcactaataaaggcggaggccggcgcggcagctgcagtaagttccagcgcagctagaccgcggggtagtcggcgcgaggcggagcttggcagttccgtccacttcagccgcagcgtccctcaccgggtgtctcgccgcagcctccggagaggaacagaccctcactctctctgtcagaaaaatgtgagttgactctggtgtgggggctcggcacctccttgacaactctcgccccaagctcccgattctgcgggacggaaaatggcgcaatgcagcagctgcagcaacgcggggaactaccaccgcgcgccgcttccggaccgggccacccccagggaggggggccagcaccccattctcgcaccagccacagctagcaccccacgggcggggcaggggcgcaggggtcccacaatcattgcaccctctcctctcgtctgagtggcgcctcattctggttttggtatagtggagactcggagagggcgggggctgggggtggtggatggagacaactgggcaggggactcgaaaggtatttctgtcatctggctaaatcactactcagcgcctcaggaaagacagtcatgggtgcaactgccagttggtaacttatgttgccctacaatctctggatttgtttacccctcacccaaagtgtgatgtctagcccccctcatggcagtgagcaaagctgcagaaacttatctgccagttctctggcaccaggtgagcagctcagaaagactcaaggggtagtgggatagtggcctgtcatcccaagcggctgttcataccaaggccattcgtataggagatgtttttctatcaccgagtcttaccaaatagttggaggagaaatagggagagctgagctttccccctttcctccaacacacacagtttagtctccagcagtcttcaacatcacccccttcgcatgatcttgagggaaaactacggctaaacaaacgaagtacttctctgtcaagacctcaatatgtctaatacagatttttctttctgattactaccctggcctggtcctagatgtatttatgttgc

SEQ ID NO: 5726 - DNA, 6000 bp, Homo sapiens
cctacaaaggatgaagaaggtcctaactgtgacttccaattatggcagcagccctcaaaggatgtgccctggggcagggtgtggaactgtcatgtgtcttctagctcattgtaagcattgttaaaatgcctactgctctgggaattctatactaagttcagctctaccaagaatttcagggttgagcccagaccttaccttgccatgggcaaaggcccctaccacaaaaacaataggatcactgctgggcaccagctcacgcacatcactgacaaccgggatggaaaaagaagtgccaactttcatacatccaactggaaagtgatctgatactggattcttaattacctaaagtaaaaaagagagaaaagtcagccccagaaacattcccagaaccagccttcaactaacaggtttcaatacctcaccttcaaaagcttctgggggccatcagctgctcgaacactgagcttgtgtaaaagttgaactagaagggggaaaaaagagttcagagctagatggagaccacagtccttctgtccagtcatcgaacaaggaaaaccccatggataagatgagttccctgtgtgctttatatctagactggactcctgaaatgttaggaacaaacagttgccaagcatatggctagctgtacagtgatgggttcagactccctctttcactcagccaggaagctactgcaagaacaggagtggagtttccacaaacatagaaaaataataacagtccttgtcctggtattaatcatgttgttctcccattttctcgcttaaaaatccacatttagttctcccttttcctcttcctcccttcttccctactgacaagttcattctaactttgttctaaggcttcttacccatgaggccacaaaagcggtcaaaggttctgggaattcgggtctggggattcacttcaatcagaacattcttctgtgtatggatataaacctgtagcaagccagctcggttcaggggactatccatcagcatcagcaaactctgagcaaagcagaaaccgagacatggttaaggctgaagagaggcagcactcagctgccaacccttccatacagaggctcaaagggttgtgagcactgtccctggagttacctggtgggtgatatctggccgcgcttccccagggtcccgtccattcttcaacaatatagacttgtgcttgtcacagttgagtagctcatatgtcttccctacctgaagaacagggaacatgacgagagaacagcataagcttctgttacctagccccgtggttcttcaagtgtggtccccaaactaccagcagcagctgcacctggaaacttgttaggcaaattctcaggcccaccctagacctactaaaccaggaacactgggggtggagcccagcaagcccttcgggggattactgtgcagccttatttgcactccccagtgaatggtctgagagggaaacaggaggaagggcacaacctgtgacttcacattatctactaatacactggatttaattaaaaaacctgtggctgttaggcaaggccaatgagacatcctggaactaggcaggagttagtagttagcaaggctgaatgctgtgtttattacaggagcagtaagtaggtactgtgcaaaatatcgagtcaccaccctcagtttgcgtacaccaaacatgcactaagtgaagagctgcaaatctgaacaagaaatgtgaaggccgggcgtggtggctcacgcctgtaatcccagcactttgggaggccgaggcgggcagatcacaaggtcaggagattgagaccatcgtggctaacacggtgaaaccccatctctactaaaaatataaaaaattagccgggcatggtggcaggcgcctgtagtcccagctacttgggaggcagaggcaggagaatggcatgaacccaggaggcggagcttgcagcgccactgcactccagcccgggcaacagagcgagactccatctcaaaaaaaagaaatgtgaaaactaatgatgcaggaggcagtttaatcaaagaaaactctcagaagtaaaaggaagaggggttattcccagttttaagacgggcatgggggcagatgcagtggctcacggctgtaatcccagcactctgggaggccaaggcaggcaaatcacttaaggtcaggagttcaagaccagcctgggcaacatggcgaaaccccatctctactaaaaatacaaaaattagctgggcatggtggcacatgcctgtagtcctagctacttgggaggctaaggtgggaggatggcttgagcccaggagacagagattgcagtgagccaagactgtaccactgcactccagcaagaccctgtctcaaaaaaaagaaaaaagaaagactggcatgagcaaaggtacagatggaatcaagacaaagtagccaggtgtggtggcttatgcctgtgatcccaacactttaggaggccgaggtggaaggatcacttgagcccaggaatttgagaccggcctgggcaacacggtgggaccctgtctcacaaaaaaaaaaaaaaaaattagccaggcgcagtgccatttgctggcagtcccagttactcaggaggatgaggtgggaggactgcttgagccagggaagtagaggctgcagtgaaccatcacaccactgcactctgttgcccaggcaacagagcaagaccctatctcaaaaaagaaacaaaaaagaaaaagtggaaacgaagaaaggaaattttgaggaaaattgggagctgagacactaaagggcagtgattatatatgaagctgctttgtaaaccacagaatcctaatgtatcaagcacaaagccaaaaataattctggagtaagcagggcaggatgggaatgactgacagacactatcctaacaactctctgtacactggaaaagacatcagaagtttgatgttaaagaagtggactacatctgtagcagctaaaagaaataattccaagttgcaatttggagtcccaaggagcattagggtggtcagtaaaaagtctaaaaacaaactgttatatacaaatacaagttttggaaggttaagtttttatgtatcactggaatgtatatgtctagcaacattcttgagatatatggctccaaaaagtctgcgaaaaaagggatgtagattttgaaattgaatagttgaagtaatgtcacagagagcacaaagaacaaatgaccaagaactaagtccatgagacacccttagttatagaagaaaaaaaccttcttgaatgaataatacagtttcaacccattagtaggatataatcatgttttctattcttttaatagattacaggcgcaggcctgtaatcccagctactctggaggctgaggcaggagaatcgattgaacccgggaggcggaggctgcagtgagccaagatcgtgccactgcactccagcctggtagagactgagactccatctcaaaaaaaaaaaaaaaaaaaagtgtatttagaacgaagattaaaatcctggcctgacttctaaaccaatgcgatttcttctgggcctattcaattagttctaacgggtaagagaaaggaggaggaagaacactgcccaaggctttaagatagagaactgctggttctattacatgtggggaaagagatgaatgatagataaaaatgcagatgtaaaagttttaaataataaccaggtctggacagtgtatcataggtggatattagagagaggtgactatggatactaatgaattgaaacacgaagcccttacaaaaagtgtgggcagactaggctacataactacgtttctcatctgcccagtaacttgtcttgggatgtggaatgacgcaaggaacgaaactttcctctgcttagactactataccacagaatcctggtaaaccaattggaagcaaggaggtgagggctagaatatcattcaaaaagagcaaaagaaaatgagtactaccggccgggcacagtggctcacgcctctaatcccaacactttgggaggccgaggcgggcggatcacttgaggtcaggagttcgagaccagcgtggccaacatggtgaaaccccatctgaactaaaaatacaaaaaaattagccgggcgtggtggcacctgcctgtagtcccagctactccagaggctgagtcaggagaactgtttgaaggcgggaggcagaagttgcagtgagccgaggtcgcgcaactgcactccagcctgggcgacagagcgagactccgtctcaaaaaaaaaaaaaaaaagaaagaaaaatgagtactaccatcccaggatgtcaaatcaacgcaaagccaaccaagccaccttccttcaaaagcatctttcacccctctctgctttctacatccactctgggccccttaccctcattccacggagtcccaacctatcgatttactacttctccacttcctgtcccaaactaccttgactgtctccagactggccccttccagcaccacaataaactacggcctccgatcttgtttcctgcccctagtcggggccgcttgggtggcagagcatcccagtcctgtgcctgctccccaccgcttcgttcacgaggcttgaatccatcactgggcgcggccatcttgcaacaataccggaagttgcgctaacgctcttaaataagaacagcgcggcttctaatcacaaatttccttccggctgccattttgaaagtgggccaggaaatggagatgacttgctgtcttgcgctgccctccctgggagggcagccttccagaaaggggcgggacttccgtatgcgcgattcctgtgcgcgaagttcgggtccgtagtgggctaagggggagggtttcaaagggagcgcacttccgctgccctttctttcgccagccttacgggcccgaaccctcgtgtgaagggtgcagtacctaagccggagcggggtagaggcgggccggcacccccttctgacctccagtgccgccggcctcaagatcagacatggcccagaacttgaaggacttggcgggacggctgcccgccgggccccggggcatgggcacggccctgaagctgttgctgggggccggcgccgtggcctacggtgtgcgcgaatctgtgttcaccggtgagcaacctccgcctgctcgccggacgcttccagtccctcccccaaaccccttgccctgtccccgcgcccctccacgggcctagcatttcctctgagcagcggcctggcctgatcaccacccatctccccacagtggaaggcgggcacagagccatcttcttcaatcggatcggtggagtgcagcaggacactatcctggccgagggccttcacttcaggtaatggcgggcagagcctgctgaccctgacctttcacccttgacgccgacccagcagtggctatagtcggacgtgcaacaggattcaacgctgctcttttcccaccctcctcatccctgcccctaggatagtgggtgctgcgagaacctccagcagcatacaaactgttgttttccagagggacaagagaatctctccttgtctgtggtcgtggagaggagcaggccaaaaaacgcgtggtgaggggaaaccgggcaaggctagtgaaactgcggccttttctttttttttttttggagagggagtcttgctctgtcgcccaggctggagtgcagtggcgcgatctcggctcactgcaacctccgcctcctgatttcaagcgattctcctgcctcagcctcacgagtagctgggattacaggcgcccgccaccacgcccggctaatttttgtattttagtagagacggggtttcactatgtagatcaagctggtctcgaactcctgacctcaaatgatccgcccgcctcggcctcccaaagtgctgggattacaggcgtgagccaccgcgcccggccgaaactgtggcctcttaatacctatccctgtcctctccagga

SEQ ID NO: 5727 - DNA, 6000 bp, Homo sapiens
acatgatatacacatgttatctctggggatgtgactgttgatcatttgtttgaagtggtatttgctagatttctccgctgtaaagttatttaccatctttcatactccatgctttggaagtaaatcactaagcctaatataggtctgctagtaatgacgtctctcaagctttgtttaagggtttttaaaatttctccttcagttttgaaatatatactcactatgcagagtattcttgattgacaggttattttctttcttttagcacttagtagatatcatcttcattgtcttcatgcatgcacaattttgacaagaggtcgtctgtaatttttttttctctctctctctatatatacgtaatgtgctttttttcctttggctgcctctctctctgtctgtctctctgtctctttctctctctctctgtatctctctctctctctctctcatgcctgtgcaggtttaaatatgttatacctaggtagagagtatgtgagtgtgtgtgttattcttttcttacttggtgttctttaagtacattgtactgtggtttggtgtctgtcattattcctaatcattatttctctgagtctttcttctgccccattctgtcatcatttttctcctagcattccaattataagtctgctgcatattgtcctatagcttttggtttctctggtctattttttgttcacttcttgtagatttcttccaaaattgttccaaattatggctgccttcatgtattcatgtccagtgtaatctgctccccttgtgtgtgggctggatctagtaacttgcttctaatgaatagaatatggcaaaagtgctgagatatcaatttcaagattaggttagaaaggactgtgactccatatttctctctctttctctctctctctctctctctgcaagattttacacgctttctgctctatgggtgatgtcctcctggtaagaaactcagggcagcctcagtccaatttggcaagaaactgagcccctcagtacaacattctgccagcaaccatattagggactgtattagtctgctctggctgtcataacaaaataccacagactgggtggcttcagctacagaaatttatgctctcacagttatggaggctagaagtccatgttcaaggtgccagcaaatttggtttctggtgagggctctcttcctggcttgcaaacagccaccttctctctgtgtcctcacatggcctttcctctttgcatgtgtgaagagagttctctgtgtcttgttttgttcttataaggatagtaatcctggattaggacttcactcttataactttatgtaatgttaattacttccctaaaggccctatcttcaaatatagtcacattagggcttcaacctgtggattttgtgggggacaaaattcattccgtaacattctaccctccactcccaaattcatgttattctcacatgataaatatattaatcccattccaacaacacataaagtcttaaccctttccagcatcaattctaaagtctaaagtgcaaagtctcatttaaatcaggtatgggtgagactcaagttatgattcatcctgaggcaaaattcctttccagttgtgaacctgtgaagccagacaagttatgtgcatccaaaaaacagtagtgggacaggcataagacagacattctcattccaaaaaggagaagtggcaaattccattagatcttaagattcaacaataattatctttggctgaatcctctgccctccaggcccactggggtggcattgtcaccaccacagctgtaagtagcagactgttaaaactttttgtggctgctccactcctcaggcacggatggaggcagcctggtctactgaaactgaggagatggtcccatcctctgaaactgaggacaaaacagcctttcctctgggcctatagtgggagttacagcactgatgacctctgaatcaccttcaaggtcatttatccctttccttgaaggataaagcatgttcacagctgaatatctctattatttcatcctacagaatctcagaagtcagaaagctttccatgatttatttcaacccatttctattctctttggtccaaactggcagggtctctgctgatataatcccatctctattcaaggctcccgctaaggtggatgaaaaaagtcatggttaatttccctatggagtgattgaggcgccacaccattgatgttctctccagaacacattttatcatttttttgctatataaataggccgagatttttccaaatcttcagtttctgggttgcttttgtttttgttttttgcttaacaatgctgtcaatttatctttcccctctagccttttaccatgagcaattaggaaaaactaggctgtgcttttaacactttgcttatatatcttcccttttaaaaatccaaagttgtaattcacaagtcctacactttacaaaacactaagacacaattcagacaagttctttgccactttaaaacaaaaatcatcttttctgcagtttccaataacatgttcctcacttccatggaagacttcatcagaattgcttttagcattcatgtttttattaacagtcccttcaaggcaatttaggctttctcaggcatgcacctgaaaacttttctagcctctattcactacccagttccaaaggcacttccacatttttaggttatctgttacagaagcatctcccttctcagtaccaacatctgcatttgtctgcttggatcaacatagcaaagtactgtagactgagtcacttaaaaatgacagaaatttatttttcacatttctggaggctagaagttcattatcaaggtaccaggaaatttggtttctagtgagggctctcttgctggcttttagacatccactttttgtctgtgtcctcacgtggcctttcttctgcacatttgtggaaagagagagaacaagctctggtgtcccttcttgtaaggacatcaatcctattggattagggcctcacccttataatctcaagtaaccttaattacctccttaaaggccctgtcttgaaacatagtcacactggggggttattgctttaatctataaattttgaggagacacaattcagtccatggaatagcagtggccatgggagcagatccttcctcagtcaagcttccaggtgagaccacagccccagtttacaatgtaattatagccctgtgtgagatcttgaagcagaatatccagctatttccccaaagagatagttatcacatcccttatgcttttttatcataaaggcaagaaagggactcatttagattagaacctgctacgaaatatttgagagtgagagaacttgggtgtctagaaatgggagaaactcaaaacagtagcagagatattgtggagacatttattctatcaaagaatagcaataatcaggttttcattgttttctattttcagttcccacttctgtgagatcattttatcagcagttagtttgctatggattctgttagcatgaaagcgtttccggtcatactgtattttaaaaatttcaggaaattttctcagcatggctgagaaataatatactaaaacaagtttcagcatcctctttttgtgtcttccattcttccatcatgtgacttatcctagttagtgaattacatttccccaaagacatttcatctcaagctttccaagaaaaaattctccctgttttcctcctgatttcttctgactttgggcacctacctcagttctgagaagtaagaaagagactatattttgagaatggcactttatcatttcagaggcacatctcgctcatatctagcaagctccgatgtttaattggacttcaaaatacatttggcattaattgcagcagaattttatttaacctctgttatataaagccttgtcaggtatctaagttgaaaagggacaagaaaaaataaagttcttgaatttatcaatggagatttataaggacttatttatctaaagtatttagatattttatatctcattttaatttctgtatatattagcttcttttttactaataggcctactcgacatggaagtataggacgaaaaatcctggcaaacactctgatgggctcacttgggtcattggcttttccttgaacttgtcactgtaatcggggagacgtgggcgtgtgaaaagatgtgatctaccattcttaacatatcaaggaagggaaaaagcaattttcccaaagaagcagggcaggacatacaggcctatccgaacacagaacaatcactatgagctcagaagccactcatggttttctacctaatggttgaaatcatttaaatgaatgttttccaaactcatttgatgactaagctttattttcttttacataatcattaacaataaaaaactaattttaaaggactccattttgttaaacatttttatagacatgaaattttttcaaatatgtttatctgtgctcatgtttcatcagcaaagctttcgtagactagccagttttcagcaatgtaacctcttctgatccttttagcataactggttgaaatatgtatgctaaagtaaacaaacctgatgatatattttatcttttagataaatatctataaaactgtgctgacaagatcacatttatggaacaaaaatttttaaatgtgaaacatgagtctttttgaaaatttagagtggcaatttacagttccctttattctgtgagactttccaggcatattatttaacttcctttgttttccatatcctaacgtgataaggaagtagcaaagaaaaaacaacctcagcttttataatgacttcccctttggaaaactatgaactcaattttacagtattgtcatttccaaatagcagatctgttttcacctcatgagcagttctgagattatatataagaggacccaggagttacatcaggactcaggaagagatagacccataatgatgctgcctcaaaactcgtggcatattggtaaggttttgcttttattttgctctgccatttgggagatggtgggtatactaagaatatgtgtaacaacaaacagatataaatattatgtagtaaggtaaaaagaaaacaggacatgagaaatataaaaaaattgaaagttttgtggaacttagagtagcagcaatattggaggcaaaactgaaatccaagaaaggaggaaaacattaataaagtaaacagaaaatgtattataaagactggagattagaagtcacacaaggatatgaagttgtggaaatagaaagaagggataaattagaaacttattgttatcaagtgccaggtactacagtaaatgctttaggtcatctcaatttaattcacacatgtaacctattttatagatattattgtctccattggtagatggaaaatgaagacttataaggactaactgacttatgtaaggtcatgtagtagaatctcaagtgtaatttaaattcaggaccagctaagtctgagcccttgatctttctgctataaattttaataaagcaaataaataagaagacattatgataaaaaacaaagaacaagtctttgatggaccctaaagagtaaggactaagaaaggaatacatggctaagaagtctttcacagcacatctgaaattagtagtaacctttgcacttgcacttcatagacatttcgtggaaataaagaatcacgaagggaggtttttgctgtatttgggacttataactcctaaataggattgaggcttttgaaaatgcagtgctactcctgttggcattgtgtctctgtgccattcctcagtgcaattactacaagtcaacttaatattttgtaactgttttgcttatgactaaagaccagcacatttctagaaaaccagcagaagttctgatatttttcaaagcctcctttttgaaaaagggtttctacagtttg

SEQ ID NO: 5728 - DNA, 6000 bp, Homo sapiens
gccggccctgccggccccgggcaatgaggggcttagcacccgggccagcggctgcagagggtgtactgggtcccccagcagtgccagcccaccggcgctgcacttgatttctcaccgggccttagctgccttctcgcggggcagggctcgggacctgcagcccgccaagcctgagcctcccacctctcccccgccatgggctcctgtgcggccgagcctccccgatgagcgccaccccctgctccaaggcgcccagtcccatcgaccacccaagggctgaggagtgcgggcgcaagggcgcggactggcaggcagctccacctgcagccccagtgcagtgatccactgggtgaagccagctgggctcctgagtctggtggggccgtggagaacctttatgtctagctcagggattgtaaatacaccaataggcactctgtatctagctcaaggtttgtaaacacaccaatcaacaccctgtgtctagctcagtttgtgaatgcaccaatcgacactctgtatctagctgctctggtggggccttggagaacctttatgtggatactctgtatctaactgatctgacggggacgtggagaacctttatgtctagctcaaggtttgtaaacgcaccaatcagcgcactgtcaaaacagaccactcggctctaccaatcagcaggacgtgggtggggccagataagagaataaaagcaggctgcccgagctagcagttgcaaccggttgcgagttgctttctgtgctgtgcaagctttgttctttcgctgtttgggtccacggttcttttatgagctgtgataccgcggaagtctgtagcttcactcctgaagctagcaagaccacaagctcgccgagagaaacgagtaactctagacgtgccatcttaaaagctgtaacaccgcgagggtacgtggtttcattcttgaagtcagtgagaccaagaacctatcaattctggacacacgatctcggctcattgcaatctctgcctttgggttcaagtgattctcctgcttcagcctcctgagtagctaggattacaggctagtgccaccacactaagctaatttttgtatttttagcagagatggggtttcatcatgttgggcagcctggtcttaagctcctgacttcaggtgatccacctgccacacacttccaaagtgctgggattacaggtgtgagccactgtgcctggcctcttactggtttctttgcttgataatatgttgcaaatatataacattattcacatagaaatctttttctgaaggcgtaaatactgacatattggggaggtttctttttcttcttggtttttattttatcttagaggtagggtctttgtcactcaggctggagcaccgtggcttgattatagctcactgcagccctgatctctaaggctcaggtgattctcccacctcagcccctcaagtagttgggactacaggtacatgctaccatacctggctaatttttgtttgtttgtttgtttgtttttttttttttggtagagagaaggtctcactatgttgcccaggcctcaagtaatcctcctgcctttgccccacaaagtgctgggattacaggtgtgaggcattgtggccagccaataagttttaagtggaagagagtggttgtcttttaatgttatagctggagtgatttggtgatttcctggcacacaggtttttaaaagcatgtacacaatagggtttgttttcttgctactactggaatcctcctgccacaatgtacgtaaatccaggctaatccgctagaggatgaccaaagagagacgtgaatcagccagccccacccagcccaccagcttattgcagagtgagctcagctgagatggaaccgatccgatccaatccaaaccagaatcacccagtggtgttcagcccaaattgctgactctcgggaactatgaactaattgaatagctgtgtattttaagttttaagttaattgattatacagcaaaacctaactgatgccctgtcctgattccaaacactgggtactcatgttaaaagagcatcaccggccaggcatgctggtttacatctgtaatcctagcactttgggagaccaaggcaagaggatcacctgagcccaggtgttcgagatcagcctgggaaataacatagcgagaccctgtctctacaaaaaaaatttaaaagatccccaggtgtaatgacgtgtatctatagtcccagttactcgggaggctgaggtgggaggatcacttgatcccaggaggtcaaggctacagtgagtgaaggtcgagacactgcacttcagtctgggcaacagactgatatcctgtctcaaaaacaaaaaatggccaggcattgtggctcacacctgtaatcccagcactttgggtggctgaggtgggcggatcacctgaggttgggagttcaagaccagtctgaccaacatggagaaaccctgtctctactaaaaatacaaaattagacagtcgtggtggcgcatgcctgtagtcccagctactcgggatgctgaggcaggagaattgcttaaacccgggaggtggaggttgcagtgagccaagatttagccactgcactcactccagcctaggtgaccagagaaagactccatctcaaaaaaaaaaaatatttctgtttctcactcagccagtttccatctcagctgggccagctgcactccacctggtcctcaagctaatagatttcacttccctgaaggcccacaaaatcttttttttctcttttttttttcgttgacacagaatctcactctgtcacccaggctggagtgaagtggtacgattacggctcactgcaatccctgcctcccaaattccagtgattctcgtgcctcagcctcctgagtagccgaaattacagacgtgtgccaccatgcttggctaattttttggatttttagtagagatggggtttcactatgttggccaggctagtcttgaactcctggcctgaagcaatccgcccacctcagcctcccaaagtgctgagattataggcacgagccactacacctggccacaaaattctttaaagaagccaatcccatcctccctcaagagccaaggggccacctcaccctcttgttacagcagatcctgcctcccacagtcaccctgctcccaagtgcaacctctgtctgaccctgcatggtgtgcggtgccctcctgcctcaggccgtgagtacatgcagctgaactgctgtcagtcttatctgtccagtgtcgggtgttgtgtgtccagccacccataaccctgggttgggactccctccctcaccaaccgggggaagaagtagtgagcaaaccatctaccaattcttatctagatttatcctcttcagctgtagcttttgcaatactctggtcatactcaaagcattctgctgggatgtcacctgagctgggcctacatgcaattctgcttttcttctgagaaaataatttgtcattctttctgcttttataatttgttctattttaaattatttttctcatttttgcctttgctcctttcttctcagcattgtatactcaaaggaataccctcatactctacattttaatccaagacagaggaaagcaacagggagaacccctgaggcaggggcagagggaggttcagggaactgtaaatgggaggtagacaagagaccaaacaggactttaagttgtttcagcaagtatacagcttagaaaggatctcattggtctgggtcctaaaatatctcaaaggatggctgctaactcaaaacttttttttttttgagactgagtcttgctctgtcacccagggtggagtgcagtggcacgatctcggctcactgtaagctccgcctcccgggttcaagcaattttcctgcctcagcctcctgagtagctgggactacaggcatgcaccaccacacctggctaatttttgtatttttagtagaaacggggtttcaccatgttggccaggatggtctcgatctcttgacctcgtgatccgcccacctcagcttcccaaagtgctgggattataggcatgagccaccgtgcccagctcaaaacttttttctcactactctacaattaaatctcagttgaactctgggaagattctggaatacctaggttctttctttctcagtgtctatttcaccagtagttgtaaccatccttcaaccaaacatctccatttgagtagcataggctataatggattttctctatttaagattactcagcagtggccgggcacgtggtggctcacaacggtaaccccaggactttgggaggctgtattagtccgttttcatactgctgataaagacatacctgagactgggcaatttacaaatgaaagaggcttttttttttttttttttggagatggagttttgctcttgttgcccaggctggagtgcaacggcaggaggtcaggagttcgagacaagcctggccagtatgatgaaaccctgtcactactaaaaatacaaaaattagctgggcatggtggcacatgcctgtagtcccagctgctcgggaggctgaggcaggagaatcgcttgaacccgcgaggcagaggtagtagtgagctgagattgcaccactatactccagcctgggtggcagagtgagaccctgtctagaaaaaaaaaaaaaaaaaaaaaaaaaagacaatcagacctgcaaccatgaactgtttttcatgtatttctcgatttccttgtttgtgtttccttatttctgaacatgatgtatgttttaaattgaaagctttagctcactgcagagtctcctaagtcacatctcttcctttgcaagagtaggcgaagaaggatctaagggcttggcttgtttgaaagaaccacaccccgaaagtaacatctttggagaaagtgatacaagagcttctgcacccacctgatagaggaagtccaaagggtgtgcgcacacacaatggtgcctgaagaagagcctcaagaccgaggtaagcactcatcttctcagttctagggaaggtagtaggagcaggatggagtgggaaacaggcattgaggtgatagggatgactttggaagaagaagtagacagcttttcataaataatagtaatttcagtatggaaacaggtatggacccaagatacttggatcagggaaagatgaaagaaaaaaagaaaggccgggcgggcgcggtggctcacgcctgtaatccagcactttgggaggccgaggtgggcagagcacctgaggtcaggagttcgagaccagcctgaccaacatggagaaaccctgtctctactaaaaatagaaaattagccaggcgtggtggcacatgcctgtaatcccagctacttgggaggctgaggcaggagaatcacttgaacctgggaggcggaggttgcagtgagccgagatcgtgccattgcactccagcctgggcaacaggagtgaaactccatctcaaaaaaaagaaaaaaagaaaaacaactcgggcctagaaggccttaaaggaatatgaatttggccaggcatgcaggcaaatgcctaaagtcccagctactcagaggttgaggcaggaggaccacttaagcctggaagtttgaggccaaggctgtgcaattcaagggaaaagagagtaaggaattggaaagtacagtttactctgagagttttgcctggatttgtcttgggttccagggtactatctggtcatttgttctgagataatttctataatctctttttgctttcacattttttctgttttaattagttttgatcatagcctgactttattattctaagatttttgggactctggtttcctggctctttggcagtggggattatgactgtgcatttgtcatgctgatctgacagagaaaggactctggtggttccagttgaaggtctggtccatggcagtcgtatccatcttgctcctcagt

SEQ ID NO: 5729 - DNA, 6000 bp, Homo sapiens
tggccaactaagtgagacttcatctctaaataaataaataaatagaatttaaaacaaaaatgtaaaacaatttttttgctgggtttggtgactcacgactgtaatcccaccactttgggaggccgaggcgggcggatcacccgaggtcaagaatttcagaccagactggccaacgtggtgaactccacctctactaaaaatgcaaaaattagctggacgtgatgccctgtgcctgtattcccagcaactccagaggctgagacaagataatctcttgaacttgggaggtggaggttgcagtaagccaagatctcaccattgcattctagcccgggcaacaagggcaaaactccctctcaaaaaaaaaagaaaaaattttgtactctctctcctaagcccaggaggttgacgctgcagtgatctgtgatcatgctgctgcactccagcctaggtaacagagcaagaccttgtgttaacaaaattttaaaatattattcagctttggccagacatggtggctcacgcctgtagccctagcactttgggaggccgaggcgggtggatcacctgaggtcaggagttcaagaccagcctggccaacattgtgaaaccctgtctctactgaaaatacaaaaattagccgagtggcatgcgcctgtaatcccagctcttgggaggctgaagctggagaatcatttgaatccgggaggcagaggttgcagtgagcggagattgtgccactgcactgcagcctgggtgacagagcgagactccatatcaaaaaaaaaaaaaaaagaaaaaaaattattcagctttaaaaaacaagatcttgccattcacagcaacatggagaatatcatgctaattgaaataagccagacagaaaaaaaaattatatgaactctcttatatatgggatatgggaacagtcaaatacgtatattagcctcctgagtagctgggactacaggcgtatgccaccatactcgcctaatttttttttctttgcacccagaactttcctggcatcagtgagttttaaaatctttgacagagcttaggtcccattaagttggctaagctactattcatctctccacagacgtttagattgtttccatatcttggctattgtgaataatgctgcaatgaatatgggatgcagttatttttacaaggtgctggtttcatttcctttggatatatacccagaagtggaattgctggatcatagggtagttctgttttaattttttgaggaatcttccatactgctttccataatggctgcaccaatttacatttccaccaatgtaaacactttctcttttctccacttcagcaccaacacttgatttgggtggctgggaagtccaagatcaaggccccagcaaattcactgtctggggagggcatgcttccaggttcacaggtgactgtactcttgctgcgtcctcacaaggagaaatccaggagagagctccctgttgtctctcttttttttttttttttttttttttgagatggagttttgctctgtcacccaggctggagtgcaatggcgcgatctcgactcactgcaacctctgcctcccaggttcaagccattctcctgcctccacctcccaggtagctgggactacaggcatgtgccagcatgcctggctaattttttttgtatttttagtagagatgggtttcacaatgctggccaggcaggtctcaaactcctgacctcaagtgatctgcccacctcggcctcccgaagtgctaggattacagacataagccaccgcacccagcttggtgtctcttttttttttctgggacgaagtcttgttctgtagcccaggctggagtgtagtggcacgatctcagctcactgcaacctccacctcctgggttcaagagaatctcctgcctcagcctccagagtacctgggattacaggcatgcgccactgcacccggctaattttttgtatttttagtagagacggggtctttcaccatgttggccaggctggtcttgaacgcctgacctcaggtaatccacctgcttcggcctttcaaagtgttaggattacaggcttgagccactgagcctggccctggtgtctcttttataagtacactaatctcattgatgagacaccactcttattacctaatcacattccaaaggctctataccctaataccatcacactggggtttaggatttcaacatgttaatattgagggggtagaaacattcaattcatagcaataattttttttaattttttttttttgaaagggagtctcactctgtcacacaggctggagtgcagtggtgcaatcttggctgactgcaacctctgcctcccggattcatgcaattttcaggcctcattctcccaagtagctggaattgcaggcgtgcatcaccatgcccggctaatttttgtatttttagtagagatggggttttgccatgttgggcaggctggccttgaactcctagcctcaggtaatctgcctgccttggtctcccaaagaaattatatatatatatataaatatataaaaatacatatataaatatataaatataaatatattttaatatatttatatattatatataattaaatatatatatttaattttaaatataatatttaaatatatttaactatttaaatataatatttaaatatttaaatttaaatagaatattaaatataatatttaatatataatttatatataaatatatatttatatatgtatttatatataatttttatatatgtatttatatataatttatatataaatatatttatatataatttatatataaatatatttatatataaattatatataaatatatatttatatatgtatttatatataatttttatataaatatatatttatatatgtatttatatataatttatatataaatacgtatttatatataatttatatataaatacgtatttatatattatttatatatttatatatttatatatgtttatatagttatataaatatttatatatatttttatatattttttatatatttatatacatatttatatatatttatatatatatttatatatttttttgagatggaatcttgctctctggcccaggctggagtgcagtggcgtgatctcggctcactgcaacctccacctcccgggttcaagcaattttcctgcctcagtctccggagtagctgggattacaggcgcatgccaccacgcccggctagtttttgtcttttcagtagagacggggtttcaccatgttggccaggctggtcttgaactcttgatctcatgatccacctgcctcggcctcccaaagtgctgggattacaggcatgagccactgcatcctgcctaaatatacttttaaaatactgattgcaaaggccaggctgagatgaacattttagtacctactttttggtgaatatatgtatacatttctgttgagtgtatacctaggagtggaattcttggatcgtggggtagccatatgttctaataaatattgccaaacaatttatcaatttgtaccccattaacaaatgtgtgagagttctgaatgttccacattccccaggtttggcattcacttccttttttctccacaccccaactcccatctttgttttagtcattctagtgggcacgaattggtatctcatgtagttttaatgtgaagttccctgatcaacaattcagttgcatgccttttgacatgtttattgttgactgagatatcctcatttaagaagtgcagtatagacccttttaatggcccttgtttgctattgacttgtcaaccctgtactgaaggccatgctgtcgtggtaaggctccaggtaattccaaggtaagccttatgcttgggctaggggagaacaatctctccaaaacaccttcgtgctgtctgcaggggccttaccctggatggcaccaatggggcagcaggggatgatctttattactccaaagccgaaaacctagagagtcttttccaggaggtggagagaacgaccgcggggcttttcatccaaaaagagctcctgagtctgaaataactgttttgtttgtttgtttgtttgtttgtttgtttgtttgttttttgagacggaatcttgagctgttacccaggctggagtgcaatggcggagttcagctcactgtaacctccgcctcctgggttcaagcgattctcctgtctcagcctcccaagcagttgggactataggagcgcaccgccaagccccctaattttgttatttttagtaaagactgggtttcgccatgttggccaggctggtctcgaacccctgacctcaagttatccgctctcctcggcctccaaaagtgctaggattacaggtgtgagccaccgtgcgcggcccgaaataactctttacaggatctcgccctgggccttcccagcccagccggcccgcccgcggggatagcccgggcactatctccctgctgcaggcggtgaggggctcgggtatctttgaaaatagatacgttcacaccctcctaacggcggcgccaagggtggtgggtcccaaaactgtttccccgtaaagagttcccccgcccggtcgcaggaagacgcctgagggggcgctcggagggatccccagcagccgccggggctggaccgtgcggtgcgcaggtgagaagccgggaggggccggacaaccccgaccgcgagccggacccctgctctgaccgcaggtgggtgcttgtcttgcttacggagggctcccgatgaaccgagtcacgttttgtaaccacattaacggaccattcaaagtcgaatcctaggcttttcgaggcagttagtgggtcccaacggctgcaggcggggccggcgggggcgcagcggcccgggaggtgcgtggttgagcgaagccgcggggcccaaccgcagtcgcggggtctgggaggtgggtgcgccgcgccgtccctgcggccggggggtgcgggaatgaggacctgagctggggtagaggtggccgagctagagtagaggtgggcggctactcggaggtgggccgggctaagaaagaagagagctgcggctctgggaaactagccttggagccttggagaagagatttgtgatttactgagcacctactatgtcctgggctccgctctaggtgctgggatcccacagcaaacgaagccaccccagcccttgccttgctggactgtatattctagggaagagacagacaagaaaatgtatagatacgtaacaaaatgccgtaaatcttcatgaataaaaatgtagtagggctaggggagtggactgtgaagttgggagtggggaaggggtcggtctgagaggcctttgtgaggaagtgtcttttggcaggagacctgaatgaaatgagggagccttgggagcatgatccaggcggagggaactggattcgggaggaggaactgccttggccttgaaagatacctaccaggagttcaagtgctgtgcgggtgcatcagctttgtagatttgtgcaagatgaaaattggaattgtcttaggaaattatggatcattcatttattcagtgctggattcattcagtgatttatgtctgaagtgtgacagaaggggagtaaggccaagtgtccttggtaaaatactgttattagttttgtcccagtttaatacacagactaaatttagaatttccattgatttttaagaagaattaatctgagttaattttacagataaataaatagtaccttactttttttttctttttcttttttttgttttttttccatgctcagccctctattggagattctgcctcccctgggacagatggcttcttgagcacactcccacgatgggtggctgctctgggtgggtgtgcgctggtgtctcaacagggtgtaggggaggagtctagtgtcctgtcctctgagaggggacttt

SEQ ID NO: 5730 - DNA, 6000 bp, Homo sapiens
gcctgggagctgggattaggcccttcagggccaacaggagtgacggatggatggtttaaacccactatagacaggaaaatcaacatttctcaaattctttctttcttcaccctgaggacttattttctacagtgttttcaaattcaaagtgaactctgcctacactaacctaataaaggaagataaaaaagttgctttaacaaaagttgttctttatgaggaatattacagatgcaagcaaagttttagagcagttactagctcttttgtttctgtttttgtttttctttttgtttttttgagatggagtcttgctgtgtcgcccaggctggattgcaatggcgcaatctcagctcactgcaagctccgcctcccaggttcacgccattctcctgcctcagcctcctgaatagctgggactacaggcacccgccaccacgcccagctaatttttttgtatttttagtagagacggggtttcaccgtgttagccaggatggtctcaatctcctgaccttgtgatccacccgcctcggcctcccaaagtgctgggattacaggcatgagccactgcgcctggtcttgtttttgttttttttttggatggagtttttgctcttgttgcccagggtggagtgcagtggtgcaatctcggctcactgcaacctctgcttcccaggttcaagtgactctcctgcctcagcctcctgagtagcttggattacaggcacgcaccaccactcccagctaattttttagtatttttagtagagacagggtttcaccatgttggccaggctggtctcgaactcctgacctcagatgatccacccgccttggcctcccaaagtgctgggattacaggtgtgagccaccgcgcctggtccagttactagctttttagtgtgtcttgaaatgccacttacattgttttatgaaagagacagttttccctgtctttacctcaatgcgtttaaagccttgtgttccctgactttagattttatgtttgttttccacttggttatcatactagcaagcacccatcccacaaagctgcatgaaactaggattgagatttacattctgcagatttagattccaggattgagattcacattacaactcttctctagcggccagggtgaaggactatctaagcttggacattcctgttgctttgggggccagcccagtgcagaactggtttttgagcatcaggttcctcctaggtcccacttgctcaaggaatacttgtctcaatatgctcaacacacttttttttttcttttttgaggcagggtctcactctgttgcccagactgcatagctcactgcagcttctacctcctgggctcaagtgatcctcccacctcagcctcccaagtagctgggtctataggcacctgccattaccacgtccagctaatttttttttttttttttttttttgtagagaaggggtctcactgtgttgcccaggctggtctcaaacacctaggttcaagtgatccttccacctcaacctcccaaaatgctgggattatagatgtgagccactgtgcccaggtcaacacatttgtagattctcaagactcggctgaattccaattgtaacctttaaaaatatatatggccagggccgggcgagctggctcacacctgtaatcccagcacttttttttttttggagatggggtttccctcttgtcacccaggctagagtgcaattgcccacggcaacctccgcctcctgggttcaaacgattctcctgcctcagcctccccagtagctgggattacaggctcccgcctccacgcccagctaatttttgtatttttaatagagacagggtttcaccacattggccaggctggtctcgaactcgtgacctcaggtgatctgcccgcctcagtctcccaaagtgctgggattacaggcatgagccactgcgcccagccaatcccagaactttggaaggctgaggtggggggatcacgagatcaagagatcgccgggcgcggtggctcacgcctgtaatcccagcactttgggatgccaaggcgggatgatcacgaggtcaggagatggagaccacggtgaaaccccgtctctactaaaaatacaaaaaattagccgggcacggtggcaagcgcctgtagtcgcagctactcgggaggctaaggcaagagaatggcgtgaacccgggaggtggagcttgcagtaagccgagatcgcgccactgcactccagcctgggcaacagagcaagactctgtctaaaaaaaaaaaaaaaaaagagagatcaagagatcaagaccaccctggtgtacgactgggctaggcggccaggcttggctgtatgcaatttgcctgcatgcaacgctcgatatgcaacttaaaatattttcctgataaacacaactttgttgttttggtggggctacatatccctttaatttgtaaatttaaaatatacaatatgtttcaaagacttagtacaaaaaagtaaactattaatttttatattgaatgcatgctgaaatgacaatgttttggatatattgggttaaataaaataattatgaaaaaaatttatcttgtttcttttaaaatttttagtgtggctactagaaaccataatgtgacatgctcatattatatttctattggacagcactgccctttgggatatcctttttcctttagatactaaattcagttgctgtggtgactaaaggggcctctggctcagcatttcctggaaggcaatggtgagatgggggaggggagttgtcatcaaatcagattttaacaatatcctcgttaaagcaaaggaagcaacagtaatctagttttctcgggtccagcagtatcaatttgaattctaggccctcaaccaaaaccctaaaggaagatacactttctccaattcaccactgggaaaaagtttatctctttaccaagcgtccttcacccaccctgccacctccagtactgaaagggttgcaagctacaaatgaatgggcattaggaatttgatagttgatattcctcctccaaaaaagcctagatactatctctcacttacccagctgtttaaacacaaaccaagttgttttgctttgtttactctcaacctggaaccactcttctctctccccgattatccctccctcagttctcattcctattttcttctcctgcttagcttgttcagttttcttgtatagcttagtaatcagatacttatgtaacacttttctttcaagaaactcacagtccataactaataggatattaataatcttttccagttatgtgagaattacttgccctagtccctttttatactttataaaaagggaagaagggaaacactataaatgacttgtgggtcagaactcttttgtcctattattcttttttttttttttttttgagacggattcttgctctgtcgcccaggctggagtgcagtggcgctgtcttggctcactgcaagctccgcctgccgcgttcacgccattctcctgtctcagcctcccgagtagctgggactgcaggcgcccgccaccatgcccggctaattttttttttttttttttttttttttgtatttttagtagagaatggtttcaccgtgttagccaggatggtcttgatctcctgacctcgtgatccgcccacctcggcctcccaaagtgctgggattacaggcgtgagccaccgcgcccggcctttttttctattattcactgaagaatcaccagcttcttggagagtacctgatacatagcgtgtattcggcaaatacctgcttaattgaattcggtatttattgcatttctagatgctataagcttgagactagcagaaagtgatgcagaattcagaatgggtgatatggcaaatgccttattaaatatagggctcggcgcggtggctcacacttgtaatcccagcactttgggaggccaaggcgggcagatcacaaggtcaggagtttgagaccagcctggccaatatggtgaaaccccgtctttactaaaaatacaaaaattagcggggcgtggtggcgggcgcctatagtcccagctactcgggaggctgaggcaggagaattgcttgaacccgggaggcggaggttgcagtgagccgagatcgcaccactgcactccagcctgggcgacagagagagactccatatcaaaaaaaaaaaaaaaaaaaaaaaaaggatatggattgtattccataaacagttgaacctcttattcctactgccctgatagttggtctggctcctagaaattcagattttcttccctccaggtgagattatgcgaagaaaggaacactggcaaaattatttccctgattttcttctctcaggctgtctttccctcccctttaagattgtgtactccgtctcaaaaaaaaaagaaaaaaaaaagattgtagacccagcctataaattcataggatcaagaattcttactaacactctttctaacaaccttaaatctctgatagtagcacccacttgacttcgttttgtatggatagatttattctaatctctctgtagattgttttaatcccaagcagatgcgagagcataaaatagtgtatttgccctccctccaggcttttctggtagtattttgtctgtgaaactaagaggctctagctgctattagaagagggaaggagtaaggatgagcttttgaaaaaaaaaaaaaaaaaaaaacccagggtggagagagtggaaggatgtggttttaagagaggggggagggagggcgttattgtctgtggggcgggggcgggggtagttctgataacacagaattccgagagatcacaagattgcttcaggggggtggggtggggtggggtggggctgggggcttgtcgccctttcaggctccaccctttgcggagattataaatagtcatgatcccagcgagacccagagatgctgtaatggtaagactttggatccttcctgaggacgtggagaaaacttgctgctgagaaggacattttgaaggttttgttggctgaaaaagctgtttctggaatcacccctagatctttcttgaagacttgaattagattacagcgatggggacacagaaggtaagaatgatataattactggttatttttgcttgtttgggatacactcagaaaggcaaatattaatggtaatctccttgttctattttctcctaagtcaccaagctatcttaaggccttttcatttcgtctctagcctgcactgctgccgcttcatcagttctctttgaatgtcatacagttctgttcaccttatcataggaaagtcacccggagaagttgtgtttgcttctcaggtttattttaggtaaccatatgccactgaggacgagatggttgagtgtttagaggatcgggctgcttggttgtatggattacaagtgtgggtctcagagccagtgtgaagacttctctggaagcattagaccttgaaaaggtctgtgtttggaggcacaggccagggtctggccatctgtttgtcctataacatatggggttcgtggatgctaaggagaaagaattccagttgtccttcctattagggttaaaatcgtgagtgcaggacatactaaaatattgagtgttgtatatgcattatttgcagggagaaaggcttttcttttttttctgattgagttttactcttgttgcccaggctggagtgcaatggagcgaccgcagctcaccacagcctccgcctcccgggttcaagcgattctcctgcctcagcctcctgagtagctgagattacaggcatgaaccaccgggcccggctaattttgtatttttagtagagacggggtttctctatgttggtcaggctggtctcgactcccgacctcaggcgatccgccggcctcggcctcccaaggtgctgagattacaggcatgagccactgcgcgcagcaagaaaggca

SEQ ID NO: 5731 - DNA, 6000 bp, Homo sapiens
ccaatgtctcttggcacaatccccagcagaagacataaggccatacgcatcagtatgagtaaaatggtaagggatgatgaagaaacattattggattgctggacattggtacttaatctactgtcacacctaaacctgccaatgaaaagtgaaagggaaatataattaaatacagaaaacttgcaggtgatagtatggccagaagtagatacaatcatcccttggtatcagtgggggattggtttgaggaccctgctttgaataccaaaacctgtggattctcaagtccctcatattagtacggtatttatgaatgaaattaatgtatgattttgtctcagtccaactagaatatattttaaaaatgagcatgatgtctgaatggcggactctttccttacccaaaccattggaaaagactgccaatcttctcttcatcctgtttttaattggacctgctagatgggaacccttagaattgcttaagcacattcaaatgattattttaaaacaatataggatggggggttcagttttaattaagaataggctggaggaagaatttcagctttaattaagaataagttagacacagtcatgttaatgcccacagattccctgtttaataatccagtatggcctagaagaaaacttggtggatcctggagatgaattgtatgttagagaggactgaataaaatcatgcttccaacagcatcagctgtacccaagatggcatcacaattcaagctttgctaaaagctaaaagacagtaatattctgttatctatttgcctaaaaccttattttctatctctatttagggagaaaatcaaagctaatacacattcatgtgggatggattccagtatacatttgctatgttcccataaggttatttaaattctcctttttatcacggcacttggcaagaagatacttagatgtgatcaattagaaagtaatattattaactgcattaatgtcatattaactcaatttgaagatctagcaaagattgaattactgtataatgcttgttaatcatatgaggctgattaacccaactaaagaacagggtccaggggaaatggtaaaattcttaggcatcacctggacaggggagatgagaggcatccctcagacaaccaaaaataagtaattgtctctgccagctccaaaatgaaagcaagaggtgcaaagatgttggcttgttaatgtggtggagaaatggcatacccctgttaataaagttatcaagaaaaaagctaaatttgactgaagttttgagcaagataatacatttgtatttttttttgttttatgtttttggaaattaaaaagcccttgtaaagccctgtggggccccacgagtcccaaacacagacgatttaagaagtttctgcagcacacagtcaagccatgctgactggagccgctggcaaaagcctgttactgccacctagtggctgcctgtgggatttttgtaataaaaagctacctggctgcagcttgaagtagcaccatttaaaaggaattgctagcttgttactgggttttagttgaaactgctttttgtactgaaggacataaaattatttgaaaactcataacatcctatttatatcatatcatcattccaacaagaaatgaaatgcacagaattccctccttgaatagaaaggagatactcaagaatgtgaaatggggttacccaatgcatgcacagtcaggtggctgacaggtcaccataaatttggttcccctgaggagttggctaaacctatagctgaataggcccctctctctggtcagctgtcaaggcagcagtgtggcttacagatagatggcagttcaagggtaaagggctggccgtcaacctgggaagcagcagccctgggatcagttagtgattgcatgttagatgaaaagacaaaaaataaatctgccccaaggctaaaattgagtgatgtttctcttggcatcaaagaaaagtagatactaacaatactcgtatggcatagatgtttacagcttttactgattctttttcagttgcctgaaatattgacaggcaatatagtttagaaaagggacttagacgataagttcctggatgatatttaaaaagggaaatcaaagaatctattgctgaacaacaggtgctggagaggatgtggagaaataggaatgcttttacactgttggtgggacgtaaactagttcaaccattgtggaagtcagtgtggagattcctcagggatctagaactagaaatacaatttgacccagccaccccattactgggtatatacccaaaggattataaatcatgctgctataaagacacatgcacacgtatgtttattgtggcactattcacaatagcaaagacttggaaccaacccaaatgtccatcaatgatagactggattaagaaaatgtggcacatatacaccatggaatactatgcagccataaaaaatgatgagttcatgtcctttgtaggcacatggatgaagctggaaaccatcattctcagcaaactatcgcaagaacaaaaaaccaaacaccgcatgttctcactcataggtgggaattgaacaatgagaacacttggacccaggaaggggaacatcacactctggggactgttgtggggtggggggaggggggagggatagcattaggagatatacctaatgctaaatgacgagttaatgggtgcagcacaccagcatggcacatgtatgcatatgtaacaaacctgcacgttgtgcacacgtaccctaaagcttaaagtgtaataaaagataaataaaaataaataaaaattaatccccccccccaaaaaagaaatcattaagcatggtcaactttagaagaatgcactaaggatagttaagaaggcttttacttgtcacatgcttttcatagtattaatcataaaacatattactcgtataatttggggaaaatcaatgaaacaaaagatataaaaacattttggctggaaaaaatattaatttattgatttctgtttaattgtatattgataaaaattaacatacaattgtttagtaatattgatggttgctggttgattgtaattaataaaagatggactgtggtaattatgttcatcattttataattcatatagctcatccactagatagtttctctttttttactgatcaaaagctatttgctgagaatacacatattaaatatgggtatattctataatatacacatatataatttaaagatatttttaaaattgtattactataaaacagagaatgcagagaaaattgaccagtaccttgaaataataaaaagtccctttgagaacaagaatattttctcacacatggaaaattcgtgagtcactggatgtggggatttaccaagtcatgtacatcatacttatgcctcctgactcgtgaacttaaataaactgagaccagtgtgatcttattcttaagtatctttaagtaaggagaaggcacatatctaactattcttccagagaagcattaattcttttttttttttttttttgagacagagtctcactctatcgcccaggctggagtgcagtggtgcaattttggctcactgcaacctctgcctcccaggatcaagctattctcctgtctcagcctctcaagtatctggaattacagatgcgtgccaccacacttggctaatttttgtatttttagtagaggtggggtttcaccatgttggccaggctggtctcaaactcctgacctcaaatgatccacccaccttggcctcccaaagtgttggaattacaggcatgagccactgctcccggcccagagaaccattaaattctaatatctaattgaaattgctttttctgaccttcaaatacatttctcctactgtaggctgtaacatagaactaaaatccccaaataattgagaacaggagaattaaactgcctgctgggtctctgagacttcagaagctgcgttatgttgtgaaaaactaagctgagtttcaaagtggtctaatcacatgaggctgtcctgctgagggggactctagtagtcagcctagtagtagcagcctagtagtcagcataagataagagggacataaatccacaacattagaatattcaagagctgcaaatgaagaagaaagaaaaaccataaaagatgaaaaagaggacgggcgcggtggctcacgcctgtaatctcaggactttgggaggctgaggcgggcggatcacgaggtcaggaaattgaaaccatcctgacgaccacagtgaaaccccgtctctgctaaaaatacaaaaaattagccaggcgtggtggcgagcgcctgtagtcccagctactcgggaggctgaggcaggagaatggcttgaacccgggaggcggagcttgcagtgagcggagatcatgccactgcactccagcctggacgacagagcgagactctgtctcaaaaaaaaaaaaaaaaaaaaagatgaaaaaattcaggttgccatgtcctaaatacatacactatatgcccagctttgtgctatgttgtctaagtcttcttttcagttaccaaatgtgtggatggtacagatccaaagtgaaattcagagtgcagaggtgagctccatattgtcaaggaaaaactgggggatgagttatgccttgaagaaactagagacatttggtccaacgaaacgaaacaacatttaaaaaaaaaactctcctgtttccccatggctagcctatttgtgttgatgcttaccatttcataatttcctcattttgttgttacatggagtgaagagaactgacatgctgtccaataaacttccttgtcctccttatgcaagaaaggaaatcctgacttaatgcgtagccacagaacaagttaatattctacatctatcggagctgaacttcctaaaagacaaagtgtttatctttcaagattcattctccctgaatcttaccaacaaaacactcctgaggagaaagaaagagagggagggagagaaaaagagagagagagaaacaaaaaaccaaagagagagaaaaaatgaattcatctaaatcatctgaaacacaatgcacaggtaaaatctgcaactcttcctttccttccatagatctctttttggaacaagtgataaatatggtgaaagacaggacaatagaaaagtattcactgaagttaaaaaaaaaagtggggggacagaggaagagagagagagagatttaaagactatttcttataccagaaagcctgctggcctctagctaagggagagctatcagtttccaccctttctgcaatacattgtgtcccttttggcaagtcacttcacttctctggaactctctttgtctgtaaaatgtttaatgggaggaagagaggaactattagatgactgttaacattttacctaatttacaaagcgcttgaaaagtgagacacagaaaaaaaaaaaagatcaggagaaggacaagaaaagcaaagacgagaaaagggaaaagaaagaaaaagaaagaaggggggccttagaaaatactgaaaaaaatttaactgagagacttagaaaggaaaaattgtatatctgagttcatgagtcagagtcttactccaggggtgctaaacgtgtggtcctcagaccagcagcagcagtagcccctgggaacttgttggttccatacaaactctactgagttgctaactctgggggtaagggtcagcaatctgtgtttccataaaccctccaagtgattctgaagcatgctgaaatttgggaattactcagtacaaacaatggaagtagaaggaaataagtaaggatgaataagaatctcttctatctcttttgtaccttgcttagggaagattgatcatgtttgtgtctttctttctacagagagaggatgcttctcttcccaaatgttcttatggactgttgctgggatccccatcctatttctcag

SEQ ID NO: 5732 - DNA, 6000 bp, Homo sapiens
tgaaatgactgattctaggataagggtaagagaaccacaaaactttttaaaaatatacatttgaggcatacaagatattttgattgatacacatatacatagtgaagtgattacttcagtcaagcaaattaacatattcatcatctcatgtagttattttttttttggtggtaagagtacctaaaatctactctcctggcaaagtaccagtatacaatacaatattaactatagtccttatgttacacactagaacattagaatctaaccgcaacttcgtaccttttgacctacatcttcccatttcccctaccccgcccctggtaaccatcttcctacactgtttctatggtgatttttttcaagactccacatacaaccgatatcatatcatatttttctttctgtgtgtgtcttatttcactcagcatgatgtcctccaggtccattcatgctgaatgctacaagataaaatcggaacatcttatgtgcctgaaagtaaagaattcctcaaaaaatcatatggacatgtcaaaaggataaaggaggcaccactaaaaggctcccactggctgctcaacagaggcccacaccctcccgcaacttctcggcctcatcagtgggtggactgcatgttcctgtggtaggaaacacaccctcccctcagagatctgaatctctaatcttgcaggtggggaagggagcatttcctttaacttaagtaactcctttattaactcttcttcagccctagaagtaacagctccttttcgtagctgcttcttctgtatcatagagtcctcttttagtaactgatcatcttttactagaaaataattctttaaatttttcctgttaaaatcgccaatatgatatctgtttctgaatggaccctgattgatataaaaacgtatcacttcccttgcatttctatccaaaaaaaatgcaaacttaaatataatcatgaggaaatgatagccgcaggaggcagacaaatgcctaggcagatccccagtgaaaccccatctccaagctgaagacagtttaaagcctgaaagccaagctacaagtcaaatccatggaccggattaaaaacctgtcttcccatttggcacatttttctttgattgatccccacctttcacccattttatatacacctaccctttcctaattggttttctacactgtcgtgcccacctttgagtggtgtcttcactttaactgtttttgcatactcacaaaccaatcagcacacactttccattctgaatccataaatgcccagacctagccacattgggtgagaaaccacctgactgcaggggtgggggaccacctccacctaccacatcccctctccgctgagagctgttccatcgctcaataaaattcttctccatccttctcatccttcaaattgtcagcatatcctcattcttcttggatgtgggacaagagttcaggaaccaccgaatgcagatacaaactataacacaggcagcaggtcaagtgaggcctgggggttttgcggggggggggtgtcactagctatggacgggtccctggttggcaaagtgaccgagaaaaatcctacatcagatatatcaaacaaaaccaaaatgaaagacattctacaaaacaagtggccagtacctatcaaaatttcaaagtcaagtaagatcaatgacaactaattacaatgtgtgactctggcttggctcctgtgattgttgggaaatcggaagtaactatacatagcatctattgaaacgtgataaaattttgaatacagactatggatttggtaatattgtattaatactgtagttcctgattttgatgagaggatgtccttgtttctaggaaatacacactgatatatttaatggtaatggaagtttactctcaacctgttcaaaataaactaatgtatatggaggggaaaaagatgaatttaggtaaaatgtgtaccagagttctttgtattatccttgcatcttctctataaatgataaatatattaaaattgaaagttaccaaaaactatatttagtccttgaaatatggaaaacatgatcattttgaaaagcatctgagccgggctcagtggctcacacctgtaatcccagcattttgggaggctgaggcaggcagattatttgagtttaggagttcaagacaagcctgggcaaaaatgtgagaccctgtctctacaaaaaatacaaagattagctgggcatggtggcttgcgcctgtggtcccagctacttgggaagctgaggttctaggactgttaattaccttcctctcttatgattatacagaacaggaggcatccttcccatttgatttcagaccaacaatcctagaactgctttctaaacaaggtgaacaatttaccttgtgtgagagaaggcagtgtgggtgtaggtttattgtggggagtgtgcttgttaataatgaggctaagaaaggaggcaggccagaaatgcaaacaaacaaacaaaaaaaaattctgctcatttcaatttttgccccagcaagaaccttgagctcagttctcagaggtgagaattctaacacagaaagcacccagaaagggcactgaggtctgagaagcaaggaagtgacccaggttgtttgcctctggtcggaaagggaaactacccctgcttccactctgacagcagacaagttaatcaacctactcaattgcatttttggcccattccccatttccaacatgaacagttcctcccctccagcccaatgccactctaggcagtcaccaagaggtaagatttctgaaatcaaaacttgaattaaccaacaaaggaacatcaattctagaacggattgtaacagggatttttgtcttttttctctgctgtatccccaagatctatattatatattctgtggttttggcacatagtaattgctcagtaaagctgtgttgagttacttgataaaaaataagtcagtagaaataacttaaatgctcaacattaatgtcattggttaagtagcaatgcatagaactaaatattatgctattaaaaagtttatttgtaaagtcaaggatatggaaaaatatttgatacatacatatctttttgagataggttctcactctatcaccaaggctggagggtagtggcaagaccatagctcactgcagcctccaactcccaggctcaagcaatcttccagcctcaggctcccaagcagctgggactacaggtgtgcaccaccaagcccagctgatttttttttttgaaagaaggggtctcactatgttgcccaggctagtcttgaattcctgacctcaagtgatccttctgccccggaatcccaaagtgctgggattacgggcatgagccacagtgtgggactgatacatttttgaaaaaaggaaacaacatatattcatgaaggaaatacacaccctcctggtgagtttatgtatgatttttgttttgttgttttctgtgttatctgatcacaaattactttcattttcaggaagaaaaaaatttaatttttttttttattggggcaacatccaacccagatatgattactacctagcctgaactgaatgtattactaataaacaaagaaatgcagaatggcatacagtcggtaaagcgtagtgcttgagagcatggattatggagactatttaaatactggctccataacttaatagcttgggacccacggtgttacttagcttctatctgctttaatttactcatctgtaaacttgggataagatacttcctcataaggttggtgtgaagaccaagtgaattaactatcgtttaaagcacttacaaaagtgccgggcaccaccgagatatgcatccgttagcttttattattattagactcaaaacactgtagtagttctaatgagaggggtaagaatcaaaaatccaggcacctgcatagagccagagaggcacacatagaagcaacgtaagagtggaagcggaatgaaaacatgctaaagccaggtacaagccacaagcgagggtccacaggaagaaattgttaattctgaagagagtgaatgcacgaagttacaggaaaaataacatctgaacagagtttaagaatgagcaggacttcaacaagtggctagtaagacataaggaacctacaaaagatcttagcaaaggcgcaaagattaccatcgtattgctcgtttcttcctactttgcagaagtaacctctggcgaacagaggtggttgcagagcatgcttatcaagcaaaataccacgaagcagtaaggaacgacagagataacagtaacaataataattcaccccaaggtactcaactggaaaaaggaaatacagaggagaggtgtcgttaagaaagccaggacgcacatcacggccccgtcgctgcactactctcgtctaggggtcaacagtggagtcgagactcgaagcttccacgcggcggaacagcgtccctctcaggcggcgaacgggctagggaagcgcccggaggagacctagcgtgagaactacaactcccgcggagcccgagggcgagctgcctgcgtaacttccgcttccgccacctgcccctctcaccctcttcactcgaaccctacccgggagcggtcaggcgcgtgaccccgcgtgaccggggtgcgcgagccgagaggccctggaagcgggactctgggaccccattgaaagaaaggcaaccagaaaaggcgaaacgacaacctcgatagtgattggagctgatggaacgagggcggagctaaagtcccagaatactggccaatcagagtttaagattatcagggagcccgggaaggggaaaggggcgaaatggttctatggtcacatgccgcggggtctggtgggaggagcggttgcccagcggcctcttggcgcttcctgtttccggttcccagagtggggcacagcgaggcgctagggggaacgctggcctctgaaactagctctgggaccggggtctgcggccggcccctagctggccccgtctcccatccccagaagggtattcactggggattctgagctttggctactccagtttcccacgacacgtgagtgtgaggggcgtggaggaggaggcgggctgggttgcgctcacacttaagcgtctgtgacaggagccggaatcgcattctcccttgaccatggttctagccaaagatctggctgaggagccctaagggtagaatggaggcggaggcatgagagcggagagtcacggagttccgaaaggtgtgagggagaaaggacttccaagaccagagaggggatttacgatatttagaaagcagggaaaggaaaataccccaagtatggagtccgttggaggtgttggtggatttatttgtaggaggaattttggcctgcatcacggtgggaggtcaagtggcatcatttggagagggtatggctacaagcgcttggaaagtcgggacactagacagagcgagaatttctggcaccctgggagagctttgagggggatgcgactgtggtgtggataagaatggctgatggacggattatcttgtgttcctcgttgtggggagcttccgctcttgggacatagccgctacttgtctgaggctccttctctcttgagttctttcagcattaggccttttagccaattgaggctgcttttctaaacatgtaggctgctggagaaaaagggataaggactgctacatcagaaaggagccagcgggaagacagtagaaattccactggtaaatggccatggctgtcttaacagatggggaagtgagtgctacagaggcccagtggtgtaagctgcttcccagttgctggcttagtcattggccaccctaataaaggataatttttagcattgccaaataaaatagatctgtcgttagagaataagaaaactgaaagatttttcaagatcataaaatcctgctccttatttccaaagtatatagacaa

SEQ ID NO: 5733 - DNA, 6000 bp, Homo sapiens
cagtggggtgttaaagtctcccattattattgtgtgggagtctaagtctctttgtaggtctctaagggcttgctttatgaatctgggtgctcctgtttttgggtgcatatatatttatgatagttagctcttcttgttgaattgatcgctttaccattatgtaatggccttctttgtctcttttgatctttgttggtttaaagtctgttttatcagagactaggattgcaacccttgcttttttctgttttccatttgattggtagatcttcctccatccctttattttgagcctatgtgtgtctctgcaggtaaatggatctcctgaacacagcacaatgatgggtcttgactctttatccaatttgccagtctgtgtcttttaattggagcatttagcccatttacatttaaggttaatactgttatgtgtgaatttgatcctgtcattatgatgttagctggttattttgctcattagttgatgcagtttcttcctagcattaacggtctttacaacttggcatgtttttgcagtggctggtcctggttgttcctttccatgtttacggcttccttcaggagctcttgtaaggcaggcctggtggtgacaaaatctttcagcatttgtttgtctgtaaaggattttatttctccttcacttatgaagcttagtttggctggatatgaaattcagggttgatatgaaattcttttctttaagaatgttgaatattggcccccactctcttctggcttgtagagtttctgccgagagatccgctgttagtctgatgggcttccctttgtgggtaacctgacctttctctctggctgcccttaacattttttccttcatttcaactttgatgaatctgaaaattatgtgtcttagagttgctcttcttgacgattatctttgtggtattctctgtatttcctgaatttgaatgttggcctgccttgctatgttggggaagttctggataatatcctgaagagtgttttccaacttggttccattcttcccatcactttcaggtacaccagtcagacatagatttggtcttttcacatagtcccacatttcttggaggcttcattcatttctttttactcttttttctctaaacttctcttctggcttcatttcattcatttgatcttcaatccctgacaccctttcttccacttgatcaaattggctactgaatcttgtgcatgcatcatgtagttctcgtgccatggttttcagctccatcaggtcgtttaaggtcttctctacactgtttattctagttagccatttgtctaatcttttttcaaggtttttagcttctttgcgatgggttcgaactcctcctttagctcggagaagtttgttattaccaatcgcctgaagccatcttctctcaactcatcaaagtcattctccatgcagctttgttctgttgctggtgaggagctgcattccttttgaggagaagaggcactctgatttttagaatttttggcttttctgctctggtttctccccatctttgtgattttatctaccattggtctttgatgatggtgacacacagatggtgttttggtttggatgtcctttctgtttgttcgttttccttcttacagtcaggaccctcagctgcaggtctgctggaggctgctggaggtgcactccagtccctgtttgcctgggtatcaccagtggagactgcagaacagcaaatattgcagtacggcaaatgttgctgcctgatccttcctctggaagcttcatctcagagggacacctggctgtatgaggtgtcagtcagctcctactgggaggtgtctcccagttaggctactcgggctcagggacccactagaggaggcagtctgtctgttctcagatctcaaactccatgctcagagaaccactactctctcccacgctgtcagacagggatgtttaagtctgcagaagtttcttctgcattttgttcagctatgccctgccctcagaggtggagtcgacagaggcaggcaggcctccttgagctgcagtgggctccacccagtttgagcttcctggcagctttgtttacctgctcaagcctcagcaatggtggatgcccctcccgtagcctcgctgccaccttgcagtttgatctcagactgatgtgctagcagtgagcaaggctctgtgggcatgggaccctccgagccaggcatgggatataatctcctggtgtgccatttgctaagaccattggaaaagtgcagtattagggtgggagtgtcctgattttccaggtaccgtctgtcatagcttcccttggctaggaaagggaattccccaatcccttgcgcttccttggtgaggcaatgccccaccctgcaccatgggctgtccccactgtctgccaagccccagtgagatgaacccagtacctcagttggaaatgcagaaatcaccaatcttctgtgtcgctcacgctgggagctatagactggagctgttcctatttggccatcttggaacccaatccacctaaggtcttgctctaaggttctatgcctgaaaatctttgaaagaggtgaaggacctcttcaaggagaaatacaaaccactgctcaatgaaataaaagaggacacaaataaatggaagatcattctatgcttacggataggaagaatcagtattgtgaatatggccatactgcccaaggtaatttatagattcaatgccatccccatcaagctaccaatgactttcttcacagaattggaaaaaactactttaaagttcatatggaaccaaaaaaggtcccacattgccaagacaaacctaagtcaaaagaacaaagctggaggcatcacgctacctgacttcaaactatactccaaggcaacagcaaccaaaacaacatggtactggtaccaaaacagagatatagaccaatggaacagaacagagcccccggaaataataccacatatctacaaccatctgatctttgacaaatctgacaaaaacgagaaatggggaaaggattccctatttaataaatggtgctgggaaaactggctagccatatatagaaagctgaaactggatcccttccttacaccttataaaaaattaattcaagatggattaaaaacttaaatgttagatctaaaaccataaaaaccctagaagaaaacctaggcaataccattcaggcaacaggcatgggaaggacttcatgactaaaacaccaataacaatggcaacaaaagccaaaattgaccaatgggatctaactaaattaaagagcttctgcacagcaaaagaaactaccatcagagtgaacagacaacctacagaatgggagaaaatttttacaatctacccatctgacaaacggctaatatccagaatctacaaagaacttacataaatttacaagaaaaaatcaaccaaccccatcaaaaaatgggcaaaggatatgaacagacacttctcaaaagaaaacatttatgcaggcaacagacacatgaaaaaatgctcatcatcactggccatcagagaaatgcaaatctaaaccacaatgagataccatctcacaccagttagaatgacagtcattaaaaagtcaggaaaaaacaggtgctggagaggatgtggagaaataggaacacttttacactgttggtgggactctaaactagttcaaccattgtggaagacagtgtggcgattcctcgagggactagaactagaatttgacccagccatctcattactgggtatatacccaaaggattataaatcacgctgctataaagacacatgcacacatatgtttattgtggcactattcacaatagcaaagactcgtgaaccatcccaaatgtctatcaatgatagactggattaagaatatatggcacatatgcaccatggaatagtatgcagccataaaaaaggatgagttcatgtcctttgtagggacatggatgaagctggaaaccatcattctgagcaaactattgcaaggacagaaaaccaaacaccgcatgttctcactcataggttggaattgaacaatgagaatatttggacacagggaggggaacaccacacaccggggcctgtcgtggggtggggggaggggggagggatagcattaggagatatacctaatgtaaatgacaagttaacgggtgcagcacaccaacatggcacatgtatacatatgtaacaaacctgtacattgtgaacttaaagtataataataataaaaaaaggtaaaaaaaaaaaagtagacacatactataatcaccttgaaaaaaaaagaaagtctttcaaagagataaaaaattccatatactccacttcctacaattctggcagtttccaaatacttttacttatgtgaaaatgctatcatatccaagagtgcctttagagctaagctaacagtaggctactgatctttagcacattgctttttctgttgtgttattcagggggctttctcacatttatgtttccatttttcacatttcacaactttctttggagcacagatatttcaggaagattttagagcctttgaatagcattatggacttttttgcattaatttttacttttacaaaattgtgctaaatattatttctgttaattagtgagttttgttgggggccccttaaattggaaccccaggctatgcctcatttgcttcactctggtcctggccctgagagaggaacacaaaagggatggttagaaaaacaagaacaaatgagcctcccagaattttctcaaacaacaggccagttaattaaggaaagtagatattacatagctaggtataatgaacatgcagtcagtggattgtctcagtaatttatggagataaccaccaacaaaaagtgtatgtgggtggggacaaaagagagacaacaaagtactgcaggcagaaagcttccttttgctgattttgcctcacagaattgagagtttgttcttacacacaagtttaatgccaccttcctctgtctgccatggaccaacaagcaatatatgctgagttaaacttacccacagactcaggcccagaaagttcttcaccttcatctcttcctcggggtaagtggctttaattttcctttcggcatttgtatgtcttccagaattagatcttcctgttacatttatggctttaaatcattgctttaaagatgagcagtagttttatattaatgtttaacgggtgttgcatggcttgcctgtagataatcacaactttgggaaaaaaaatttaaacctcatacatttatttttttcaatcaagttagcatgaaaagcaaacatcacttgtcttactgagccttggttaaaagactctgaacactttaggctaccctgggcacactgcctattggttacccctgctctacagggatggaaagaaggaagaaagaaagaaagaaagaaaagaaagaaagaaagaaagaaagaaagaaagaaagaaagaaagaaagaaaggaagaaagaaagaaagaaaggaaagaaagagaaagaaaagaagaaagaaagaaaggagagaaagaaaaagaaagagagagaaaggaaaggaaagaaagaaaaagagaaggaggaaggaaggaaggatggaaggaaggaaggaaaaatattttacatgtatgaactaaggaatatttaagacacattgcaaacttgctgtaataacaacctacgttattccaaattcctctacaaaatatcaatactatgattaagtcccagtgcattttcatccataatattcctttcagaatacaacgtgtaggccagttgcagtggctcatgcctgtaatcccaacactttggtaggctaaggtgatttgcttgagtccaggagtttaaggccagcctgggcaatgtggcaaaacctcatctctacaaacaatacaaaaaaatagccaagtgtggggcacgtgcctgtggtcctagc

SEQ ID NO: 5734 - DNA, 6000 bp, Homo sapiens
gcctactttcacctctctcatactttcttgtgaattcccttttaagataaaagtcccagaatgtcatccacctggaggcatttcctaggtatgttaggtgcacacagatccacaggaagtgggataagcagttctgttcaaattcattatgcatctatcaaacaagatccaagtacaattggatacattttatgatagcatagtagcccagaccccggcctaccttaaaattctatatggtacatttgctattttcacaccattatctttgagagtagtctccaaaaatgttgtatatggataagtctggaattaatttaggtaaagtactcagacatggttaagcgttatatctcatctttaatatagctcttcttttattctcttatgtattttactttcagaaacagtcaggtttttcagagtccaagcttgtgtgtacacaagcactatcttttaccttcactgtctcaagtcaaaaagaagaaaatgccagctcacactttccaagctcattttttgtgtttcagatgttccattgaagaggaaagttagaaagttcaaagacttgaagaggacagaaggttggaaagtgtttaaaactggaaatcccccgtttactcatggttaccttcattgaccctttacggtaaacaattcaaaaacacaaaggcacctgcaggttaaaaataaattttaccaatttgtgtaatttgcattaatttgagagaggatgatgtattctaaattgaagttttgattcacaagaagattaaaagccattcagaaacctaattcacccactgaaaggaaaaaaaaaaaaagagagatgagcagtttgtctccggaaattgtcttaggtcggaagtctgtggtccctgttcacatgtacccaaaagcatcctgctgctgcagctgtctgataagcacagagtaccccaccttctctgcacactttgcatctagctcatattacctcatctttacttcctttctgacgtctcaccctggattctacatataaggtcacacaggaaggaaagctgcattgagttttggtgtcctgaaagacttttgccaaccttgtccccgcactaatttctctaagcctcggctatactattttctcagctacacgatgaaatgtgaatgataatttctgccctaaaaatatcacttaattttttaacatatcatttatgaaagaagacacataaaatgtctccctaaaatggaaagttacatattattgccatctgtgttttataaagaggttgaaaggggtttgcttgcacaaggtttgtttctttatgtgtgttttttttttaagagaactaaacccatcagggctaaccacaataagtttgcttccatgttttgattaaaaaaaagggggtactgaagaactctctgacccccaaatctctcccacactgcatcttgaccctctacactttcctttgtttttctctggaatttcacgtgtagagatatgtttctttggcttaacaagtattgattagtaccgtgggcatatagtttattgtacctaagaggacattgtcacaagtgaaatagcatactcttaataatcactgaaatagcgtggtgttaataattacatgttgttaataattaacagcatgtgtcagctaggacagtgccaagcaaccattattcactgtgagtttaaattgattgctttctcaaattaaaagagatttctcacacttaagaaaaatagaaagaattatggaagggagggaagataaatgaagaaaaagttaatttttcaacaagttcaggctcttgcagaagaccttgagcagcatggggcccagtggatatccaggaggccactgacaaccatgtgcttggtacgttggctacttttttcttgcagtggctgcctcctcccacgcacccaagtactgatttcaacaaaatacttgggctatccccataaaaaaaagcagagaagggccaggagcagtggcttatgcctgtaatcccagcactttgggaggcggaggcaagaggatcatctgaggtcaggagttcgagaccagcctggccaacatagtgaaactccgtctctactaaaaaaaaaaaaaaaaatacaaaaattagccgggcgtggtggtgggtgcctgtaatcccagatcctcaggaggttgaggcaggagaatcgcttgaatccaggaggtggaggttgcagtgagcagagatcgcaccactgcattccagcctgggcaacaagagtaaaactctgtctcgaaaaaaaaaaaaaaaaaaaaaaagcagagaaaaatgactgcaaaataaagttaatagattttgatcaatgtcataatgtttaaaaatatttcctcaaaataagatttctaggtatcatttttctgtggcttagggcatatatgtaaatatatattatacgtaacatatatataaaaacctgtgcacactagatgtgtgtgtgtatacacacatccattaacttgattatggttgaagaagcaagaaaccttgagcaaatgagtcttagtaccatgaaaactgctagaggtggttgtaggagactgcagtttcctctgtctctttctcagacggagaagagacacattacattacatcagcaattatgctgtgacttctcagttattatctctgaatgccttacatcaaatgaggaactttctcttttcatgacgtgtaccaaactgtcactcccttccatataattgaaggcataatatgtaccaaatactatattaaaaaaatttagaattcataatttttcttcatagaaacattataaattggatgttatatttttagtttacagataacaaagccaaagctcagtggacttgtatggtcaatttcctgaagcactactggcttactgcacttaccttcattcttttccttaaagaagctaaacttctttttattttatagagtgtgttcttgttcttgttctttctgttctcaaattttcaatggttaactctttcctcccatttttatttaattccacatatgacctcctcaacaagaccatgcctgatgacctatataaatgacctcacatccattcctatgtattacctggttctttgcatgtagcagcctaaggtcatacacttctcaaccaaacaatcctacgaaccccaataaatagcactccatattttagaacttttagagttttatacatatttttcattcattcacgcattcagtaagggcatggaatacatactagattccagttactacggcaggtgttagaggcacagaggagacaagtcaaagcccttgccctcaagcagcttacagtctagtaagggaaacagataataaaccatgatataatatcagatattgacagcaatctgtacaggcacagagtgtgaggttctattttacatataatagcaactgacaatttctctgagcaggtggcagctgaagagtgagtcggttaaagggagagcgagacatgcagggagatggaaaaagaatcttttagagaaaaagtaaaagccctgtagtggtaggatgcttggcatttttaaggaggaggtttctgtcagagaggatactgaataataggaaaaatgataagagaggtaaccaggggccatattatgtataaagcattctcaactattaggtctttggattttacggtacatttgataggaagcctttcaaagtgcagtggggggaggagttaaacacttcaccaaaatcatatgaattaattataaaacaatggttctagctgctatgtggaaaagggactaagaaattgactgaaaaataggatggaagcaaagggagcttttagggccaacatgtacctctttgtgtcttaggtagacaaatgcatctaatggtccaactaacttctctagatgataacttccaacccacctatgcataaaatttaacgtctttattctaaataagtgatattaataataaaatttggggcaccaagattattaatcagagtggtattttgatttccctccttaaatcaccatacatagctttctgcattcatcttgcgttgactgtcattacttgtctgagtgagactgataccacagcgatgttttaaataataatcatacctcaaaagactgaagtctcagaggtatctgaagagaataacctagagcacagggggagaattgaaggagctgttactgaggtgacataaaagcagtctaaatgacagtaaaatgtgacaagaaaattagcaggaaacaaatgaaacagataatttaagataaacaattttagagcatagcaaggaagttccagaccacaagctttctgtttcctgcattcttacttcttactacgtgatacatctagtcaccagggaagaagcgaatgacacacttccaaaaaccaattcgtagctttctaaataaaaccctttcaagctggagagagatccatgagcatagagatcttaaaattcatgttcagcaataaatcctggggccccagacagtgtcaggtgcatagggggtgttcagtaaatatcagttaaatgtatgcataaatcgataaacgggattcctggaaaatactacactctccttctccaaattatcttcatctcaaagacaggaacctctaacttttaattctttacttagattatgctgtctcctaaactgtttatgttttctagaaatttaaggcaggatgtctcagagtctgggaaaatcccactttcctcctgctacaccttacagttgtgagaaagcacatttcagacaacagggaaaacccatacttcaccacaacaacacactatacattgtctggtccactggagcataaattaaagagaaacaatgtagtcaagcaagtaggcggcaagaggaagggggcggagacatcatcagggagtataaactctgagatgcctcagagcctcacagactcaacaagagctccagcaaagactttcactgtagcttgacttgacctgagattaactagggaatcttgagaataaagatgagctctgaaaattgtttcgtagcagagaacagctctttgcatccggagagtggacaagaaagtaagtcagatctgattgcctatttactctctggtatctctatatatgacattaatagtagttatacaagatatactggtaatctctctatatatgatatataatcttagagaaatatactgctaatctctatgtatgtgatatctaatggttgttagggaaggaagtgaggctttgtcttttagagaagacaggttcttcttcagggaagaggtaaacccctttttatctataagaagatagaatacctgagatgagagaaagccgcaaaaatgaatttcagaagatctttaaagatctttctctttgctttagtttatatcatctcagtgtttagatttaattagaaaactttctgctctagcccagttattctccatcatttttttcatatccatctgtacattctccaggaagtgttgtctctctttatgaaaaattctgttttccacataagcaattacattgtttgccttcctttgcattcagtgtctgctttcagtgtaccttatcctgtgttctcatgacagcatcctctagttgctggaaatgggcaagtttgccatctttgagagaatagctatatcagcagatgaaaatttacagtgtccatttgtaatttgctaaaaaaaaaagtcacaaaagaattcccgaaaatgcaatctcctgctttggtattctttataggactcttttcctctatttcatccttctatttaacctttccaatctctggcttcaaagactatgtaacttagaatttgttcttcctttcctttgtctctcagcaaaatataatcatcttagaaattttcctctcttctatttgtctattctatccacatatctagcttatttcctgttactgggattttgcctattgtttt

SEQ ID NO: 5735 - DNA, 6000 bp, Homo sapiens
aatgcagaattattttgggttgactatcatgtccagtggagaggaggggagcagtttcaggagccttggtctttctcaccgcagtacataccaagctggccaaggaaccaatgtgaactttgtaccaattcttaagtatgtggtgtcccattatgtattcaaagaccaaagaatgtctactgggtgagtccttgggcctactgtgaaccagacataagcaaatactctattactgggactccataagcttctactctaacaggagggtcatgatcctttcttgggaatcaatgtcaacttacatctgcattctgtaatcctagaaatgtatgtcctggattttttcccagttattcaaataaatggccatgaatcctgttgtgaactgatttgtgctcctatccaaacacatatgctgaagacataacccccagtgtgactatattttaagagagtgtctttaggaggaacctaaggttaaataaggtcataagggtaaggccttaatctcataagactggtatacatataaaaagagggaaagataccctctctgcacatacacagagaaaatgtcatgtgaggacacagtgagaaggcagtagtcggctccaggaagagagacctcattgaacactaacctggctagcaccttgatcttaggctttgagcctccagaatgatgaaaaataaatttctgttgtttaagccacccagcctatgttatttcattatggtagcttgagaagcctaatataagtcgcactggggatggactggagaaatacttaccatttactctagtcttggtgttgaagagggcttctttttaaggatgagttctcccattattgggtcctctgtcagaaaactggcttgggccaaactagattagggtaatagtttatacgttttgagtacatggttgcccttagcctactagtaatccacccttgatttctttcccgttgtacatgtccagcaaagtcagtggtatacagctgactgttaaattttcaagggttctcgagccaattgttaaacatcattatttttaaaaattatctaaagtaacttttgcaccaacagtaaggtgcataaatgtgctttggtcaagaagtaggctgaggcagacatccaggccatagtgacttaatgagtttggagtgcaggcatataactccacttgttatataacctgtttgtgtaagctcatacttggctcaaatccactattgtttggaaaaggtataactgccctgctgatgctgtacaggcgctcttgggcttgccttggctcagcatggcgtggcatggcatgacatggctcgcactggtgcccagaaagagagtagcactattgacccttgtaagggagagccagtcgccttgaaggcaggcagaggggaaccaggaacgagcttgtgcccagagggaaagagttaagctgctaatcctgacagagctggccttgcaggccagggcgtgctgctgcaggcgtggcggcggcaggagtcccagagccagagcagacagcggagataaaggcagacagtgtgagagagtcgctgttggtaaataaaactacatttcacctgcttagggcccccaagtgttctttcagctatcgcccatccacccactcccctcagacctcagcatgggctggaacctaacctgggtcatgacatttggagtcattgtggccctaatgccaagctaataaaataaatacttagaactcatcaatttgtgatgatttttagaagattttgctattatccatgcatgaaattattaacatctgttacatccgtatagtgaaaataatacgtaatgctgtactactgcatatttatttccaactctgtgtgttcagtgatgtcacctgggtaccttgaaatcagcaatggtgggaataattacatcacggaaatcagctggtgttacaaaccagagcttgttatgtgtgtgtttttctctgttccaccagttgttaaaggacagcacagaagtggaagcaccctttttggctctctatattacttctgtgaacattgagctctatctgacattgctatggctctatatgtcagtaatcctggctgctattgcaatttgaccctcattactataattggccccagcttgtttcagagtggcactctgacacttggcgtttcctacttcaaaccctgtcccaatactctctctgaattcagttctgtgggaacatctcccactgtaatctttggcatgtagagaagaactatgctaagcttctcagtgatgtttatgtaggacttaagttcttccaccagcgccttccttactgctttggtaaataaggtgcccattatatcatcccatagaacatagtcagttggtgggtttcctgtccttatctagtttatccactgtagcatgcccacttctctaagcatttttatcttttcttcagctacctgccatgggaattctggaatgttactctactcagcgtgagccattgctttctccaatcttcttggagttatttcagcagtatgtcagcactgttcacagtatttttccaagttattaaattctgtattgcaactgaatgccctaatgttgataaaatctcccttatccagctttatgtttctctcatgatctagcaccctcagaatccaatcccattgtgtacactccaagctgttgttattatatattggttaggtccaaattcattctgagtatagccctttctctcccttataagcttagcacataaccttagttattggccttatgaccaataactaagaaaggcaagtaagggagggattcctgtaaggagggtgtgaagggcacaatattttctttaaggaaaaaggcatgacctcgacaagggagaacatgtaactttgttaggattagagagtccaacgtttagaagcttctagatttttaaaatttttgagaaaaaaaattgtgaaaagtcactatacaaatgatggaaagtatttttaatacatttatctaaaaatggaatttttctatattatgttgcaacccattttacttatttatatacacatttttatgtgtatgtttctctacatatatatttacatatatataaaatcttaaaaatcaccataaggaaacaaataaatccataaaaatgggaaaaatatttaaataggtcattgaaaaaagatatatgagttaccaatacgcacgtgagtaaatgctcaatataacatcagagatgtacaaattaaaatcacatttagattctactacacgcctactagaatggttaaattgaaaaagattgggcatatctaatattgctatttatgtggagcaaatagaaccatccaatattcatgttgggaatggcacaactttttggaaaaaaatacatttataaaataaaacatacattttctatgtaacctagcagtttcacatccaggtatttcttcaaaagattaaaaaacgtgtcaatagaaaaacttttgcataaatgtttattttgaccttatgatatccaagaagtggaaaaagctcaatgtcataatggatacattttattataaaatagataaaaatattttatgtctgtacaatgaaatactactcagtaataaaaagaaattaactgctgatctgtgcaaaaacatggataaaactcaaaaacattatgctcagtgaaagacatcagacttacaagaattgccaactgtatcattctgcttaacaggaatttctaaaaccagcaaagctcatgtttattgacagtaagttggctgctgcctggcttcaggggtgaggatgaactgcaaagcaacagcggggaacatttccctgtgttgaaaatgttttatatcttaactgttgtatcttgactgttttcctttttggaacaaaactaaatttcactcaaccatacttgagtaatctctatatttttctatacatgcttttctaatagttctttggatacaatcttttgttaacaacaaaggtagaatatattcatttcctcatgaattttctgtcttttttttctgtccaaaaatgaaaagagcaattttgttatctgtcctttccttctgcccagaaatgattaaacctgtatttcttattctcttcatattttctttgttttaattcctttgtactacagtttcttctctattctcatttgcttttcctcttcaagtttctctctcagaacaaatgcagtgttaatcccgaagccgcttgcgggacactggcttcttctcctcagtttcctccctaatatatttgttgaggggtaatacaaaatcactgggaaactgattagagcagatttgaagacaaaattgtggcctggtaacttagcaaaagcataatggtgtcatcttgtatgctgatgataacgttctgggcactttgttactttcgttttcttttttccctctgtgtgtctttgtgtgtgtttgtgtgtgtgctcacacccacacgtgtgactttgcacgcatttgtctttgagagagagataatagtttttgtttttctttcagtagccaaagtttaaaccattgctttttctttgattctatcgcttttaaggtgatctttcttaacacaggataagaaagcagtaatgtcctaaagaatgctgttgaattaattagtatcagcctctcctacagttctggaaggatacgtggttaagtaccactcctggatgaatcagaaaaacagccacttgagcaatttcgtgttctgtggttcagatgagaatcccagttgagaaagtaagaaaatatgtgtttattcttcagctttaaattgttatatcacaaacttccttcctccttggcaagctttcttttttgacgagaagaaaattgtaataaacaacagtatgactaatagatagtcacatggttacttccagtttgcaaaatgctatttatactttgagttactcttcaaaagtggtatacctctagtttggagctgtgctgtaaaaacaagagtaacatttttatattaaagttaaataaagttacaactttgaagagagtttctgcaagacatgacacaaagctgctagcagaaaatcaaaacgctgattaaaagaagcacggtaagaacatttttgtttgtttagaatgaccgttatttattgaaattgtgatgcagaatgttaaagccttcgagaaaagaattaaattttgtggtttcttttgtgaaactagaaaattccttcttataacaagattgagatttgcatatgactgttttgtcctaataaattcagacttactttacattatttgaattacaatggagaaggattaaccatgacttaaaactgctcaagatttagtttcatttttactaagtattttataaaacaaatacttgagaagatgatagatatgatccagatactcatacagttctcagaatgcatacataatatgataaatttagccaatagttctaatatttttaaagattgctttattggatggtgtaaagatactccgggctttaggagtacttaacggaaagaatatatccctttcctactcttactaaggaattgctagtactccgatatccatggagatgtctttaccaaccctaagaaggataaggaaagaaaatgttctaaaaaatacactatgaaacaacctggtaacattggatttattaaatagcaagttcggaatatataagatccaagctacatctttgagatttcaacagggtttatttatgtcaaaatatttgaaagagaaaaggctgaaactaaatgcattcaatacaacgatctatgatttagagatttagggactgtgatgagctttaagcatttcccgtttaactaaatgtcaacctaccagcgtatgctacggtcaaaaaaattattgctgtggtacaatagaatgcacactttatccttcctcccgtattttaaccggttttataattctgcctaaagtt

SEQ ID NO: 5736 - DNA, 6000 bp, Homo sapiens
ttcagcactacagcgagaaatataaatatttcctttttgaaaataagcacatcctttggatccattgatctggtcaagttctttagtactaaatctgaaaattaatttaaaattaattataaattctgtatttgaaacgtgatcactatttagtgccctcagttgctcttacagccaatgtcatgtatctgaatatggagagacttctgcctccacaaagcttcaaaatctgaagctgcctaaagctggcacaaaatctgcccagagctggcacatctgggttctttattttaagttaatcataatcccaggtagaattctttaagagaaatacttaaatcctggactgagaatttgtatttccttcataaatatgtaattccattaatgaaatctaatcagttcagcttatattagaagtacttgaagttctttgggaccttatgaagaaaaacataaaaataaaatcacattctgttgtaaaaagttatcacattttattatgcacaaatataatttttcacatagttatacatatgtggtgggtaaaaagagaacaagacagacgttaaaagaggaaatgattgactatatagatatggttctgacaatagtattcatttcctctgctaagaaattgatgttaatcctgaaataatgtctttagaaaattatacttgtcagatctaaattttctttgtgcccaacattgtttttttctaaatgacctgcattacactgccatattctttgcttgcttcagggctaggcttactaaatcttagccttggcctttactcagtagtcaaggaaatggctatgcaatctggaagctcagtctctctaacctgtgtttgacatgctggcttgtctgacagctgcatgtctcaggggccagggtctgtaggttccaaaccctgctgtgggggccacctcctccacactttgattaagagtgagtagagaggccaagaatgattaaaatccctttgggagaagggacacatcttagattccaacatgaaaactgaatgtgtttacatgatgtcatagtactactcctggaaaccctcagtctagtagcaacacctcagattaatattaatcagttcatacccaatattgctcttgtcacaaaaaagtaactgtcactttttttgtttgtgtattactctgcatgtgctttttgtcattattattagtgtgaaaccaaactaattgacttgatatgattaataatggtgattagagaatgggggattagtgtttgagtagaaatagccatgacaaaacattgggaaatggatgaagataaagtgtatccagggagaaaataatagacctaccattgtttgtgatttaaggaactgctgagtcacagctgaagcatggcatctttgacagaagatgagtgattattattcagtttaagaaaacgttgacaacatgctttaaagagtgaaacaggagggaggggggtggataatgatttgttgggggaggaaggtagataaaaagccattatgaatacaaatattctgttagatagaagaagtaagacctagtgtttcatagattattagggtgaatacaattaacaataatctactgtacatttcacaataatgagaaaataataatttgaatgctcctagcataaagaaaagataaatatttaaagtgatcgatatcccaattccacttatttgatctttacacactatctgaatgtatcaaattatcacatataccccaaaacatatacatctcttatgtatcaataaaaagtttaaaaatccattaagatgccaaagatcttaaattttatctaatagaaaaatactattatatttaaaatattaatacagttgtttcatttaaatgtagttatgatgagaggtgttcctcaaaattttttgttttatagtctgtgaaagaatttagcaaacctaatatccccttacacatttttgttgacgtctattttttcataactttaaatagttaaaaaaattgaaattttccaagtgttatatattctatttgtcctttaaatagtttcatccaaaccctgaagtggaaggtttagttcattttaattcataaaagacacttgccgtatattgtaattggcaagtcctcaacatgacactaattgttgaactaatcagtcaattcagtcttactttttgttagaaaatggttgacagttatttagtataaataaatgtgttgatatgtgttcttatgaccagcagcacccttttggattgtaggtgctggagagtcagaatagctgagtgactgagtgcacaatccctaaagtgcaatttatgagctgagtgacctcaggcaagttacttaatctctctattataatatttctacctataaaatgggaatataactgctttcttcaagggttagtatttataaaatactttgaatgtagtattaggtgtgtgtgtgtgttaaataaacacatttctaccaaaagataaaattcagtgccttgctataaatttgtcacagagatgaaatgaactatacctcctttcaatatttgttactggagctcttttctcagtatgttgtactcctctttttatgtctgtatttataattctcacaatcattattaattttcccaggattccatggaaagcttgtgtttaccctcaatagttagagacgtacaaggatggagagggaacagagccatcttcccagaaccaacttctgccagaggagtcccatgataatcccagccaaaagaacgaaaacatgagtaatggctgtgacataagaaaatcctaagagagaaaacagagaaaaagttttacgtgagcgccacattccagtttgcagagttaagatagatgaggacattcattaaattcatgtattaattctaattcaagatgcactgaatttccatcatgtgaatcagatgttttatttatttctctctcattgtatggataatgtctataactagagaatgagactcaatcctaccttttcttccaaactgtctatcttcactagggtggagttcttgtctatgcagtcctttctactgttagcccaggttttctcctcatttgttgtaaaatagtagcaactattttggtaccattgccacatcttaggacatggattacatctgtggtctgaaaaggaaattatacccaataatataaactgaagactctagagtgactggagaaggctttgaaacaaaatcatgtaattgaacaatagggactgagagcctgcaccctgaaagcatactgctttagaagcctctgaaaaaaaagtgacccctggttatgggttggggcaacagggattctcttttcatggcttagtcttctgacctcagaattaccagctatgcctttaagctttcagagcaacatgatcacctagaaatagttaataaaatgaggggttgaagtatccagattgatatcattccaagatacttcccaaatttgcctgtggtttcaaaaatattaaatgaatttgtatatttccttgctgtgtgtaaatttagtgcaacatcattaaggttcactggatgacataactctctcaatactcttaggtggtacatgtgatcaacttagaccaggataacatatgccatctgactggtcagcaggactaagtctgattacctgaagtatgaatgattagctcttggcacagtttgatggccatttgttcctgcctcttcagtacactggagatctgtgacttgagaaattcctcctccatggacaagttgttggagttgcccagttgctgggataagttatcctgctgctgttggatggttttctgaagttgactcaatttctctgaatctgagttaatgtcattagatatctgcaaaactccaagacatgacaggagacaagttcatatattcttctattcttataactgtagataattctcgtgacagaaacatttcttaattgttcaagatttattagtagctcttagtatttgaggtatcatgaaagaaacaaaccagatgcctttctattccaaattatttatagttctttataattttatttacatttttattattgcactatattaaaataatgatttaataatgatatatttctgacatcacatctaaggaagggccagtcattctgccactcattttcatgaaattgttttatttttgttttattttatttggagatagatgatgtaattgttgttttaatgaaaacagcattctttgggacaatggatatctcaaactctgcagatgacctgagatgcttgtttaccaaaagaaaagaaaaagcagatcttaatggcatatcagaccatttctcgtcatgggtccatgaaatatgcccttttcataagcatttaaggtgcttcatcagcacaacaaatttaagaaccactgcaccaaaagcactaaattttagaaaagaaatgtcacccttctatatcgaaccaatggacgtacgttattgcattttcacttaatttttaaatatacattattgtagaagatcggctgctaatcctcatactgattggctccagaatatctgttactgctgcttgaacatcatattccttttcaaaagagcaaggtacatcattagtctctttttatgttggcaaagatatgtccaaatcctaattaaccattaaatcctaaaaaattatccattaaatcattaaaaagaaatgaatgtagcagaggagatgttagtatcattcagcaaattaactttcttgactgtgagttccctgtaagcgaataccatgccaattcactactctgtataccatatacttaacaaccctataaagtttgtattctcaggatgtttttctcattactcaagaactccctaccatgttcatccccaacttcccgaggatgggtcagaatcaatagaatgttcctttgtggctgtggtgcttgagagtggagcttccattgtcatgtggagatggttcaactctcttacttggtaaggtgtatcaggccactcttcctctttgtttatatgtctttctcattcatagaaatcaggctgctgctgctacttggaagatttctctccactagagaagtttcatgtaagcagactgaacctagtctagtgttaagtctttcaggtaaataaaaatagcaagcacttccttcaatacatatttcttgactttatttctcagcattggaatgataagtgaatgtgtgtctaggcagaaaagaggctctttattctaatgaataactggaaacaaagagtctttgtctaagtccagtttagcttatcaagataaaacaatgaatttagaaccaaatcctgataatgtcttttgccggttttttgggaagatatgacgaataggagagatatgagacagcagaaaagtatcagacgattcaggatgctaggacccatctacaatccaagctgaaagtacatggtttacaatatgttttctagttgcctttgttgggtttgatgctgatatacttacacatcatccccaatgtcaccagcccaatcagcaacatcaggcaaagagttaccagacccagagcagcatgacgccaaatgggagatggagctggatgccctggagaaagccaaaagagcaatcagcacacagaactgctttgtgcttgtttcactttggtttgtttatttctcccacttagggagcttcccgatactaacgtttctttcttgcttctttaatgccctcatttagaaaatacctaatatgaagtgcaatgagggtgccatccttgtttcccctccatttctccaccgctctccttcactttaagaggaagcttcgttgggggaggggggaggcatacctttaggagatatacctaatgctaaatgacgagttaatgggtgcagcacaccagcatggcacatgtatacatatgtaactaacctgcacattgtgcacatgtaccctaaaact

SEQ ID NO: 5737 - DNA, 6000 bp, Homo sapiens
ctgataggttttcctttataggtgacctgatgctttttgtctgactgctcttagatttcttttctacatgttgactttagatggcctgacgactatgccttcgtggtgatctttttgcaatgagtttctcaggagttctttgagcttcccagatttgggtatctaaatctccagcaaggccagggaagttttcctcaattattccttcaaataagttttccaaactttttgttttctcttcttccctcaggaacaccaattattcttaggtttggctgttttacatactatcatatttcttggagacttcatttacttgattcttttttcttcatttttgtctgattggcttaatttgaaagcctcgtctttgaattctgaaattctttcttctacttgttctagtctatcgttaatactttccactgcattttgtaattccctaaatgtgcctttcatttccagacgttccttttttatgatatttagctctctagaaaatttttcatttataatctgaattttttaaaaaaattctttatgttggttttcacctttctctggtatctccttgagtagctcttatacaacattctgaatttttcatttggtatttctaagattttatcttagtttggcttcattgcttgagagctaatgtgatcttttgggaggtgttatagaaccccattttatcatattaacagaattacttttccggttcttcctcatctgggtagactatttcttctaattattcttaaatttatttttgatttgactgtgtgattttatttcttattttccttcttaagaatttgactttaatgtttatagtttgttatagcctaatttggttcttggtgcttttaggggtgaaaattctgtatgatttccttggttatagagaaactttgtatgatggctttctcagatgctagacatagtagtaatgtgctgaatgtgtgagcaaacttactgtctctggaagcttatctcattccaatgtggtatgcacttttaaatttatttactttgctccagtattttattcactgggttgatggttcaggcttcaggccagtagtggaggtgttcctaggtaggaaccagttgtggctaaagaaggtgggtaaatgcaatacccaatggtgggcagaggtctcagccttgacaaaaggggctgggggagctgtcagggagacacactgaagtcttatcaggggaagggtggtagccaccttagctcccctgtcaggtcagctgggaagctatccatctcccagactcacatctgtcccaatattctggctattcagatcagacaggcctctcttttcatctgctggaatgttagtgctccaagtagagaactgtgactctgcctcttatgtaagcctgaaactggagggttgcttcccctgtggggttgcggtcaccctgaagtgttctacaaagtctgtctatgggtgcacccatgctgagctcttgtgggagaagacccagctgtgtctgcagtggtggacgaggttggtaagaagtccccttctccaagatccttgataagcaccagggctgtctgactgttgggacagctgtagacattccctgctgagcccagcacttcaattctgcctctattgaaagaaacttcccaccagtggaacaatctaatccttaagacctgccatctggattctttattcacacagggtgttcccttgatgtggcacactctccctttccttaggagtagaagttcctgagagacagactactatgagtgctgctgctcctcagggtctagccactcagtggctccagactagtgctgggggatgtctgctaaggatccagtgatatgacctgtcctccagttttccagcagctgttatcagcaccaggtctgatgggggtgccagaggcgtgacatagacctgtgagattccttgattatagataactttagtgtgttgtctttcttgaatgctagttcaggtagtaataaactggtcatgtggatagactcaggacctcctggttagacagggtagtgcaggaagtggtaatagctgaggtcacacagtagttttgtccttcttgagtgcagtgttattccacctacagatgctgcaatggactgtgttggtaggcttccagctactgggtggcatttgcaaaagagtatcaggtgtggtagtagcagtgggatttgtgcttgccttatgttgcccagggtaggtagtctggcttctcaggtgatggatggggctataaatctccccagggtttctgtcctttgtattaagctaccacggtgggtggaggggcaaagccagatgagggctgtgttaggtgggtctgcactctgagtcaccatgtgcatggcaagcagcggccccttttggagatgtggttgcacagggagtggggagtagtaggcagcagtaagcctaacccagatgtcacacagttggcaaggcagatctggctcctgcagtactctgctagcagcagtgagctaagttccaggcagtctgcactcagagctcacaactgcctgaggccataaacttttcccgtggtgatagcaactgctggcgttcaggccatgcccctctctgtccacccacacagctggcacccagatcctgcactcacggctgcaacacatttcccactcacctttctggttctggccaagggagttcatttcacttgaggttatattgtgaatttcagttgggagtttttacaatgtgcaacccctggctgagctagttggctgagttccgtgaggttgtctgtgaggcataaggaatagtttcccttggctcatgctggagactgggaatgcacacaagcctcttcctgctgctgctcttacttttatattcatcactgctcttttaattggttccagtgctgggacgggttaaggccttcccccatggcatggactttcaggttcccctgtgggggtatgtatcctggagccagtctcttcacctcacacaccctgggagcttacagtttttcacctagctcatggtgtaggtataacctgctgcttctttcaaagagtctgtggattctttcagttttcctgttcagttcctgtgttgcttcttgggaaaagagttcacagtgagaaggtttttttttttttttttttttttcagatggagtctcgctctgttgcccaggctggagtgcagtggtgtgatcttggctcactgcaacctccgcctcccggattcaagtgattctcctacctcagcctccccagtagctggtattataggcacccgccaccacgcccggctaattttcatattttcagtagaaacggggttttgccatgttggtcaggctggtctcgaactcctgacctcaggtgatccacccacctcagcctcccaaagtgctgggattaaaggcgtgaccaccatggctggcccacagtgagaattttttactcactattttgtccttccaagtggtagagtcatgctaacactgcctccaatctgccatctaaaaaaaaaaaaattccaatttttaaaaaatttagaataatttgatgaacaacaaacagcttgaaacacatgtgaatccacaatgtgcacttcctcatagatcttttatatggtctggctaccccaactggagcattctgacactcctttatatttagcatgcttgattttgcccacctatcacctaacatctggaaaagttttggtagagtaatataagtctattgtacagattcaggaagaacttttagacattatctaaaacaatcttcttgtctttcagtttaggaaatgtagatgcaaattgttaattgtcctcccaaaggcacaaggttgttactgatacctgtcttgttatggtttgaatgtgtttcctgcagaattcaggtgttgccagtgtggtagtattgagagaggtggggcctttaagagatgattagtccttgaagtcttctctcttgaggatggtattaaggcctttataaaagacgctacatgtagcatttggctggcttgaccttctgctttctgccacgtgagaatacccttcctcctctacagagagtgcagctctcacctgacatccaaacctgccagtgccttgatcttagatttcccaccttctggaatgctgagaaatacatttctattgcttataatttatctggtctcaggtatcctgttgtaggtcagcacaaacagactaagatgggaatataattctaatgtactgattcaggaagaattttttcacattacctaaaacattttcttctcagtttaggagatttaggcacaaatgaactggcttccccaaaccacatggtggttagtaatagttttaaaagtttttacttccagtaaattgtataattcctcgtgatcataatgtaccaaatgtgctataaaatgttgaatcaagttcagatactataagaaagaccactactctgttcttggagaaaggaaggggctaggtcctataatctcttctcttttcacaaagacacagagaggttaaactaagtgactccctaaaggatgggtaagaaacagggatgtgtgtccttccaagttattattattctgcagactctgaaggaaccacagtgctacaccgtgctattgtaagttcttgccttctttacagtgaagttacatgagaaatgcaaacaggtaaacaaaaaagacctgagaaaggccaactttttgacaactgtttagactgagacggcctaaacagaaaacacatgctatttcccctcagcctgactgatttggcattcagagtacaagctcacaggagaggggctgggcctgtccagtcaggaattgcagtcagagactttccctgcccctcgctgggaaagaacattaggaatgccttttagtgccttgcttcctgaactagctcacagtagcccggcggcccagggcaatccgaccacatttcactctcaccgctgtaggaatccagatgcaggccaagtacagcagcacgagggacatgctggatgatgatggggacaccaccatgagcctgcattctcaaggctctgccacaactcggcatccagagccccggcgcacaggtaccctgtctcctggagtccaaatagaccacagtccttgtgaaatgtgtgagatgatctatccctcctagaaatggagatatttagcttgcatcttataattttatttccaattactcgccctgtgacatagtagtgatttttttttttcagttatattcagttccataattcccacacttagagaaggattttatttcctgggccactcagccaatctaaagctaaaatatgacttcagttctagtgaaaaggactcacatggtaatatacacaggactaggttctaggtcctaaaccaggtatgccactttccttctgtgtaactttggatgagttgtttaagtatcctggtagcatcatattctttatttataaaatattaacggccacaaacatgtataaagggctcattatgtgctggcagtgttttaaatactttaagtatattaattcatattaacttgacttaatattaaatagaagtaataaaacttcctttacaaggtggttgtgagtactgagaatgataaattatgtaaaatatttgaatgtctgtctgatctgatatagactgacacaaaattgctgaaaggaacactttaggttcttaagaaatggaatgttgaaaggaatcccacattttaacattcattcagtgcctgtgttttaatatgccctttcccttctgattatatcattgttttcttcacctttgtaaatctggatatacctttaaaaaaaaaaaactatcctgttccttatttctttatcaaataacttttagttttccttcctttctcctactaaaccctccattcactttctatttatttctatttattaaatgaccctccacctgaaaccta

SEQ ID NO: 5738 - DNA, 6000 bp, Homo sapiens
tgtaattcctccagtccttaacgttcccattcatacaacaggagcagaatacccacttgacctgctttagatgttatttcctagagaaaataaaataagagacaggaaagcattttgaataggatatttctatcatgagtgccctgtacgtagggaacccatcatgaaactttcccttctctttttcttgacagaaagacagtagagcaccaagacctaaagcctagccaggatacctgggtttaaatacttggttttgtcacttatgagctgtgtgatcttggagcaggttattagacctctattggctcattttcattttatataaaatgggggtaatagtagtaatatttacttgatagccttatacagattaaataagttaatgtgtgtaaaatgaatataacagtcctgatattttttgtgtttgctaagattattttgattttcactaaagtttaccagtgacctttactttcaagattctggataattactgtcctttatgcttctcttgtatatttttataccattccctctccagaccacattttagtctcctgatattctaattcttgaatatttttccttgctagcctggccaccttttctcccaaccacgccagccttcacctgcctaaacaggtttgctggttaacatgactccccgctcgcattgcacttttctaacacgtaattgccatcatctttttgccctccagcttccaaacaggtttgaacaaaataggttctgttaatgacctccttgtgactttcctttcttagaattattactaccctttttttttttctcaccagattagtccctggaaagataaaagtttgtttttatcctaatgaatgagattatgccttggggcagctttaactctgaatcctgtccctaaccaagcctccatatagggaatgatgaaagaagaaagataattcagacaagaagactgaacgaagtacactttggacaggtacagaagggcaggtagctgggatagagggaaatggtctcattacaatcctatacaatcttgtgcagttccattaagcttgtgaatcattagcttatgtccaggtagttaaggacttggagtggaaccagtagagggtgcatgtacatagagttttacacctatgcttcagggaattgttatacaactggtgtaacaagtgtagccaaacaaattgcttacttctggttccactgatcattctccttttgaccttgcctaagtcaggtggccaactatggatttctttcctctctgtgcctcaataaaatagaggccaggactctgaggcatcaacctcaaactataagtcagtgggtagggccacagccctgatttcaaaaataaataatatagcagaagaagtttcatctttgcaacccttgggagatcccttgggaagtgtttctgtctgataagccaagatcacagcatagggattgagtgacagcttcaaaggcactgaaatcagtaaaaagattagagttaaaaaagttaaacaagacagaaggattcagtttatcatagaatgttttaggttgatatgctgtgtaacacatcaccacaaattatgtgagcagcaaggtaaaacaatgtacttttattatttcaaagtatctgtgagtcagaagtgtgggcacaacttagttgggtcctctgcttgatgtctcacaaggctgcagtcaaggtggctgctgggttgcactctcatcatgcattctcaggtgagcctgggaagattcacttgcaagctccctcaggcagaatttatttctctatggctgcaggatccatttaagcttgcttttaaaaatctagacagggagataaagatggaaataggagagggagagtgactttagcataatagtcactataccttacataagcacacgtagatgatcacatacattccagcacctctgctacactccaagtcataggtctcactcacactcaaggggaaggattacacaagatcatgaacaccaggaggcaggaataatgagagccctctaaaatttttcaaatctgtccagttatctgccacacaaggactgtagaaactatcccactgatctttaaaaacaggataaacccaaacgtccatcaatggataaataaaatgtagaatgtggtttatacatacaatggaatattatacagactttaaaaggaacaaaattctgacacatgctaccacattgataattgttgaagacataatgctaaataaaataatttagatacaaaaggacaaatattatatgattccaccagtatgaggtgcctaaaataaaccaatttatagaaacaaaaaaatggaacggtggtttccaagaaaggagaaaggaattgggatttgtattaggtctgtgcagagaaagaggatcaatacgctgtgtacatacatagaaataggtttattataaggaattggcttgtatgattatagagcctggtaatttaaaatctggagtgtgggctgccagactcggccagcgagtggagaactgggagagttgatggctgagttccagtccatagacagctgggggattctttcttatttgggggaaggttagaagctttttgttctttaggccttcaacttttggatgaggcccacctacattatgcagcgaaatctactttcctcttctgattaatatgttaatctcatttaaaagcatcctgtctgggaaccccatgacccagtcaagaagacacagaaggccagcacggtggctcacgcttgtaatcccagcactgtgggaggctgaggcaggcggatcacttgaggacaggagttcaagaccagcctggccaacatggtgaaaccctgtctctactgaaaatacaaaacaattagccgggaggggtggcgggcacctgtaatcccagctactcaggaggctgaggcaggagaattgcttgaacccaggaggcggaggttgcagtgagccgagatcatgccattgcaatccaccctgggtaacaagggtgaaactccatctcaaaaacaaacaaacaaacaaacaaacaaaacacatgaaattcaccatcacaggagttattgcttggtgggtatagagtttcagttggggaagatgaaaagttctggagatggatggtggtgatggctgcacaacaatgtaaatgtacttaatgccactgaacagtacacctaaaaatggttgaaatggtaaacactttatgttctataatattcatggcatccaaaataactgagtcactgtagaaatgataatgtgcccttttcagtgtgatatcgtttcagtattttttaattcttttttttttttttttttaaagggagtctcgctctgttgcccaggctggagtacagtggcacaatctcagctcactgaaaatgaaaagcattttcattttccacctcccaaatagctgggattataggcttgcaaccaggcccagctaacttttgtatttttagtggtgacagggtttcaacaggttggccaggctggtctcgaactcctgacctcagtgatccaccccccccctcagcttcccaaagtgctgagattacaggcatgagccactgcacctggccaactttttcaatttgttctcaaatactctgcacataataaaaggaatataggaaacagggaggaggagggaaatggaatcctaattaggctgtcaatattggtaatttttcctaatagtttcctatatgttttatttatgtatttatttttccattcttcctttgtgtattcttttctttgcacttttttttcctggagtaatttaaagtaaatgccagatatcatatcattttgcttataaatacttccttcagaagacatctctaatagatatatatctggttaggaggttgtcaagggaaaatagaaaagtattctatcagtaaatacatatagacatacttatgggtctctcatgtaagcgtctttgtgacatgagtcaatcatggattttactgaaatacattatttgatgggtaattcaactgtgctgaatattagtactatactaataattattatttattggcttcttattatgctccaagtacaaagcttgtcatttttaaccagcgtgtcatttgaattcctatagcaacgtgacatttttcacaaacctagtgtaaaaaagcttattatttttacccagcatgtcatttgaattcctataacaatgttatcaggtagacattatccctaatttccagacatgtcatttgaattcctataacaatgttatcaggtagacattatccctaatttccagacaaagacatagattcaaagtattaagatttcccaagattgtagactaaaggaaagtactgaaactagctctttctgcattcaaagtgctctctgctgctacgttacactggcactgcatgaactagtagccccagataaattctaaaatcacccaggacacaccatcgctggaaatgggagccatatgtgattcaccccaaaattcttagatccattgccagataaaacagtgaaaatcaaaagagaatatatctgattcgtaaaagacaccatatagaaacagtctgctaatgaaattagcaaacaaacattggaatcaaatattttggcccataattctggcacattttttacaaatgtagtgtgacttactctctttgaatttcagtttctgtctctgaagagtgggtacaatatctctcctctgatgctcatgaaaaatagttttccctttcataaattacttagcgaaatatcctgaaacaccttcagaatcaccactttctccacctgcaatacacataactcaagaatttgcgtcagcgaacttcccaatatgaagcaaagcctctccttcctcctaccaatgattgagtcattcttctattagataacagtagctatttaaatacttctgcagaagctcacatatttttagtttgttgaagttcgtgactgcttcactctctcattcttagcttgaatttggaaatgacttttgatgacctaaagatccagactgtgaaggaccagcctgatgagaagtcaaatggaaaaaaagctaaaggtactagggatgggaaaatgtgtacagggaaagaatcccagtgttagccccaaaatgtaaattcaccgaagaatgggattagaaagctaaacacccaagtatgggaaaatagaattaataccatttacttaaaagaaaaacaagaaggctataatgatgatgatgatgacaacttatttataacaatttatactgagtatttactacaggttattctatatgttattcactttcagagtattatttctcagaatcttcgcaataacattttgagattggtactattactatctcccttttacagagagctaactgggcatcaggaggactaacaacatcatccagtttcacggagctaataagtggtagagctaggactgtaccacaaactcccatttatccagaattctatacatcggagggctcgggaaccaaatttatctggtgtatataacgataatttctgtaagagtccttcaggcactacaaaaacctgaagtacctcatgaattatgcaggcaaagtaaatgatattcagtatagtttagcataagttacattttgttgtgtactactgctttgaaaaattgtaagttctgtttgacccatacagtaattaaattgcatagctataaattaattcataatcccaattccacagacaatctgggtaaattgccttttattctatatctgttctgaggaaaatgaacagaatataaggagagaaagagagacaagtattgtcagaaatttggataaagaaattccaaattacatttccaaaaacaaaacagaaatttctctcaatagagaacataagtgtgagcatggagtgatttaacatttgagccaatgaactaaattgctataaaaactg

SEQ ID NO: 5739 - DNA, 6000 bp, Homo sapiens
tttctatccatgtgccacaacttattttttcttcatttattttctctggctagtactttatatccagagttgaatagaaggtacaatcaaattttacatgtatcatatgtatcattttctggttttggcaaaaaataattcaacatattattcatatttacaaagtttggtgtttttttcatcatatctttcttatattgaagtggttttataatattccttttttcaatagatgttatcaattgtaacatttttattttttattacttagaatgatatatgttttctttatacaacattttataaaataattttatttttgtcaaatgttaaactaggctttgtttccgaaacaaatccatgctgatcattgtatattgccccttataaaatatcagtgcacatactactatatctagggtaagatatgtttcttcatctatgttcacaaggatatttgaccacgtttttatttgtagctatgtacttgaaaaagttttggtctcaaggctatcttgggaagattttctgtttctctataacctggaagcatttgttaagagtactgctttagccataaaaaaggatgagttcatgtcctctgcagggacatggatgaagctggaaaccatcattctcagcaaactatcacaaggacagaaaaccaaacaccgcatgttctcactcataggtgggaattgaacaatgagaacacatggacacagggaggagaacatcacacaccggggcctgtcggggggtggggggttgggggagggatagcattaggagaaatacctaatgtaaatgatgagttgatgggtgcagcacaccaacatggcacatctatgcctatgtaacaaacctgcacgttgtgcacatataccctagaacttaaaatataataataataataaagagtaccgctttatttttaaatgttatcattcactagttatgccatctgagtttgcaggctatttttgtagaaaagtttatggctaaactgaatttcttcaatacatgtagggtttactcagatttctatttgaggtactatattttggtaatgagcatttcccaggaattttctatttcatatggacattaaaatgcattgataatatagttttattgcctgtttaataactgtaaagaccataatggtattgccatgtttaaactgggaataaaatatctgtgccttttcaaaatcttcccttagtagtcctttgtgaccattcatcttgataatttctttggcccatatgttattttgacatatattactgaattaaaaaccatataaggttctcagatttttgtttattgacttctgttgtaggtaaaatatagttagaacattttctattaaactggaaatgttcttcatccctttataaatgtggctcatgtggtgaggtactggttttaaatgttatttatttttattaattaatgttaaatttgaatagctacatttcaactgtctcctagccaagcttggctagcggtactacattgaaattgagtatccgtgtgagtatatgtgtgtgaatgcattcatatgagtgatggttacttgtctagtttaaatctttctataggctcactggcctgtcttgtattaagcatcaagagaagagtctttaaaaatcccatttatgattgtttacttgttcactttattcaactatatgttgaacttgtatcattaggtatatgcaatgataaaaaatatattactaatggtttggaaaattaatttatcattatgaagtatatttccccaatttcagtaaatttcatctcggctcactgcagcctcgacctcacctccaaggctcaagcgatcctcccacctcagcaaccagagtagctggctacaggccaataccatcatgctggctaattttcgtatttttttgtagagacggggtttcatcatgttgaccaggctggtcttgaactcctgagctcaagaaatcaacacatcttggcctcccaagttgctgggattactgacacaagccaccgcccctgagtgctcatgtaccatttagcttgtgttttaaaaatctactttttctgccctccctatttttaactagatgatgttttaaaaattacttttccctctctatatagtttgatttaagcattagtcatttacaacaaatattaatattaaaatgcagaccgttatgattggaaaataaatcaatgaacaatataatgagtggtttttatatatttcaatctctggcgtggtgatatagtacaatattttttaattatttattcttcccagagacatatatttcaatgagagttatctgattaatttatttttaaaaaactgaatgagagaattttaagaactatcaagaaagtaagttgggaatttaactttgagaattgatgtcaattacaatgaagtggaaatgtattttctcagaataattagtgacaaatacattaaattcctattggtaagattattattttaaaaatttatcgtcatattagcagtgatattataggggtatatgataaagaagtacgtaatcccaagttttagccaccctgtgtaaatgtagaagttaaacatgtaagagactctgaaaaaggtataagattttagtgtttgtgattgagatggaaacaactgcatgggtagtagtctttgttctccccaaatcttgtttactataaaaataatttctaaaagtcacttgaaaatggacaaactaaatgacaccctagcagctcagtctcttatattctgaggtgtatgatgagataaactgattcaaaatggccctagtgtgaaaacttcctgttcaaatccgaagtgatacattgatgaggaatctgctttttgcactcttgcctcactctgagctttcacagggcagtctgtgaagatcagagatatctgttttttgttttttgtttttttctgagacagagtctcgctctgtcgcccaggctggagtgcagtggctcccgatctcagctcactgcaagctacgcctcccgggttcaaccgttctcctgcctcagcctcccaagcagctacaggcgcccgccaccacacccggctaagtttttgtatttttagtagagacggggtttcaccggatcacagatgtcttttgtgtcgttaagaggtaacctgacctctccactaaggggcgtgtgactttctgatgacagaaggtatgtgttgctagtctcctgtttctctactagctcatctcctttagtagaaaattgtaaatattaaatgtgatgcaacaaggtaaagttaatacagaataaaatcaaagtagaactgtctgtacatgaataattcagggtgaaaagcaacccaaaatataatatatgtttgaggatttcttaaagtatttacattattgcctgtggagaattagtcaagcacatgcatacatcataataggtttgttaatcaatataatttagagtgaaaccgataaatatcacgacaatgaagaattaatttgaaattttataatcattatagatgtaataatactttatatttagcccagactttaaaaatgcatttttaatggatacatcaaattgtgaatgtcaaacataatttctcatacacatacttatatttaattgaagcagattttatttttttaagaatgtaataatgaagtagtttccataaaatgcaaatctaaacttaattataaataataggacgacctaaaaaaaattgagccaaacaaacattgcaaaaaagatgtactacactgacatgagactcctacctcattagttattttacacactcagtatgaattagaaataataaaatggcaattgtgttaaaaataattaaaatatctaatatgtattgaggactaatgtgtgccaggttgtatgttaagggttttatatacattatacttcataaattattttccccaatctagattagtaaactggtgttgtagacaccaagtaactttgtaaaggtcatgcattatgagtttcaaagctgtaattaattttaggtctcactggctacagagctcattgactagattattaaattatattttctgatttattacaattacttacacaaccaaagtgaccctcgctgccttttaaaacaaccacagggtctttctgaaagtttgaacttaaagtgttctttcatagatggtccaaacttatatttatcattttcagttttcctattttagtcattaaatcaattaccaatcaattctgtaaaataaagagttaaatctttttcagtagtatttagtttatgcataagttaatgtaatgttttacaaggtataaaatatttctttaaaattttaacaatttttctgttttcctcaatcattcagaataaaaaacatttgccaagacctcatgcccttttagtaaacgaatgtaagtcactaacttaatgtattttagtattaaaagttgttctatatgccaacaaattattcctccatctttagcgctcaatccttacattaatgaattttaaaattgtcatacaattagtgcattttattttcaaatttcaattttagttttttacacaggtattctattggtgataaaatatttctgtagaatctgattttaaattaataaagatatttatattcagttacttcttagttttcacaaatgtattgttttttattgttcccattaataatattatgtcaaatatagaaggccttttaaaaagtgacctattgtttaaagagatttcagtttaaaactttaggaaattagtaccagacttttatattggtcaacagcaaaatgaacattactactcagcctccaacacatgcagtttgcctataccagggatcctgtcaaaatatacaccacttatagcttcttaagtgcagttatcatagagcacagtccctgacatcacacagctgcagagatgaataaacaaagaggaacctactcagaagtgagtctggcccaggacccaaagaggcagcaaaggaaacttaagggcaataaaatctccatttcaggaaccaaacaggaaatattccaagtagaattaaaccttcaaaatgcttcttcggatcatcaagggaatgacaagacatatcactgcaaaggtaaaacattaaatagatcttcaatattattgttctaggatgtgcagttgaatgcagaaaggtggggaaagattagggaatattttgcacttgtgagaatcagaggtcaaagtcaggatctaatattctaatatgaaatctgaagcctgattttattcaggcattgttcaattgtaatttgtgattaacaactcatggagcattatatttactgataatgaaatggtatattctgagagaaagattactagagtagatgtagatttagaggacagagtttatcattatgttttcctgtgcacgtgagttctcttgtacgtaaaccttctcatcaactctctatctcccctctctcagtgcctctttctctccctgcaggtttactgccacctccagagaagctcactgctgaggtcctaggaatcatttgcattgtcctgatggccactgtgttaaaaacaatagttcttattccttgtaagcatattcttgaaagattataagggaacttttcactataatgattggaagcgccttgaaacatttcataataatgaggattagaattctctgtttaatgtatatctctgaaccccaagataatatgctgcttctgaacttttcaaatttataaataacagaataattgtagaaaacatttatttttttgtgtgtactaaatatatatgtatatatgatacacacacagagagatgtattctgatttcatgactcaaagacatgttttaagagaaaaaatatttagaaaaacaaattaatttttgaaagtggttagatcaaatactataagagatggtgaagttttatgctaatggcttta

SEQ ID NO: 5740 - DNA, 6000 bp, Homo sapiens
tatgacttagtgacgtcatagcaatagtttcagtacagtgtattattcacatgtctgtggtgatgctggtgtaaattaccttgctgccagtggaataaaagtatagcacaaacaattacatacactacataatatttgataatgataataaatgacaatgttattggtttatgtatttactgtagtatacttttaattattattttagagtgtactccttctacttctataaaaacagttacctgaaaaacaaccttgggcaggtccctcaggaggaattccagaagaaggcactgttaccataggagaggacagctgcacgtgtgttattgcctgaaccttccagtgggacaagatgtggaggggatgacagtgagattgatcttgctgacactgcgtaggcttaggctaatgtatgttttcgtgtcttcgtttttaaaaaaagtttaaaaagaaaaaaattaaaatgaaatatagaaaaaagctcataaaaagaatatagttgttaagactgtgcaatttgtgtttttaaataaagtgtatttaaaaagaggcagaagatttttaaaatatgaaaaatttagaaaccaacaaaggtgcagtaaagttaatttattattagctcaagaaaaaaagtgctgcataaatatagtgtaccctagtgtacagtgtataaatcctacagtagtgtgctgtaatatcctaggccttgactttcacttgctacttactcactgactcacccagggaaaattccatttctgcagtcttcattcgtagtaagtgccctataaaaggatgccattttaacctttttttaaaccatattttactgtttttttggtttatatataattagataaacaaaaattaccattctggtcactgcttgcattattcacaacagtaacatattgtacaggtttgtatccttggagcaatagcctatcccatataacacaggagtgtagtagctgtaccatctaggtttgtgtaaataaactctttgatgttgacacagggatgaaattgcctaaagacatattcctcagaggtatccctgtcattatgcaaacaataatggtataacactaatggaaaacaccaagtggatgtttgtagcaatagtagacatcagcacttcagacttaaatagaaaacatcagtgaatgatacattatgtggcatctttagtgaatgattttattgttttagttccataacgtgactaatagaaaaagtaacctagtttatgaaaatgtaataaaatgtaaatataaatatacttgtaatagaaaaagatacaatatgaacacaagcatatatgcatatgacattattaattaattttgtgaaaatatattacaatatattttacagaaaaacatatatacctagccaccattagccattctgatggaagggcaaataataattctcattgcaaagaaataaatatgggtttaaattccaactttttagattttagagaatagccgggcacagtggctcacgcctgtaatcccagcacattggaaggccgaggcagacggataacgaggtcaggagatcaagaccatcctggctaacacggtgaaacctcgtctctactaaaaatacaaaaaaaattagctgggcctggtggcacacgcctgtaatcccagctactcaggaggctgaggcaggagaatcgcttgagcccaggaggcagaggttgcagtgagccgagatggcaccactgcactccagcctgggcaatagaattatgcataaacattcccccttttcttgatagaaaataaatgatgaaaagatttttatttaatacaactagataatttatagttttttccctgatgttcgtataccatttattttttaaaagtttttgtttatttgtttttgagacaaggtctggctctgttgcccaggctacagtgcagtgacactaacagttcactgcagccttgacccccagggctcaagcgatcctctcacctcagcctccagagcagatgggactacaagcaaacaccagcatcctcggctaattcatatatatatatatatatatatatattttttttttttttttttttttttttaagagatggggtttcatcctgtgtatcatgctaacctcaaactcctgagctcaagtgatcctggagtgctgggattactgacatgagctaccatgcccggacattcatgtatcattttacttgtgttttaaaaaatctccattttctggcctccccatttttaagtaggtgatgttttaaaaattgctttaacctcccttcatagtttaacttaggctttagtcatttacaacaaatatttctattaaaatgcagacagtaagtcatgattagagaaggaaccggtgaacaatatagtaggtagtttttttattatttcagtctctggcatagagatatagctcagtattgtttaatattttattctttcaagagacatttattttaatcaggaatctggttaacttatataaagaagaaaaattgaatgagggaattttaagaactaaggcaaagaaagcaagaagataagtttgagaatgcatgtcagttacaattaagttgaaaatgcagcattttctcaaaatagtgacaagtacattaaattcctattgataaaatcattatttaaattttgttattatgatagcagtgatattataggggtatatgataaaaaagtatataatgtcaagtttcagccaccttgtctaaatgtagaaagcaaccacctaagatccttttgaaaagttacaaaactttggtgtttgtgactgagatggaaacaatcaccagcatggatcaaatctctgctctcccctcatcttgttgaccataaaaataatttctaagaggcactttaaaatggacaaactaaatgacacactagccacccaaagtctcctatattctaaagtgtgtgatgagacaaactgattcaaaatagccctagggtgagaatttcctgttcaaatctgcagtgacacattggtgaggaatctactttttccactcttgcctcactctgacccttcaaagggcagtctgtgaagatcacagataacgtttgtgtctttcagaggtaacctgacctctccactgaagggcgtgtggctttctgatgacagtaggtaagtgttgctcctctccctgtttctctactagctcatctcatttagtagaagattgtaagtactggctgtgatgcacctgaggtaaagttgatatagacgaaaatcaaggtagaactttattcacgtgaataattcaaggtgaaaaacgagccaaaatataaactatgtttaaggatttcttagagtattcacatcattgccgctggagaatcactcaagtagatgcatacataataataggtttgccaatccatgtaatttagagtgaaacccataaccatcatgacaatgaacaattaattttggattttgtaatcattactggtttaattgtatattatatttagaccaaactttaaaaataaatttttaatatggatacatcaaattgtgaatgtcaaacattaattctcaatcacacacctagatttcatgaaagcagttttaatttttaataaaagtaaggatgaaatcatttccataaaatgcaaatctgaccttaattataaacaattggaagacttaaaacaattgaaccaaacattgcaaaaaagatgtaccacactgacatgagacgcctaattaatgagttattttaacacactctaatgcaaatcagaaataataaaatggcaattgtgttaaaaatagttgaaatatctattatgtattcagtgctaatatgtgccaggttgtgtgtttagttttctacatacattatactttataaattatttttcccaatgtagattagtaaactaggttagtagacactaagtaatttagtacaggtcacatattacaacttgcaaagctagaattaattgtagtctcactgactacagagctcattgactagattattaaattacattatctgaactattacaattacttatacaaccaaagcgaccctcactgacttatacaatcataggagctttctgaaagtttgattggacactattcttccatagacggcccacacgtttatttatcattttaagttttcctattttagtcattaaatcaattaccaatttcttgtgtaaaagcagcaatttaaaaatatattatgttttcaatagtatttatgcatacagtaatgtaatgttttacaagatatatttttaaaattttaatgatttttctgatttcctaatttagaaaaataatcagttgacaatacctcaggtccttttaataaatgaatgtaactcactaacaatgtatgttagtataagaagttactctgtatgctgacagaactattttatcttatggcacacaatcattaaccatcaatgactcttaaaactatggtaaaattagtgtatttctaaatacagtattttaattgttaaagtatgcagtctattggtgttaaacatttttgaagaatctaaccttaatttaataccaatttttttcatgaacttcctagttctcacaagtttaatgtttttattgttcccactagtaatattatgtcaaatacagaatacatctaaaaaatggccaattatatcgtgtgatttttgtttaaagctttaggaaattagtagcagaattttacctaggttaacagcaaagtaaacattattactcagccccaacacatgcacattgcctataccagggatcctgtcaaaatatacaccatttatagcttcttaagtgcagttatcatagagcacagtccctcacatcacacagctgcagagatgagtaaacaaagaggaaccttctcagaagtgagtctggcccaggacccaaagtggcagcaaaggaaacctaaaggcaataaaagctccatttcaggaaccgaacaggaaatattccaagtagaattaaaccttcaaaatgcttctctgaatcatcaagggattgataaaatatatgactgccaaggtaaaacattaaatatatcttcaatgttattgttctgggatgtgcagttgaatgcagaagggtgaggaaagattagggaatattttacacttgtgagaatcagagttcataaatgggatctaatattctaatatgaaatcagaagactaattttattcaggcattgttcaactgtaatcaactgtaatctgcaatccactcatggaacattacatttactgaaaatgaaatggtatattctgagagaaagattactagagtagatgtagatttagcggccagagtttatcattatgtttccctgtgcatgtgggttctctagtatgtaattctctagtatgtaatcctaatcaactctctatctcccctctctcagtgcctctatttctctccctgcaggtttactgccacctccagaaaagctcactgccgaggtcctaggaatcatttgcattgtcctgatggccactgtgttaaaaacaatagttcttattccttgtaagcatattcttgaaagattagaagggaacgttttactttaatgcttggaagtgcctcaaaatatttcatactgttgaagaatagaactcttattttactgtttctttcaaagatctattacttcatttatttttatagaaaaagttaattttattaaagattgtccccattttaaataacacacaaagtttcaaagtaagaaactaaactcattatggtttatctaaatattactttttataaaaatcattttaatttttctattacagtcctggagcagaacaattcttccccaaatacaagaacccagaaaagtacatttttattttcaaagttctgatattagtacaatttggaaccaaaataatatggttattctgaatttttcacaacataaataacaaaatcat

SEQ ID NO: 5741 - DNA, 6000 bp, Homo sapiens
gtcccactagattataacggagctggaaatttcctatgacttagtgacgtcatagcaatagtttcagtacagtgtattattcacatgtctgtggtgatgctggtgtaaattaccttgctgccagtggaataaaagtatagcacaaacaattacatacactacataatatttgataatgataataaatgacaatgttattggtttatgtatttactgtagtatacttttaattattattttagagtgtactccttctacttctataaaaacagttacctgaaaaacaaccttgggcaggtccctcaggaggaattccagaagaaggcactgttaccataggagaggacagctgcacgtgtgttattgcctgaaccttccagtgggacaagatgtggaggggatgacagtgagattgatcttgctgacactgcgtaggcttaggctaatgtatgttttcgtgtcttcgtttttaaaaaaagtttaaaaagaaaaaaattaaaatgaaatatagaaaaaagctcataaaaaagaatatagttgttaagactgtgcaatttgtgtttttaaataaagtgtatttaaaaagaggcagaagatttttaaaatatgaaaaatttagaaaccaacaaaggtgcagtaaagttaatttattattagctcaagaaaaaaagtgctgcataaatatagtgtaccctagtgtacagtgtataaatcctacagtagtgtgctgtaatatcctaggccttgactttcacttgctacttactcactgactcacccagggaaaattccatttctgcagtcttcattcatagtaagtgccctataaaaggatgccatttttaacctttttttaaaccatattttactgttttttggtttatatataattagataaacaaaaattaccattctggtcactgcttgcattattcacaacagtaacatattgtacaggtttgtatccttggagcaatagcctatcccatataacacaggagtgtagtagctgtaccatctaggtttgtgtaaataaactctttgatgttgacacagggatgaaattgcctaaagacatattcctcagaggtatccctgtcattatgcaaacaataacggtataacactaatggaaaacaccaagtggatgtttgtagcaatagtagacatcagcacttcaaacttaaatagaaaacatcagtgaatgatacattatgtggcatctttagtgaatgattttattgttttagttccataacgtgactaatagaaaaagtaacctagtttatgaaaatgtaataaaatgtaaatataaatatacttgtaatagaaaaagatacaatatgaacacaagcatatatgcatatgacattattaattaattttgtgaaaatatattacaatatattttacagaaaaacatatatacctagccaccattagccattctgatggaagggcaaataataattctcattgcaaagaaataaatatgggtttaaattccaactttttagattttagagaatagccgggcacagtggctcacgcctgtaatcccagcacattggaaggccgaggcagacggataacgaggtcaggagatcgagaccatcctggctaacacggtgaaacctcatctctactaaaaatacaaaaaaaattagctgggcctggtggcacacgcctgtaatcccagctactcaggaggctgaggcaggagaatcgcttgagcccaggaggcagaggttgcagtgagctgagatggcaccactgcactccagcctgggcaatagaattatgcataaacattcccccttttcttgatagaaaataaatgatgaaaagatttttatttaatacaactagataatttatagttttttccctgatgttcatataccatttatttttttaaaatttttgtttatttgtttttgagacaaggtctggctctgttgcccaggctacagtgcagtgacactaacagttcactgcagccttgaccccaatgggctcaagcgatcctctcacctcagcctccagagcagatgggactacaagcaaacaccagcatcctcggctaatttttatatatatatatatatttttttttaagagatggggtttcatcctgtgtatcatgctaacctcaaactcctgagctcaagtgatcctggagtgctgggattactgacatgagctaccacgcccggacattcatgtatcattttacttgtgttttaaaaaaatctccattttctggcctccccatttttaagtaggtgatgttttaaaaattgctttaacctcccttcatagtttaacttaggctttaatcatttacaacaaatatttctattaaaatgtagacaataagtcatgattagagaaggaaccggtgaacaatatagtaggtagttttttttattatttcagtctctggcatagagatatagctcagtattgtttaatattttattctttcaagagacatttattttaatcagaggaatctggttaacttatataaagaagaaaaattgaatgagggaattttaagaactaaggcaaagaaagcaagaagataagtttgagaatgcatgtcagttacaattaagttgaaaatgcagcattttctcaaaatagtgacaagtacattaaattcctattgataaaatcattatttaaattttgttattatgatagcagtgatattataggggtatatgataaagaagtatataatgtcaagtttcagccaccttgtctaaatgtagaaagcaaccacctaagatccttttgaaaagttacaaaactttggtgtttgtgactgagatggaaacaatcaccagcatggatcaaatctctgctctcccctcatcttgtcgaccataaaaataatttctaagaggcactttaaaatggacaaactaaatgacacactagccacccaaagtctcctatattctaaagtgtgtgatgagacaaactgattcaaaatagccctagggtgagaatttcctgttcaaatctgcagtgacacattggtgaggaatctactttttccactcttgcctcactctgacccttcaaagggcagcctgtgaagatcacagataacgtttgtgtctttcagaggtaacctgacctctccactgaagggcgtgtggctttctgatgacagtaggtaagtgttgctcctctccctgtttctctactagctcatctcatttagtagaagattgtaagtactggctgtgatgcacctgaggtaaagttgatatagacgaaaatcaaggtagaactttattcacgtgaataattcaaggtgaaaaacgagccaaaatataaactatgtttaaggatttcttagagtattcacatcattgccgctggagaatcactcaagtagatgcatacataataataggtttgccaatccatgtaatttagagtgaaacccataaccatcatgacaatgaacaattaattttggattttgtaaccattacattttgtatattatatttagaccaaactttaaaaataaatttttaatatggatacatcaaattgtgaatgtcaaacattaattctcaatcacacacctagatttcatgaaagcagttttaatttttaataaaagtaaggatgaaatcatttccataaaatgcaaatctgaccttaattataaacaattggaagacttaaaacaattgaaccaaacattgcaaaaaagatgtaccacactgacatgagacgcctaattaatgagttattttaacacactctaatgcaaatcagaaataataaaatggcaattgtgttaaaaatagttgaaatatctattatgtattcagtggtaacatgtgccaggttgtgtgtttagttttttacatacattatactttataaattatttttcccaatgtagattagtaaactaggttagtagacactaagtaatttagtacaggtcacatattacaacttgcaaagctagaattaattgtagtctcactgactacagagctcattgactagattattaaattacattatctgaactattacaattacttatacaaccaaagcaaccctcactgacttatacaatcataggagctttctgaaagtttgattggacactattcttccatagacggcccacacgtttatttatcattttaagttttcctattttagtcattaaatcaattaccaatttcttgtgtaaaagcagcaatttaaaaatacgttttcaataatatttatgcatacagtaatgtaatgttttacaagatatatttttaaaattttaatgatttttctgatttcctaatttagaaaaaaaatcatttgacaatacctcaggtccttttaataaatgaatgtaagtcactaacaatgtattttagtataagaagatactctatatgctgacagaactattttatcttatggcacacaatccttaaccatcaatgactcttaaaactatgataaaatttgtgtatttctaaatacagtattttgattgttgacatatgcagtctattggtgttaaacatttttgaagaatctaaccttaatttaataccaatttttcatgaacttcctagttctcataagtttaatgtttttattgttcccactagtaatattatgtcaaatacagaatacatctaaaaaattgccaattatatcgtgtgatttttgtttaaagctttaggaaattagtagcagaattttacattggttaacagcaaagtaaacattattactcagccccaacacatgcacattgcctataccagggatcctgtcaaaatatacaccatttatagcttcttaagtgcagttatcatagagcacagtccctcacatcacacagctgcagagatgaataaacaaagaggaaccttctcagaagtgagtctggcccaggacccaaagcggcagcaaaggaaacctaaaggcaataaaagctccatttcaggaaccgaacaggaaatattccaagtagaattaaatcttcaaaatccttccctgaatcatcaagggattgataaaatatatgactgccaaggtaaaacattaaatatatcttcaatattattgttctaggatgtgcagttgaatgcagaagggtgaggaaagattagggaatattttgcacttgtgagaatcggagttcataattgggatctaaaattctaatatgaaatcagaagactaattttattcgggcattgttcaactgtaatctgcggtccactcatggaacattatatttactgaaaatgaaatggtatattctgagagaaagattactagagtagatgtagatttagaggccagagtttatcattatgtttccctgtgcatgtgggttctctagtatgtaattctctagtatgtaatcctaatcaactctctatctcccctctctcagtgcctctatttctctccctgcaggtttactgccacctccagagaagctcactgccgaggtcctaggaatcatttgcattgtcctgatggccactgtgttaaaaacaatagttcttattccttgtaagcatattcttgaaagattagaagggaacgttttactttaatgcttggaagtgcctcaaaatatttcatactgttgaagaatagaactcttattttactgtttctttcaaagatctattacttcatttatttttatagaaaaagttaattttattaaagattgtccccattttaaataacacacaaagtttcaaagtaagaaactaaactcattatggtttatctaaatattactttttataaaaatcattttaatttttctgttacagtcctggagcagaacaattcttccccaaatacaagaacccagaaaagtacatttttattttcaaagttctgatattagtacaatttggaaccaaaagtaatatggttattctgaatttttcacaacataaataacaaaatcattgtaga

SEQ ID NO: 5742 - DNA, 6000 bp, Homo sapiens
cactgcagcactatttatgatagcaaagacaaggaatcaacctaaatgcccatcaatgacagattggataaagaaaatgtggtacataaacatcatggaataatatgcagccataaaaaagaacaagattatatatttagtgggaatgttggtggagatcaaggctattatcctcagaaaactaacaggagcagaaaaccaaacactgcatgttctcacttataagtacaagttaaatgatgagaacatatgaacacaaggaaagaaacaacagacactggggcctacttgagagtggagagtggtgggaggagggagaggagcagaaaagataactattgggtactgggcttcatacttgggtgatgaaataatttgtaaataaacccccacgacatgagtttacctatgtaataaaccctcacatgtattctaaacctaaaactaaaagatgagaaaaagactgccaaaaggctaccagaactgataaatgatcttagtaaggtctcaggatatcaaatcaatgtatcaaaagcagtagcattcccatacactaataatctccaggctgagagtaaaatataaaacacaatcccatttatgatacacacaaagaaaatgaaatacataggaataaatacagcctaccagggaggtgaaagatctctacaaggagaactacaaaattctactgaaaaaaatcaaagataacacaaattaatggaaaaactttccaagctcatgtattggaaggatcaatattgttaaaatggccttactgcttaaggcaatttacagattcagtgcaattcctatcaaactaccaatgccattcttcacagaattagaaaaaaactattctaaaattcatatggaaccaaaaaagagcctgaatagctaaagcaattttaagcaaaaagaagaaagctggaggcattacactgtccaacttccaattttacaataagactacggtaatcagaacagcatggtatggtacaaagtagacatctatcctaatggaacagaatagaaaactcagaaataaagctgcacacttacagccatctgattttcaaaaagacagacaagaaaaaaaggaatataaatggactgcttatacaataaatgatgctatgaaatcgccttgttgtctagggtaatatctgaggtttgttgtcccatgaccacagaaaactaggacgtgaacacaccagagtgaggttaagacaggaagtttaatgggcaaaagaaagagaagagatctctgcccagggatgggtactggagaaatgggttgctgcttctgcagtgaaatgtagaaggttttatagatgagcttgagggggcagtgtctgatttacatagggcacgaaagattggtcggactaggcatgccatttgcatagcgcttaaagaagctggccactcaaccctagtcttttattatgcagatggttgtctacctggcctgtgccatgttgcctggttctttattagtgacaaagaaaagggaagatggagcctccaggttgaaaatgcctggcttccagtcagccccttttctattggcacagctgccagcatgcacacatgcaagtctccagcctgcttatctatgtctgctgcttcatttttcaggctgctctttgttagaaaagaagttatttggggctgctttttgttaaaagggaagccttgctgagaattcctttaccctcactatctgcctaaataatttctttctcgttcctgtatcactagtgtaactgtctagccatgtgcagaagagttaaaatggacccttacctttcaccatatagaagaattaactcaagataattaaaattttaaatgtgatacctcaatctgtaaaaattttagaagaacacctaggaaatacctttctcaacatcagccttggcaaacaattttttggctatgtccttaaaagcaagggcaataaaaacaaaaattgacaaatgagacctaaactaaaaagcttctgcacagcaaaataaactattaatgaaatatacagacaacctacagagtgggaaaaattatttgcaaactatgcatctgacaaaggtctaatatccagaatctataaggaatttaaacagaacaacaaggaaaaacaataacctcatttaaaaatgggcacaggacataaacagacactccttaaaagaagacatacaagtatccagcaagcatattaaaaaacacttatcatcactaatcaacagagaaatgcaaatcaaaaccacagtaagataccatcttacactagtcagaatgaccactatttaaaagtccaaaaacaacagatgctgatgaggctgcagaaaaaagaaaatgctaatacactattggtgggaatgtaaactagcctaaccgctgtggaaagtagtttggagatttctcataatacttcaaacagagctaccatttgaccctcaattgcactactgggaatataaccaaatgaaaatagatcattatatcaaaaagacgcatgcactcacatttttatcacagcactattcacaacagcaaagatatggaatcaacttatgtgctcatcagtggtggactggataaagaaaatgtggcatatatacaccatggactagtactcagccataaaaaagataaaaccatgtcctctacagcaacatggacagagctggaggccataatcctaagcaaattaatgcaggaacagaaaaccaactactgaaggttctcacttataagtgggagctaaacactgagcacccttagacgtaaatatgggaacaaaagacactgcagactactagaggggagaggagagcagggaagaatggttcagaaaactacctactttggattatactcactattctggtataatatacccatgtaacaaaccagcacatgtactccctgtatctaaaaataaaagttgaaagaaaaaaaattggaaaaattctcaaggacagttgactggccaaagattttttgagtaataccccacaatcacaggaaaccaaagcaaaaatggacaaacgagatcacattaagctaaaaaataaacaaaacccccccacgagattctcttatcttagacttttgacaatttgattatattatgcctcataatagtcttttctgggctgatcttgctcatgattcattgagcttcatgaatctggatttccatatccttcccaagtgaggaaggttttcagacagtatgtctttaaagaaaaaatatttttgactttttatgtctctcttctccttctgaagtttctatactttctataccatattcttggtggtgtctcaaaggtctcatgctttctttgccactttttattctttttttactctaatttgttaattttaaaagactctttttttgagttcactaattcctctgcatgattgagtcgggcattaaaactctctattgacttatttatttctttcattgtgttcttcagctccagaatttttgtttggttctttttaatagtttatatttctttattaaatttttattttgttcatgtattttttgttttagttgtattttttgtttactcttttcttttgcatctcactgagattttttaagatgattgttttgaattactttaaaggaaacttatagatctccatttatttggatcagttgctaaagctttattagtttcctttggtggtgtcatatttgtctgatgctttgttatttgtttatccttgtactgatgtctgtgcatttgaaagagcagactctctttcagtctttacagactggtttcggtaggttaaaagcttctcctgttagtgtcctgggctgatgagattgccttcagtatcatggttgaatggggttacagccagatcacatggttgcttacgggtccagagtgggatctttggttcatgatccttttactagggcttctagcaggcttgtatcctatttagtgcctcagagggccaaactggctctagaatcatactgtatagggctggggaggggatgagggtccacttcaaggtctgtaaatggtgggtctattattaggtgtgtagttggggaagagtttatctagtttgctgggaaggctgctcatgggtctctgagtgggttcctcaacctgtggcacagaggagttagtgctaagtcacaaggtttcctcggggtctatagctgaaaccagtgtcttcatgtctgtctctggggtcatggttgagtgtgttttctggcaggtctgtgggcaggcagatttgcctcagactgtagttgagttgggctggagctggatccagaattgtttcaagatctgaaataaaactaaggtctgtgcctgcaggggcactaatgatgtctctctccaggtccctgtatgggcaaactgctctctagcatagctgagaagtgtcgaagccccttttctgtccaattaaaggatctgctgtgaaacctaggtcaatggtctcctagttgggacatggatgcacatgtcctccctctgtatccctgagctggcaagactgctcacagtccacagctgagaagggtgaaggtcaagattcaaggctgtttcagaaactaccgtggaactgaagtcagcaagcctgtactgctgacaaagatgattgagtctcacagcaatttcctgtgattaactcaggtcacagttgagaggagtttgagtggagattcagggccattttagtatcttctgtaggacagaggtcagcaagcatgccccagaggtacagatgtatatgtctcccaggaagtctctgtgggtgaaggactgatctcaagttgtggctgacactagttaaagccaagttagagggctgtttcagggtctacattgagactacagttgatatgcctacctcctgagacactagtgtgtgagtctcctcctgggcccctgggcaaatggttttggcagcatgaccaaggcctaaatggggctgaaggcaagcacaggaggatgggtcccttttcaggtctggagatggaatcactgttggtaagtctgccacttggatgcaaatctattccctaaaacaaccttcctaggtcttgggttccactggcattttacaaactcctacttgaattccaaactccctcaaaggaacttttgtctgtggatggctgaaaaattattgttgctgtgggggcatatgtgtgggggaccacctattctgccaatttactgactttcctcctagtaagattttaaaattactttttccccatacatagtttgacttcagtttttgtcatttacaactaaatatttctatgaaagtcgacataatttgttatggcggaggatgaataaatgaagaatgtaatgaatagctatttaatatttcaatttctggtatgctaatatatttcaaaattgattaatattttacctatccaagatatttttatcaagggtaatctgaagattaaataatctatttttaaaaattaagtgcaaaaatttaagaactaagagaagttaataatataactttggcaatgatgctttttgtgccagctacaatcaattgagtaattactgcagtaatttttcagaataattaaggaaaaaatcagtagatatcagttgataatattactatgagttttagaatgttttctattataatggaagtgacataataaaataatataaagaaaagaagtatgcaatgttaagatttagcaacctagtctaaaaggcactcttaacaaggtgagggttgacaatgttcgtgatcaagacagaaaaaaaaaaaattctcataggcacttgaaaaatgaaccaactaaatgacacactttcaaagtcaaccttgtacttttaatagaccaagtatcctatattttggaggtgtgtgatgagataaaactgatttcacaatagcccatgtgtagaatttcctgttcaaaccttagtaacacgttgatgagaaatc

SEQ ID NO: 5743 - DNA, 6000 bp, Homo sapiens
ctgaacaaggttgaggagaaatagtgcttacgttgaaaaatctttaagtctttgtccccgttctctaacttccttacgttttcgtttatttagctctatccccactatctactagaatttctcatatttaaaccaagatgggagactaggtcattaggaaaatattaccgtctacaattttcttatactttgatctgtcttttatttgattgtaagttgctgatggacagtgatcattagaaactgaattttgtataatactagttttatatgaaactagatttttattgcgctcaggttatgttccttttacctccttccttaataaagagaccacttgaaataatcagactttttccaagtactgtctgcacctcatcccacctcttccccattcatgagatagtgcagaaccctagcacagtcttttccatatagtaggtgttttttaagtttgttgaattggttgctgtcttgctctgtccttagattatttgcctttagattatttatctttggtatttcattggtatcaggctgagtctatttgtatggatatttttaatgtaaatattaatgtaactgagatgatttatatattctattgttagactacttcgttttgatttgaaatgtgtgaacctatgagcatggactgtgctgtaagtttaaccactgacccctttaattaataactggattcctagcatgaatggataatgaagtcgaatagaaaattttaaaaatttaataaacaacaaaggtaaatgaaggatttgagggtgagttcagaatctgccttggctgacttccgtatgatgatcagtaaagttggataactaccactcaaaatctctggcatctaccttgtcctaatttgaactgtgtgatgtggtggagagaatactaatttaagaatcagaagtcttaattacagatcagcttaactattttctcttaaattgccatcgggaatccttttttttttttgccattatgtcatcatagttaacttagttcctgaggtggccctcttgtttggtttctcagaaataagaggaaggatggttgctgtttgatcaattactagaggttcagttgggacaatgtatgttaaacttagagcatttgaatgtattttactgtaaagacaagaaagacaaacagggtgattagggaaacagaaaatctcaagctagagatttttttttttttttttttttttgagacggagtctccctctgtcacccaggctggagtgcagcggcgcgatctcggctcactgcaagctccgcctccggggttcatgccatttccctgcctcagcctccggagtagctgggactacaggcgcccgccaccacgcctggctaattttttgtattttttttagtagagatggagtttcaccgtgttagccagaatggtctctatctcctgaccttgtgcctgcttcggcctcgttttatctttttctttactataagagccaggaagttcagtgtcatgcagtgggataaaagttaggcattagaacaaataaaaaaggagatggcaacttgtctgggtgaggttagtcctcccagtgaagtgattcagaccatcttccctgcatgctaggggtttttccagacatccttcattttagtctggggcaggaagagcagtgtgctgctgtgaaatgataaaccactgaggtttgacagtgtgacccgaaggtttgaaggtgtgactagaagctgttctaagcttctagctaacggtatggtcagaaaggaatgagtaaaatatgtggtttcctaaataaaaagggcttttgcaggaaaggagccagaagatgagcaaattaatacttcatatattcatatttgtgtgttatgtgcatgttttgcacaaaagtgaatttggaaggcaaagtaccagaacattcaaaactctgtatatttctcttctgttttattaactggatgtgataaagtttaatacttccaactttgtgcctctttaatcaaaaggccaggtagggagtttcaatctcatttgaagttactgttatcttctggtgctgattgtgttttcctttaaaggagaaatttgccttttccagcaattcagagcttggtaataaagagaaaacaggggagcagctagaaaatttggctttcccgtcgtcagtttcattctgcctcttttcaaaactatgaagaaatctagattttatagtcagttccttttaacttgatccacttggttcatgaggtgcacttgtaggcatcatgcctcttacatgtgctgcagtttcaataatgaataagacagacttgtggactttatattatgatagaggagacaatatgtaaaaagtataaaaaattgtgctctgcacttgtctagtctccatcctgagaactattcaccttctccccagctatgtggatgtaaatcaaaacagaaacatgcctcaacataaccagtatctatctgaatggggcagtaagatatgcagccacggaatggtttctctagagtgatggtggcactagcacgccaagcctcatggcaggatagagaacctggctcagtataacatgtcaggatttctgcactgcagtcctggtgtttcccctattagaaccttaggggaagaaaaacaaacaagaaaacagttacttattttgaagtgtaagaaatcctgtctgtagtgctaaatttaattagtcctagcctatgaagcgtgtgatacttttattgaacctatgagaaaagtgaggcttgaggatttggttgacttgttcaaatttttatagataagaacaatttgaatcttggacttcaagtaacaatttttaacattttatgagagcccaccatatatatgccaggttgtagttagacactttgagatggatcttacctcatttaaccctcatagcaaccttggatggcaaaaaatatcactattttactatggtgaatacaagacttagagaaatgaagtaacttgcctgaagtcacacatgggagctaggggctagcatttcaagccagatttgcctggttccaggattcatgctttgtggcaagagccttgttggaagcccgggtccttctgaattcacggtccattgtgctctgtcttcagtcaggccagattttaaacaggaatgaagaattagcaataatgtttccttatgcaagtcaatgaacttcttcactttagtttcctcatttgtaaaatggggacgaaaatacttgtcaatgttgggaggttttaatatggttatatgcacaagaggtactccaatacgtgacagtatctctgtcaccttttcaacatccgctattactacaccccagcccctgaccctgtcacccacttcctatcatctctcacagaactaacttcctttatttattattttggcattgagataaagggatatggaccgtctttactctgatttgggattgacgaagccaatccaggatggagggaaagaagaaaatgcccagcagcaagtattcctgaagcgtccaaactccatgcatgaaactttgcctacattattgagtaaaattagcctctgggagatgtttcatctgatggcctgcacatgatgatgtggccgacttcagggactacatgtccctgtatcagcaatttcgcctgctgttctgtgcctctctatcccacactccttattaaccactatcacctgatttgaacaatttaagttggtttcctagaactgtaatcagaagattgaaaaagactgaatccaataaaagtggaagtcaatgagagatctgagtacattctggcagggtctgcctcatggtggagtgacaaaaatgaattttttcaagtcttcgatataggtgaaaatgtgaggccttgctggaaggttttagggatagattttatgaagtgagatttcgtgggaaaactcaagtagagaaataatttgccagtatctttttcttaaaaaatcaaatgtgcacattttcacacacaactgatggaacatcaaagggaacatctcttctggagggcatttggtgatatatattagagttctttaaatacatataccctttgacatacaattttatgcttaaaaagtttccctaaaaaaaaaaagtacagaccaaatatattttacaatagaaaaaattgaaaacaatttaagtatccaatagtaggggattgcctaaataaatgatggtttatccctgtgagtaatatttttaaaataacatttcagatgaatttctttgaaataatggaatacatattatttattagaaaataataaataaaaaatactgtgtaaggaatgataccaaccttgatagtaagcacaacatacagagaaaaaaaactggaagaatatatgccacaattttatagaggaattacggatcttttaaagtaatttaaaaaatacatttacttgaaataaacagatagaaaaaggaacttttaaaaaataatgacatataggagaacatttccaacagagagactgttatttaaactaagagctaagtagttcaatcattacacttcttttatatgtctatatttttatacatagacatttcagtaatgtcttttaccagcagtttctctaaagtacgttagttttttgttaatgatattagttttattttctccaaagatgtgtacaaaattttatcttttcagccctcaaatattgattttgaacattattttgcaaagagtactaagtggttggttagttgagatagaggaatatgcagcttttgactatctttcctttcccgtcagtaccagctttcatgatacaatttcctcttatcactttggtcaagaggtggggcagaaaattttgagttacagtatcattcgaagagaatttatttctgcctttcatgttatagcccctaagggatccaggacccgaaaggccagcttctccctcattttgaaatcagttttctccacctgcaccactgcatagcacagatacaggtaatatccacttttattttctcagatctttctaccagattatccttagtcttactaattctagaaatacggcatttaactacaaatgacttagcattataacagaaatgataggaaagcattcgctactgattgtattaatgctgcactactttgaaggaaattgtagtccagtattaacaaaaagttattttctctttctcaatatgctgtgatttttgctttgtgttatcaaaataaagaatagagatttgaggggttaattactttttacttaagtctaatgatttacatattttatccatcttgaatgactctataatagaaaatacttctttttcttaggaaattagggaaaatgtgactaggttagaaaattttgtaaattaaaaaaattagaaaagaatatggttacatgtgcaatttgttttttcatatttctcatttcttggatatcatctttttatactgactaacataagaagtaaattttaggtatttactatttaattattcttttctatattgacattcattaatcaatagaatcttttatggacattaatgactgcctgttgacaactgttattttcacataggcttctctggcaatataccggaagattatttctaaaattttaacgtacatggaatcatttgagatttaaaatacatttatctgggctccaaccgaagtgatttttatttagtacatcttgcaaaaggcactgagtctggcatgttaaccaatttgcaatattaaccctcaaataattcttttgtagaaggtatatgcgatacattttggaaagcactctgatagagtcaagtatagttggaaagaatgcaagaactttgttatatttacatgtatattagaatacatgtaagtttttaaaagccaagatatttttatttttccagaatttattagattttttgtttgttgaactcataaagtgtttcagtgatttgcagtggta

SEQ ID NO: 5744 - DNA, 6000 bp, Homo sapiens
atagattaatagaaacctaatttattattagcaatattaggtaataatatggcaattaacacttatgtactgcttttgattttcaagaaatatttttcaagtatttttttttatttgaactttcaacaactctctgagttgggccttttttgtttcattttacacgtaaacaaattgagggttagagaggttaagtgtgagaacaaactttctgataaccaggcgttatgaatggaataagctgcttgttggccggtcctcagcactgaagaactgtagacaaagctggatgtctacctgctagagatgttccacagtgtgcaatagctctagcaggagggagttagggggagatgagattttgcattcaatgatgagaggatcatagagtatgaaccctgacaagaacctgaggctaatgtagtctaaccttttcattttacaagcgagaaaactgaggcccagaaaggtcaacttgctcaagctgatgcaagctctggaatctagctgtaggtcagtgatcgctaacagtcatgctaaactgaatgattctttgagaatcctgaggaaagaaggaaaacgagaagaaaaaaatgagtggccccaaatggttgacataatatccttaattatcacatttttttaatccatagggagaacgaatgttcttgaggagaataaaagtagttggcaagtggtatatgtttttatggtcaacaacattttttaaaatttattttttattttattttattttattttattttatttatttattgatcttttagtatttacaggaaacagagactacaaagaggtgtaagacatggaccttacaccgcaagctcttccaagcaatatgtggtaggcagaataatggcccccaaatatgtccacaccctaatcctcagaacctgtgattatgaggcaggagaacagggtctgaaggcaggaaacctaagaccgattggctctgacttcctagaactgaatcaaaaggaaaaccccacctctccacatccaagtaacaaaacgatcagaggctacttcctttgcaactcccccctccacccttttctgccgttgcagatgaaaaatgaaaggacctccaattggtctcctcctgcaaccaatcagactggttgcaggccaagtcttcatgtgtaaatttgtaacttcacttcagcctccaattggtcattttgcaccaccagtcagactggttgctggccactactttatttacatagggtttaaaccaagtaacaaacaggaaacctctagagagtatttgaaccccagaaaattctgtaaccaggctcttgagccacttgctcgaacctgctcagtctgtggagtgtacttttattttaataaatctgtgattttctttcattgcttgtttgtgccttttgtccatccaattcttggttcaaaacgccaagaacctggacaccctccaccggtaacaattatgctacctttaatggcgacagtgacattgtagacgtgaatggagcttcacagaagaagattatcctgtgggcccaatctactcatcatgtgagtccttaaaggtggagaaactttccgatctgtggtcagagagagcaggacacacagcaatgacagaagggtcacagaaacacacacctgatgtgagaggactcaaccagccactgttggctctgaagacggggggatcaaaaaggctatcaaccaaagaatatgggagacctttataagctgggaaaggcaagaaaacaaattcttcccaggaacctctagaaaagaatacaggcctgctaataccttgattttaatccacatagaattttgttgacttctgacttacagaactgtaaaataaaacatttatgttgtttagaccactaagtgtgtggtaatgtgttatgttagcaatggaaaactaatatataaggtaaaaagaaacaacatatacatggaagcttaccaatgatcaatattctctagggtataccaaccagggttaaacatgaggtcatatgaatagtaatttcccatactctgtcgccgcctttagttggttgcagaacctctgttgtttcttaaaagatcttttccccaactgtccctgaagatcctcaagatagtagaggacctcataaattttcacaatcccaaaccctagcggctacatagaatccactcttttccttgtcttagatttcttctggtgatgtctattgttctctaaatgcctgggaactccatttacatgccaggcattgctgcagcagtgactctactgctgactttgtttataattttcatcagagtgactctgatcctctgtgccagtgcaagcctttcaggtaagcctcaggcccatgtggagctatctcctactggtagccactgcttgcccttttgtgaaagttgaactgcatttccagataaagttggaagaattcacctgccccgcttttgtgttatattcccttgaaaacagttccaaagcaaagctaccttgtgtacacaaggtctcatacggttttgttgttgctgttgtatttttctgtgaaataactctaccagttgtacttgagagtcccctctcactaggactctgttattgcatacgggcttggccaaaggacattgagatgcagacccagcgctgaaccccaagctattcttgttagtggaaaatacctttgtgctttgattttcttttttcttataatgagtgactttccaggaattcctccatgccttccgtaaatagattccaccccactaaaccagtagattccttcctcacaactgcagaatcatacaagagggaatatactaagtaacacatggatggatggctttaacagtttagaggagcgcaggatctggcagttaggattcatgtaggctaaactggagaaggaagagatctccagtgtatatttcagtgtgacttcccactaccgttcagtacttaatctggacagagagataatgggcattcaacaaattcctatggaattaataatgaggcagaaataacgatctggtagaaacactggggccaaagcattgttgacaatgagttggaggcttataaatttgagatggaggtaataattgaaattacaagggaatgaaaacttgaagaaaaaagagaaataatggatattctaaccatcttattaatgagtataatgtgtgggactagctatacatatataactcctggtgaatgtctgctgtgtaactcagactatttggtacttagttgtttctgtgtgtgggcattatcatttccagtgttttctctaactcaaaatgtttttaatgtataatttatgtgatttgctcaaaaaaattggagagaaaaattttgcctcccctttctggattgtattttggtttcttttttaacttctatttctataatagtaactagattttagacaaaattctgtgcatcagaatgagtatctagcaatacattgcagaaattttaaaaatgagtaaaccactttatctgtcatggaggagcatgcttggggaggtagagtagaaaattacataatatgaagttccaatcagttcatttggatttgatgtatcacttatgacataaagaatctaaagaacaactaactgatgagatgtcttcctttccccttttgaggtaaaattcacataacataaaatcaaccattagccatttaaaaatgaacagttcagtggcattaagtacaattcatcctgtttttaaaaagccctgaaggaagtgaaaatgccaatagagaaagctctagagaactgacatacctcaatctctaaatatgccacattacattgactcaagttctttttgctctaatgactgtcagtttgtgtttggtatgcgttcaatgctgaataaattggtcacatattcaagttacctatgactcttatttctttaattgaatttgtattaggtgttaatatctaacagaattccttcagctatctattgtcttaagtattttctattattttagtttccatgtggacgggtaacataactaccttgttcactgtttccccagaggagaacccaggacataatgggatatatgtgtgtgtgtgtgtgtgtgtgtgtgtgtgcgcgcgcgcgcgcgcgcgggctctaaatgaatgatctattacgtaatcttggggttttaattctcattaattccttataggttcccccacgtctccgcagtggtcagtacttttttttttcttttttttttttttttttctgagacggagtcttgctctgtcgcccaagctgcaatgcagtggcacaatctcggctctatgcgatctctgcctcctgggttcaagagattctcctgcttcagcctcctgagtagctgggattataggcgcccgccatcacgcctaatttttgtatttttagtagagacggggtttcgccacgttggccaggctggtctcgaactgctgacctcaggtgatccacccgccttggcctctcaaagttctgggattacaggcgtaagccaccactcccgtcccttcagtattatcttgtaacaccccggcaaagccttcaggtggagaatgttcctggcgcggaataatccacctgaatgtgaatcctgaccatttttaggcgccaatggaggccgctgctacggggccggccgtgaggtggcgctgttgccctgtatcgtgactccgttttcacctggactggagtcaccgtgatacctgacatctagcaatcactagagtaggaaatgagtatagatcagcaacaagtccagcctttacagttgcagcagaggtttcctgtggctcgagtgtggcgagtcccggaaacctcggagcccgcagacttcccttcgcgggagcccgcccgaactccatcctttgccggcagccacgccccgcagtgggaaggagggactgaaaagcatttccttgaggctggcacaccttgccctacccaaccctgtcattatttcccctccgactgggccggtgccatcggaaaccggagtgaccagaggagggacacggtagtgaacggggtatggggggcgggcgcggcggggagggtaaagaaggtgggaagggaatggcagcgaggcagctgggggaggactttgcagttggggagggagaaaaagggaagaggctgggagcggaacgggtgtttatgtgaacaaacagaaatcaccaagtgaattaacctgtgtttcttcggaaccagcatcttgtggggtttggcttctgtgtttctatatgataagggagtaaacctgactcagcagatttggtgcagagagaaacatgagaaaacccaggaatgggggacctctgtttattcctggagagggggccatcaggagagggggaagggaaagaatgaggttacaggaattacttgtcagaggactgcatagcctttcagaccatggaatcgttgctttcagcttcggcttcctcatctgcaaagcataaatacggtaattactttccagggttgttgcgatatttaaatgagatatcaataaccatgctttaaaagtgtacagcctgatgtgctatcccttgttgactgaatctctgttttctttccttctttttatttggggtggggagtgggggagggagtcttgctctgtcactcaggctggagtgcaatggcgcgatctcggttcactgcaacctccgcctcccaggttcaagcgattctcctgcctcagcctcccaagtagctgggattacaggctcccaccaccacggccggctatttatttttttgtatttttagtagagacggggtttcaccattttagcctctgttttcttttcaatgtcttttttcctctttcatttttctctatcaacccttcatcccccctttctttctttcatttatgcgattgttgcttccttctgtaatgggtcctctccacattggagtttcttatacctatgagaccacacttc

SEQ ID NO: 5745 - DNA, 6000 bp, Homo sapiens
tggagtgtgcagtggtgtaatctcggctcactgcaacctccgcctcccaggttcatgccattgtcctgcctcattctcccgagtagctgggactacaggcgcccaccaccatgcccggctaattttctgtatttttagtagagacggggtttcaccgtgttagccaggatggtctgggcctcctgacctcgtgatccgcccacctcggcctcccaaagtgctgggattacaggcgtgagccaccgcgcccggcctttttttttttttttttttttttcagacagagtcgcactctgttacccaggctgggtggcaatggcgtgatcttggctcactgcaacctccgcctcccgggttcaagcaattctcctgtctcagcctcctgagtagctcggattacaggcacgtgttaccatgcctggctaatttttctgtttttagtagagatggggtttcaccatgttagccgtgccggtttcggactcccggcctcagatgatccatccacctcggcctcctagagtgctgggattacaggcgtgagccaccgcgcccggcctccacctggatgtttcatagacacctccaatacaaaagagccattgttaaacttattacccactccttcttgaaatacttcttaggttttcttttctttgtaaaggagactcccattactctctgtttctctctcaattcacaactaaaagtcctgttttaatctcgtattctttaaatccatgatgtcttttcagtcctcagcgctgctgtcctgattgcccctttcatagacttctgtacaatgtgcaaaattcttcaatgtccgcattgttaatatgctaaaatctaaacttcttagcatggcttgaaaaggtttttattaatcaatagctatttaatggtcctgcctcaattcctgacattctctaaaagcattccatgcatcagctatatgaatctactttcaaatccccaacatactaagttctctaatgattcagtgtctttaaacctactattgtgattgaaattttttttcagtcttgttggcctggcaaagtctgatttgtatttccaacctcagcgctagggttattttcccttcttttgttttgttttgttttgtttttttgagacagagtttcactctgttgcccagtctggagttcaggggcgcaatctcggctcactgcaaccttcgcctcctgggttcaagtgattcctgtgcctcagcctcgtgagtagctgggattaaagttgtgagccactgcgcctggcccttttttcccttctttgaattgtctaggcagaaaagcatctctacacttagcaattttgtcttttttttttttttagttggagacagggtctcactgtattgcccaggctggagtgcagtggcaagatcacagctcactgcagcattggcctcctaggctcaagtgatcctccaaccttagcctcccgaatagctaggactccaggtacacgccaccatgtctagctaatttttgtattttttgtagagatggggtttcgccatgttgcccaggctggtctcgagctcctgggctcaagtgatctgcccactttgacttcccaaagtgctgggattacagttgtatgccactgtgccctgcagattttaatattttaattactcactttattaatcagtgtttccaaactaggctgtaagcttcttgagggtagggactatgattactctcatctttatatccccaacacttaacagagtgattggtatctgattggcacttaaaagaatgagaaacaaaattagttatgcagtaataatggcattctctctagggcttaagcttaacctatagattttcacttaagcatcttttaaaaatttgtagtaaatatatagtacattaaacaaaattgaagaacagaaaagcaaactacatctcatattatttcaccatcctaatgcctattttagtgcacttacttttggtctttgctcaaatatgtgctatatatatgtgtgtgcatttatgtttgtatattatatatatttttattttacatagctataatcaaatgtacatgcactttcactttttaaaagcttaactcggccgggcgcggtggcttacgcctgtaatcccagccctttgggaggccaaggagagcggatcacttgaggtcggtagttcgagaccagcctgaccaacatggagaaagcccgtctctactaaagatacaaaattagctgggtgtggtggcgcatgcctgtaatcccagctactcaggaggatgaggcaggacaatcacttgaacctgggaggaggaagttgtggtgagccgggattgtgccattttactccagtccaggcagcaagagcacaactccgtctcaaaaaaaaaaaaaaaaaaaaaaaaagcttaactcactataaacattcaacactgttgcataatcctctaaattattatttttcagcagtgtgtaatatctcattcccctacttaggttgatagtctgaggagatttaggttgtaccgcattttcttttttattttattttatttttttcgagacggagtctcgctctttcgcccaggctggactgcagtggcgctatctaggctcactgcaagctccgcctcccgggttcacgccattctcctgcttcagcctcctgagtagctgggattacaggcgcccgccaccgcgcccggctaattttttgtatttttagtagagacggggtttcaccgtgttagccaagatggtctcgatctcctgacctcgtgatccgcctgcctcggcctcccaaagtgctgggattacagccgtgagccaccgtgcccggccagttgtaccgcattttctattataaatagggacagatccaggctttgtgggacttgaagcttatacaattttgtataatacaattatacagaagaggaattcaaaattatctttgttttgcaaataggaccatgtgaacataccataaaggcccctccccagacattggaaggggcctgtgaaagtgaaggttaactttcttttctttttttttttttttctgagacgcaatcttgctctgttgcccaggctggagtgtaatgacgcgatatcggctcactgcaacctgcgcctcctggattcaagccattctcctgcctctgcctcctgagcagctgggatgacaggcgtgtgccaccatgcccggctaattttttttgtatttttagtagagacgggggtttcaccatgttggaccaggctggtctcgaactcctgacctcgtgatctgtccgcctcggcctcccaaagtgctgggattacaggcctgagccacccgcccccggcccagtttcctgctttgaggaagccagaatacaaaactcacttggttcttagaagcaggtcatttaaataaacggtgactagacctcaggtgaatttgggagaaagtgatttggctgtttctgctgtccatctacttacaaacctgcagcacctttggttcagcgcgcatttcttggaaggagcggagtggcttaagtcagagacctggattgggctgaggtactgctattcattacttgagtggccctgggtaagtcattaacctctcaggttctcattttgctcctctgtgcaataaagaataagtaacaaaacctgcctttccccagggtagttttgagtgtcaaatatgataacttgtgttcaagcactagtgaactccaatgtcactgaggtacttgttaacattgtggtagcagctccactttcttgcccatctgcctccaggtaagggcgtgtgacagctgggcaggatgcatctgatggctccattagggttaactgttggagcgcctctgcccagacgaaagcctggcaggtgatttcagggggcgtctgggccattactcctgaatgcccaatgcactgggagtagcagaggctgtgcacagtctgagattctagggaatcttttccttctcaagctgagaattgataatcgaagcatgccaaacattcgttattatatgcaacttgtaaaatcctaaatagtcttgtccaattgtccctttgctcttaggttttgaggcatttatcttggaattttatctgccagtttagaaatctttagctggtcgggcttaattctgggggcagtttgtatttctgggaaggcgggagaaaaatgacaatctcagttttgaattggcgttttaatatcgttcaccagatccacgctgaaagccggtgtaaacagcgttcaaaaattccgccctcccaaaaaaaggatgctgaaaccgatttccaaccccgaagacggagctcatcaccccgcaacgggatccgccgtggctccccgcgcgtgcaccgcggctgggcagtctcaggtggctgggggcgcgagaccggagccccacctggccctgccggcggcggccgcacaaagagcggggcagacggctgcccggccgagccgcagaaagtagtcccgaccacgccggctccaatgttgttcaacgccgcctcacgccctccgcggggagggccgaagcggccggtccgggaaagaatcccgctggaatgcgccaccgggaggaggctttccctcccagttcgcctctgctagcccagaacctctcccagggtctcaggcagaggctgtgcgtgcggttgccgactcccttccctggccgtacaggaggcagtaccgggagaaggggctcgttgcgcgcagggacacggtcgcggcgaccctaggaggcggtgccgaccgtatccctgcgccgctgcgcgaggcagaggctgaatgaggagctgcgcgggggaagcggggcgccgggggaggaggcggcgggatggaagcagacgctggcgtcgcgcgagcccggggccgagcggcgcggtagagagggcggcggcggcgcgcgcggaaccttgacgtgcccctttctttcttctctcgctgggaagctgggaagtatgagcgtgcagccctgccgctgcggcggccgccccggctcctcgcctcccccacttctggccacccctcgccggtgagagaagagaacgcgagaagggaagatgggggccgtcctgaggagcctcctggcctgcagcttctgtgtgctcctgagaggtgggaagagtgggggcactggaaagttggtggggttcggggggaggtggccttgttgtatgtgtctagggggaggggagggacggaggaagggagaaggggagaggagcggggagaggcctggtcgtggggagggggagagaaaggggcccgggagcaggggctgcgtgcaccgcccggccacaatgcggacctggcctggcttcccagaccttccccggacacatcggagcttcgatcccggctgctggtcttagggaacccttggcaccccatgctgtcgggatgactgagtgtctgtgtgcctctctctgcctggggtcttccagggaaaagggtctttgtacgtattttggcttttaaaatgtttgagtccgagatgctttaaggttggccttatccatcgaagccccgccacccactccccaccccgtttcggtgtttcttaggtgaacttttaaagccctcttgctattttttccaggccttgttacaggtaatgattggcttccgtttgggatataatgaccctgggtgagagcgcagttggaaagtgactccggggttataggtcgagcgtttcagcattgggagccttctgagcttcagcccataataaaataaaacattgcccttgtaacctctggtattcacggcttgcccctattttcggagtatgcaagtgtacagttggcactaagtagggaaattcatcctcgtgtgaagaggagccggtcctgggaccaaaatgataatttgctctgcacccctggggactgcttggcactttggtaaattgcataggctgttcgagataatttgctctgggaatcgcttgaattcgatg

SEQ ID NO: 5746 - DNA, 6000 bp, Homo sapiens
ccgaggcgggcggatcacggggtcaggagattgagaccatcctggctgacaaactgaaatcctgtctctactaaaaatacaaaaaaaattagccgggcgtggtggcgggcgcctgtatttccagctactcaggaggctgaggcaggagaatcgcttgaacccagaaggcggagcttgcagtgagcagagatcgcaccactgcactccagcctgggcgacagagcgaagactccgtctcaaaaaaaaaaaaaacaaagcgtatcacaaaagaccacatattgtagatttcatttatatgaaatgtccaggagaagcactacagagagagaaatatgttagtgttgcctaaggccgaggaggggtacgggtggaagggaaatgtagactattattgggtatggggtttctttctggggttgatgaaaatgttctaaaattgtaatgatgaatgcacaactctgaatatattaaaaaccactgtagagtacactttaccagggtaaattgtatggtatacaaattccatatccataaagctatattcagtaaaagaacatatgaagataaaattccttccttcactggcttaacatttcttgggaacctgaaatgttctaggcacttgctacacgttaaaaataaaaaattcaacaaggcccaatccctgtacttaggaagcttacagtctggtggcaagaaaattaaatgagcatttatataacataaggagtctgctggaagagctttatagctaggaaacatttcagattgatgtcttttagcacctttaaaatcccttctacatgagcagcaaactgtgttattgtatatgtaataactagcaattgaacagcctttttgagtttacaggtctgcaggtctatatgttagacctgcataaaaaggtctatattatgacctgcgtgtaaagtagataccactttcctaattttacagaaaagttaagtgatttattcttggtcacacaactagtgagtgataaaaccaggattcacgttttcaaaactcatcatgcctctgtccactccagactgactcctcttcccgtgtctttatatgacctggtactcccacccaaccaggctcccaagccagaagcctgcttactgtcagcactgcatccaaccaatcgttgtgtcctggagagcctctcctcttaatttctcctctatctgcatgcccatttcagggccttatcacttccgtttcttggaagagaggcctctggcctcacgtccctcaatccatccctcctgtggcaggtagagataattttctagaatattaattaggtctctggacctgtcactgccctacaaaaagccttcaggaactccccatgcctttaggataaagtttaagatttaacatatgaaaaccttcctgctctgaccccagcctctctctctattcttctgtgtacactggtaaccttcctaacaggctgaatttcctgtggtcatgcagtttcctattcctgaaatattcagccttttcctcctcatctgctaataacttcattcttcaataattaacacctcttcccagaaattgggatcagatgtcccttctctgagcctttttagttgccatcttctatcataacatttattcttttcttggggagggcagggacagggtctcactctgttgcccaggctggagtgcagtgatgctatcatggctcactacagcctcctaagagcctcctaggctcttaggagatcctcctgtctcagcctcccaagtagctgaaactacagacgtgtaccaccacaccatgctaatttttattttttgtagagatggagtcttgctatgctgctcaggctggcctcaaactcctgggcttaagtgatcctcctgccttggcttcccaaagcactggaattacaggcatgagccactacacctggccttcatcacacttaactgtttacacagccattgatttactttttctccttctgaactatgaacatcttaaaggtagatctcattggtattactggtctttagtttcccctgcaggtgcttaatacatgtttttttttttgtttgtttgtttgtttgtttgtttgttttttgagacagagtctcactctttcacccaggctggagtgcagtggctcgatctcggctcactacaagctccacctcctgggttcacaccattcttctgcctcagcctccccaatagctgggactacaggcgcgcgccaccatacccagctaattttttgtatttttattagagacagggtttcaccatgttagccaggatggtctcgatctcctgacctcgtgatccacccgcctcggcctcccaaagtgctgggattacaggcgtgagccactgcgcctggctgcttaatacatgttttccgattacttttaaagaaatctttctccacatagatgggacttctaaccctcagagaagagtgtcaagaatctcttcaggaaatgaagtgacaatggatataatttctaagttatgactcaggccagaaattaaagtttttattttatttttaagtaagccaagtgcagtggctcacacctgtaatcccagcactttgggaggccaaagcaggaggattgcttgagcccaggagtttgagactagcctgggcaatgtagcaagacctcatctatacaaataatttaaaacaccgggtacggtgggtcacgcctataatcccagcactttgggaggccaaggtgggcagatcacttgatgtcaggagttcaagaccagcctgaccaacatggtgaaaccccgactctactaaaaatacaaaaattagctgggcatggtggcatgagcctgtaatctcagctactcaggagactgaagcaggagaattgcttgaacctgggaggcagaagttgcagtgagctgagatcgtgccactgcactccagcctgggcaacagagcgagactccatctcaaaattaaaaaaaaaaaaaaaattaagaacattagctgggtgtggtgtgcgtttgtggtcccagctactcaagagactgaggcaaaagaatcacttgagcccaggtggtcaaagctgcagtgagtcgtgattgtgccattgcactccagtgtgggcaacagagcgagaccctgtctaaaaaaatgaataaataaacaatgatatttataaattaaacatatataatagaaaatatttctttaatcattattttaatcaatatcctttgttcactgtcataactgaaaaaataacatatcacttcaatgaaaacaggttcaggccgggcacagtggctcacgcctgtaatcctagcactttgggacgccgaggcgggcggattgcctgagctcaggagttcgagaccagcctgggcaacacggtgaaaccccatctctactaaaatagaaaaaaattagctgggcgtggcggcatgtgcctgtagtcccagctactcaggagtctgaggcaaaagaattgctataacccgggaggtggaggttgcagtgagccgagatcacaccactgcactccagcctgggcaacacagcgagactccgtctctaaaaacaaacaaaacacaaaacaaaacaaaaaaagaaacaggttcattgtattaaagcaccgaatacgaagtttctaataatggaaaggtctactttgtaactagcatggattaccccatgtagagagattcaaaaactgtgatagctctacaccctgaaccctgaagtgtatcagatgataaaagataaaacacacttgcagatcagtcccttgttgcatcaggaaaatcactgcaatgggaaattactctggtgtttacttttctttggtaactctttcaaacctagctttagcaacattgtaattcaagagtcatcctttggttacaagtagagttagtttcacacaatggacctttgttcacaagcattctcagtcaacctaatcctcctgtagttattggttaagactagggtgtgtagctgttggccgtacaggcctagacttaacttgcaattgcatagcgcttcaggtctgcaagctctttcaaaacagaggtgaagatactgtcaaaggttagaccatatggcaaactaagtgtcaatggtttagtaacgttgcatttgtgtgtgtgtttatggaggtggggatggggccagcagtaatttagaaacttccacaacctatgccctatgcagttcttttccattcattcagtcaacaaaaatattttagttaaatatttactgagcacctattgtgtaccaggcactatgctaagtgttagggatacagttttaatatatgttacagacaccagcattttcaccattattatcctatctacaaacaataaatcccgcagaaagccaaataccttccctgaagtttgtcttgcagataatatttaactcaagaattgccatctttaattgaggactccatcctccaattatggaaagaggattctcagaactatgcccccaataggatgcactataagcccttgaacatcaaaaaactgctctcagtggttgcctctgaggagggagactaggagactggggcacgggggtgaggggtagacttgtctctgtgtctatttttgtactgtttgacattttccccatgtgcatttattttaacttgcgcgggccgcgaggcaaggctcacctgcagaccctcgggccaccagcagggaggcacgcactccccctcgcagcgcgcccagcccggggtcagcggtgtggctgagctgggggggagcgcggggcggtggggggagccacctccctgcggggctcagcgctggggccgggagcccggagcctccgcggggagggacgcgctaatgttgccgggaagcagctccgggttgcagggcaggaacgtgcccttcccccgcggcaaacttgccgtcgctgcgacggaagcaggaacttgctaaccacaaaacccgccaggccggtgcgggagctgcggagcatccgctgcggtcctcgccgagacccccgcgcggattcgccggtccttcccgcgggcgcgacagagctgtcctcgcacctggatggcagcaggggcgccggggtcctctcgacgccaggtaaaggggtctccccaatacccacccccgaccggccgcaggcgacgtcgctacctgcggagagagtcggtcccctcctttccaggggccgaggctccttcacccacacccgagcatccaaaggaccagctggggccaataagggctgaccaggatccttgagtcgctgcagtattccaaaggggacctctaggcgggctcaaggcacctgccataaatggctctggctctgcgttgacatcagaaggagaggcagaagaatagctcagtaggcaacatgcatttcctcaaaggaagagaaaatgttccctgttttcttgtcgttgactctgtattcattattgaaactgctaattgtctaattctctgtagagtgtgtgtgtgtatacagttataagcatcttggtaaattatagtgtgctgtaagacgatttccaatatttgaactaattacgtgcgagtaagttttagcgactcttgtatgcagacgttaaaactcaggggcatcctctctcacccgcctgtatccttttaccccgtctttcaacaagattcaactcgacttcaggcccttaaagcctaaataataatggattagaaaacgtcgctaacctaatattgctgagcctctttaatgatataaaactcttaaacacttctctcaatgctgcatactgaaaacaactcctgccccatctccttacatagttcaggtttctttgcaaaagcttgaaaagaggctacattagaatccattcaaaataaagtattggcctggttttctcttgattccctagaggcttgcaaaatatggcagcgtattaagtaccttggccagaattattaacctggggagtccacgataaggtatccat

SEQ ID NO: 5747 - DNA, 6000 bp, Homo sapiens
tccttcacatttggaattatgatcctggttacatgctataatcagaggattcccagaactgcacctacctactgtctttatagctgaatcaaagcacctggcagttttatctatctcatcaactccctccacatggctttcttttatacttgtaatttctggaccacattttttaaaaataaaaacagtgtattctattccttctcctgccccaggaagtggaaagagcaacaaattaatagttagaaaaccgtgtttgagttcaaacttggccaccaatgtgccacacagaaaatcgttacctgtagcaaaggctgagcatccttgtgatggccatgtgcctgtcttcagcctggtactgacatccattacaaatccccatgcagcacccagtcctgtcaatcacccacaacaacctatcctgccccataaaataatcacagcacttttcttctgtatcaaagctgaatcctgtgaaggtcccgtcctctctctgggagacccgggattgaacccatcctgttccacatcaaccatctccaaaacaacagcccttggcatcgtgtctcctccagtattctttcaccctcatactgttttctctccccctgatctttcttccttcccattctttatctcaaacatttaacagtgccttctgaaatacccatgctatggtcaacaaatgcctcaatattctttatctcttgattaactcttccctacacctcttggctacattgggagcagaaaaggatgatgtttcggggatagaggacataggagtgcgaaggtcctaggttctaacttggatatatgagtgttcattttcttattcttttaatgtgtacatattcattacatatagcctttacatgcattatctgcttcctcattttaaaatattttataaaaacacaatctctgttcttttgaggcacatatcatttaaccataacgctcagtcccttttcatcagtcactgtcaattattggtcctgattgttctccctcatctattgctgcattgatagatcgtcttctccagcaagcacctactatcaatctggttgatttcaatactcaacacgtgacctgtccaacaaactagattctgagttccttgagctccttggttcaaagtcattttcttcttccctctctcagcctccctgaactgttcaaatcagtaatgtagaaaatctaccctctaactccaacactaccttccaagtgtttgcttcagtaatccgctttttacctgggctggactgtgagaccagctaagctgagttaagggaacttgtgttatatcaagcaatccctgtcctgccctaggaggcagaatcccacaatcctcactcatacagtcagttccagccgaggcctgaggagtccatcctcctgcaatgggagatgcagctcccagtgccaaggtgatatcagctgagaaacagaaggtccctgaaaggccactcaagtgacctcatgagtggctgcagtctaaatgttaaagaatttttttttttttttttgctgggttacttctatttggattggttgaacttatcaacaattgatatattttgtttggtgaggtaactgcaaatgcagctgcttccagggaagagttatagtactagttaacacacttatttttcacaattttaacttcaaaacataaattttgccataagtggtcaagtcagtgttgtaaacaatggcgttatctgatcaatcacacgtctctgattttaattcccaactcccatttaagttcagattctcttctcaaaattccatggggactgttttcacaactgcacagacaccttaagatccctatgtcccaagacagaggtcattatcttctccctcaaacctgctccccttccagaattctagagctcagtaaccagctgagcatatcagggtcatctttgattcctccttcttcctaatgtcccaaatccagtcaaataccaagtcccatccattttacctttttttgtaatttaatttatttatttagagacaggttcttgcctggtcatctaggctggggtgcagtggcatgatcacagctcattgcagccttgaactcctggcctcaagcaatcctcctcctgctttagcctcctgagtagctgggtatacaggcatgggccaccatacctggctaatttttaaaaaatttttctttatagagacggggcctctccatgttgcccaggttggccttgaaatcctgatctcaaatgattctcctgccttggcctcccaaagtgctaggatgacaggcatgagccaccatacccagctaattttttttttttttttagtacagatgggatctcactatattgcccaggctggtcccacattttaccttttagatatttttttaacacatctccaatgccaccatccttatccaggcattctttagctctcacttgtctatagcaacagcctccccatcagttccctgttcctatgcctgcctctctccaggacagttcttccatggaagtctaagcagtctgttcaaaattcatgtccctttcttgactcttaggatatagtcccaaatccctattggcttacaggaaagtccatgccctctcccacctactcttctggcatcctctactgcctcttgaccccctagttctctccactccaaccaggctgtagctcttcagtttctcaaacatgctatgccccttctcacatctggttctttgcacaagctgtccccctgcctggtatgccctccttccctttcattcagctaatgcatttatcctcttgtcttagctagtggacactgtctcagggatgcttccttgactttctagaaaaggttatgttaatttgcaatatgctctcatagcactctgaatttttttcattgctgaatttagttattcatatatttgtttatcccataaaaatatacaactactacatacccttaaaaattaaaattaatgccaggcgcggtggctcacacctgtaatcccagcactttgagaggctgaggtgggcggatcacaaggtcaggagatcgagaccatccaggctaacatggtgaaaccccatctctactaaaaatacaaaaacaaaattagccaggcgtggtggcgggcgcctgtagtcccagctacttgggaggctaaggcaggagaatggcgtgaacccaggaggtggagcttgcagtgagccgagattgcgccactgcactccagcctgggcgacagagcaagactccatctcaaaaaaaaaattaaataaaaattaaaaaaatattaaaattaaaaaataaaaatagaaaataaacataattatttaatgtttgccttctcccattagaatgcatgttccatgaggacattaatgtatctatgttgttcatggctatatcttcagtgccttgccaatgctcaacacatagtcaaatcttaataagtagttgctgcttaacctacagaatgggagaaaacttttgcaatctatccatctggcaaagggctaatattcagaatctacaaagaacttaatcaaatttacaagaagaaaacaaataaccccatcaagaagtgggcaaaggatatgaacagacaattctcaaaagaagacatttacgcagccaagaaacatgaaaaaaagctcatcatcactggtcattagagaaacgcaaatcaaaatcacaatgagataccatctcatgccagttagaatggcaatcattaaaaaagtcaggaaacaacagatgctggagaggatgtggagaaatagaaacgcttctaccctgttggtgggagtgtaaattagtccaactattgtgaaagacagtgtggcaattcctcaaggatctaaaaccagaaataccatttgacccagcaatcctatcactgggtatatacccaaaggattataaatcactctactataaagacacatgcacacatatgtttattgcagcactgttcacaatagtaaagacttggaaccaacccaaatgcccatcaataatagactggataaagaaaatgtggcacatatacaccatagaatactatgcagccataaaaaggatgagtgcatgtcctttgcagggacatggatgaagctggaaaccatcattctcagcaaactaacacaagaacagaaaaccaaataccgcatgttctcacttgtaagtgggagttgaacaatgagaacacatggacacagggaggggaaaatcatacaccagggcctgttggggggtggggggctaggggagggatagcattaggagaaatgcctaacgtagatggcgggttgatgggtgcagcaaaccaccatggcatgtgcatacctacgtaacaaacctgcacgttctgcacatgtatcccagaacttaaagtatatatatatatacactttatatatatatatatatatatatatatatatacactttatatatatatatatatatatatatatatacactttatatatatatatatatatatatatatacactttatatatatatatatatatactttatatatatatataaagttaaggatttcgtttcaatgtgcagctaaaacttaagcactaatagtcaattgtagctgtgttttcctaaagccctttgacctttattttccacttcacaaagtttgttacatatatgatgtattgccctctttctcttttccctcttcccagtgatgcatcacaaattattgcatttttattgggtgaggcccagctaatctctctgtttatagctctgacctttctgggtgcaaacacaaagtgaactttggtttatctcctgccataacgtagctgctaattactggcaagcaggctgtgttccacggcccatgtgaccagttgggcatgaccagagagaagcgtggggaagagtgggctgagggactccactagaggctgtccatctggattccctgcctccctaggagcccaacagagcaaagcaagtgggcacaaggagtatggttctaacgtgattggggtcatgaagacgttgctgttggacttggctttgtggtcactgctcttccagcccgggtggctgtcctttagttcccaggtgagtcagaactgccacaatggcagctatgaaatcagcgtcctgatgatgggcaactcagcctttgcagagcccctgaaaaacttggaagatgcggtgaatgaggggctggaaatagtgagaggacgtctgcaaaatgctggtaagaaaatgttaatagaatcttcctccactctgttactacctctggggacaaaatgttgctaagcaaagaccttgtgttctttgatcacacaactttctctaaggactgtccctaaacccctttctatttcatgacagtagctccttagagagaagaatttgaaccctattatgctgtgctcactcacacttcaccttgctctgggactagccctgactcaggaaatgtaaagtgttcacggcagtgaaacgtcccagttaaaactgggtttaggccagatgtggtggctcacgtctgtaatctcagcaatttaggaggccaaggaaggagggacactgagcccgggagttcaagaccagcctgggcaacatagcaagactccatctcttcaaaaagaaaataaataaaaataaactcagtttattgcccggttccaggaaggcattatgtttccttctgtactcagaggtaagatttggtctagacctaagatttcacagggatactaatcaagaagatgaattaagacagtcaatttcacatagacaccaaatctttctctgggccttttatccagagaaagacatttgtctctggcctgttcactcttttttttttttttttttttgagatggagtctcactctgtcacccaggctggagtgcagtggcacgatctcggctcactgcaagctctgcctcccaggttcacgccattctcctgcctcagcccc

SEQ ID NO: 5748 - DNA, 6000 bp, Homo sapiens
atgtggttacctatggtagggagatgcagctgagctacattcaattacaaaagataaaattcattagaatttagagatggattatgctcccgaggagttagctctctaaatgcataaggagatgcaaactaataaaaaaaaaaaaagcaaaaatattcaatcccttggttattgttatctgtaattgctaaatgaatgtacaagaatgctgggttgatccttaaggctggatcaggcccagaggtgggtctgtcccagctcaagccactagactccaagctacccacagaaagaaaaattaaaccagagcaacaaaagttacctctgagagctgtggttaccaagaagatagtcaatatgtgggaagggcaaaaccaagtaactattaaaaccagagggtataatgcaaagtaattgttccattttgtagatcaatataatcagcttcttgagaaaccttaactactttaaggaaagaatcctttattttgaaggctacaaaatgaaagagcttgtttgggttgatgcaggattcacaaatcactattaaattgctgatgagtatatgtgatccaaatgtatacgaggttattcataagagaacaacctgcctaactgactggataattgctactgtaaggtctgtttactctggaaatgggacttcccaaccatccctataaaatgccaagtggagcaccccagataatgtagttgatatgcttcatatgcaagccatgtgaaactgtctttataactgggatattctcccattgaatatgactagtatccagttcagtgccctgtaacctctcccctcccctttgctcactgtcctggagtggcactggcctctgaagtaattcttttttggtcttgggactagttcaggggaaactgggtgggggaaatccctcctgccctaagtgcagttggactgtacagaatactccaaaggccaatggtagttcagcacagaaagagggaaggcctccaagtcagaaagagctccagagacctcatggtattgtagggcagggtggtgggccaaggttaggacactgcataaaacaggcaatcccaccacctctacctgctcacgccaggagaatccataactgcctagaggcctgagacccctacaagtagtaaggtgaataggcatctatccagcctagcagtaggattgatgtctgtccagcctggaagaggggcactaggtgactccctccccttctgttgtaaatactataattatcagataatttaagttattctcatttgtaactgcatttctggttcaggccagagtcatttggtatttaaaaaaaagactgagtcctttccccatttctcttctctttcccatagattcctccacctttcaaactgttttgtatctatttcaaaggaagatatccctgagactgggtaatttataaagaaaaaggggtttaatggactcacagttccacatggttggggaggcctcacaattacgacggaaggtaaaggaggagcaaaggcatatcttacacggtggcaggcaagagagcatgtgcaggggaactgccttttataaaaccattagagcttgtgagacttattcactatcatgagaaaaacacagaaaaactcacccccatgtttcaattacctcccacaagttccctcccatgacacatggggattatgggagctacaattaaagatgagattttggtggggacacagcccaaccatataattctgcccatggctgctgccaaatctcatgtccgcacatttcaaaaccaatcatgccttcgcaacagtcccccaaagtcttaactcatttcagtattaacccaaaagtcctaacttaggagccatcaaaaaaaatcaaaagcaagttagttacttcctagatacaatggggatacaggcattgagtaaataaacccattccaaatgtgaaaaattaaccaaaatgaagaagatggaggccccatgcaagtttgaaatccagtgagcagtcaaaccttaaagctccaaaatgatctcctttgactgcgtgtctcacatccaggtcacactgatgcaagaggtgggttcccatggacttgggaagatccacccctgggactttgcagggtacagtgcccctctcctggctgctttcatgggatggtgttgagtgttctgtggcttttccaagtgcatggttcaagttgttgatggatctaccattctgggatctggaggatggtggccctcttctcacagctccaccaggcagttccccagtggagactctgtgtgggggcttcaaccctacatttcccttccacactgccctagcagaggttctccatgagggtcctgcctctgcagcatacctctgcctggacatccaggtgtttccatacatcctctgaaatctaggcagaggttcccaaacctcaattctttacttttatgcacctgcaggcccaaccaaagcttgagacttgcaccctctgaagcagtggcctgagtgtacattggctccttctgggtcccatggctgggacccagagcaccaagtccaaagactggacaagaaaaccattttttttcctcctaggcctctgggcctgtgatgggaggggctactgtggagacttctgacatgtccgggagacattttccccattgtctgggtgattaacatttggcttctcattacttacgcaagtttctgcagccatcttgaatttctcctcagaaaatgggtttttccttttttatcacatcatcagtctccaaattttcctaactttcatgctttgcttcccttttaaacataagttccaatttcaaaccatatctttgtgaattaataaaactgaatgctcttaagagcacccaagtcacttcttgaaagctttagtttgaaatttcttccaccagataccttaaattatgtctcttaagttcaaagttccactgatctctagtgcaggggcaaaatgctgccagtctttttactaaagcatagcaagaatcacctttgctccagttcccaataagttcctcatctccatctgagaacacctcagtctggactttattgtccatatcattatcagcattttggtcaaagccattcaacaagtctctaggaagtttcaaactttcccacatcttcctgtcttccgagcccttcaagcctgtaggaagctccaaactttcctacattttcctattttcttctgagccctccacactgttctaacctctgcctgttacccagttccaaagtcatttccacatttttgggtatctttacagcagcactccactctctgtaccaatttactgcattagtccatttcatactgctgtgaaaaaatacctgagactgggtaatttataaagaaaaagaggtttaatgaactcacagttccacatggctggggaagcctcacagtcatgatggaagatgcaggaggagcaaaggcatgtcttacatggtggcaagagagcatgtgccagggaactgccctttataaaaccatcagatcttgtgagacttattcactatcacagaacagcatgggaaaacccacccctatgatccaattacttcccagtgggtccctctcacagcatgtggggattatgggagctactattcaagatgagattttggtggggacacagccaaaccatatcacatggtaaatttggaggttaagtgctacatgggcactccaggtgacattactaccacagaatcacagactgatcaaatttgctgtcctcatgggtcttacagatgcttaataaaacactggggtaattaacaaagaataatgagaaaggcaaaagggagtcagaggactcaccccagagggtgattaaaatatttggacgttttataagaaatgaaataaataaaatgaaaattgatggggttgaaacaaaggtctttacaacactatcaagggttgagtggaccaaagggaacccctactgatcctccaacattaaagggccccatatcagttttctgcatttgccccagattggggaaattgaagaaacagcaaaaggcaaaggttataatgagggagctgaaattgcctggggcaaatctgaggcaaattaagatgaagattgaaaaaagagcccaagtcccttggctcaatcccttgctgggaactcaaatcatttttcaccagaaaaagtaaaatggtctgggggtagaaaagaaaagttcctcaaaccagaacataaaaatgtacaggttgataggattatgaaatttgagatgtctaaacagcctttatgtaaggtaattttaacttcttcacctaaatatcttgtgaaaattggtattgtatctgattgggggatgtttctcctatcaagtactatgaaactgaagtcatgtaaatgtgccctttgaggaatgttaattggacacactaaatggaaactagtaagattgcctgagcctacacaatgtagggtagaagctgaagggctagtagggacaaattctccacttcatatccatttgtggagcatttattagggcttatggtaaaagactgggagcacttcccaatgacaaatactagactagagaatttccagttgagggacatttactgccttgttatggaatgttaactgaagctacccctttgctaaaggaaataatggtaccccaaagagttccataataaagtaaaaattgtttgcataggatcttgctacctgaggatgcagaggagatacttatgagcagagagcattctttttcccctagggctgactctgactctgtaaggagctgctagattctacagtgcctggtaaacagctctcatataacaagaactgcttagcatgtgaatggcaattcaaggtgaacaaaggacatgttgtttggaaggctgatgctctggttaaagagtcaagagaatctttttcttttaaattatttattctttagagcaattgggtgaagtatgtttttatgagcaaatttacctttctctccaagttctcccaaatttggaaaccgtgagtattctggttttatgacaatatagttatttgcataagtttagtaagagtcttttgttttataacaggacaattggagacactgattattttaccaagtctttgactagaataacatatttgcaggtaaatttccagcaaagccaacttaaaaagagcctatatggtcagtcaatttcttgctgcactttatgcaaataatcaggccaagtataataagcctaaaacttatttttacacacaaactggtcttactataatttctctttaatagaaaaggagggctagagagagagaaaaattgtttcaaaggaaaaatttaacacttgttactggatttcagccctgacttttgtttttgaatgcagattgaatcatgaattatttcttggctataataatcctctaaagagatagcggattatagtttttctttacatttttagttgaatccctaatgagatagcttccattttccattctgacacacaaatactcttttgattgtcaaaatattaatgttatttatctctccttggtttacttccaaggaaactggaatgatggtattctcaagactagagatgcaaatctctctcatttgtcatcccactgagcccgatctgtttttcactgcaaatgcccttctgttaagactatacaagcaccctccctctaggcctaaggactgttgtggaagaggtgggtgtgtgagattgtaagggctaggtttgaggaagtgaattagttcagatcatccaaaccaaggatgggtacacgatgcctaaacagctggtaaaacaaagttttttgccctctgagctattatgaggcatcttttcatccagcccaaccatgaagaatgtcatgctatttgtagaattaaaagaaaataactactgagaggataaagataccttgtgacaaagccttctggatata

SEQ ID NO: 5749 - DNA, 6000 bp, Homo sapiens
tgggcatgtgcagagtgttcgcagaactggggtccgaggtgcatgtgtgtgcagagaaattgtggctctgtgttccagagcagtcatggggttgggggtaggggtggcagccctggtctctggtcaacacaaaagcacatccttttagacagtacgcagcaatgtttccctctcctggagatctatggtgggatggctgttggttacctcagtggcaaaagctactgatgtcctctgtagagtaggccaatggggtcagtgccaacaaacactatggggttttctgctgtgggggttgttgaggtcctcagtggctaagactaccaaggtcctttagaggataggccactgtggatcatgatgggacccaacatatggctgatacacataactcatccctgtttgtttaatctttgtttatggccatctgcagacattgctaagccaatctcccaagtgacttttttttttccactgtgttcttgcttactggatttttgagccctcctaggtctatttttgtttgtggatagctgtctaattgttgtgttttgtggaagtataaaggctggcatctcctactttgtcgtcttgctaatgtcacccctaatatgcctattttaaagtcaactagttagtaaccctaattacatctacaaaattccttttgtcttgtaacataatgtaatcacgggagtaacaccaggagtaaatgtcatgggagccaccttagagttgtgcctaccatgaaaaaatatataaatgaccagtaacaccatgaaaatatgtgttcaaaatcattcgttataaggtagatgcaaattaaaaccacaatcaagaaccagtccacatgcaatataagggctaaaatttagaaaaagaacaagataatactaaatattggcaagattgtgaagcaagtgccatacttttctggagggaatgtaaaatgtttcaatgactttgaagaacattttggtaatttctgtaaagttaaatgtatagttaccatatgactcagcaaatctactgcttaatatttacccaagaggaaaaaaaaaacaaaacacctatgtttacaaaacggttcaccgaaacttcattcatcactgcccaaaactggaaataacccaaacgtatacagataggtgaacgaataaacaaactgcatattcatacagtgaaattctactcagcaataaaaggaataaactattcatatatacaacaacatggatgaatctcaaaaatattatgcttacctaaagaagccagacacaagggagtatgtactgtatgactccttttatatgacatttgtgaactaatctccagtgatagacttcaggtcacttgttaccctaagtgagagacagttagactgactagttaaaggcacaagataacttccttgggagatagaaatactttgtatctttttgggatcatggttatttcaaaagactttggattttacatgtatcatggatactttttatttcatgaaaattatacttacaatgttgatttaaaaatatattgtatatatttctgaaagaaacaatggtttatcttcttgtattatttaacacttctggaatgtatttaatgaagattagagataaaatgcaaacaagctgtaagtattttaaaatggaagggtaccactatttgcagatgaaatcgtatttctggaaagtcaaggtaacagggtgaaatagctctgggattactgagaagtcttaataaagtgtctggatataagataaatatactttttttggacaaaataaatagtacatccttaatagcagtacaaaatattaaaacaaaaatatgaaatttgtatgatcaatctttacaaaatatgcacagacctgtataaatttaatactgggataaaaggaagacaaataaatgggaaactacatttctgggtgaagagacaaagcactaaaaatatgttctttataaattacttcctagttttaatgaaattccaataaaatccccaaaagagaggagctttgaaaattttgaaaagagtgaaaaggggactggcactgtcagggttacaatataatttaatctctgataatcaaatcagtctaatcatagcaatataataaaaaattgaaacagatcaattgaacagaataggtagcccggaaacagatcttattatgaactaattatgtgtatatgacaaaagtggtattacaccacaatgcagaagaaaaagattattcagtaaatggtgttggtgtaacaaataaagtataaatgcagattttcatcccatagtgtatgccaaaataaattccaaaatcaaatttttactaaagcctttaaacaaatataaatgaaggtaaatatttattaactaaagtgttctaatacattgcaaaggcaacaagcagcaaatttgcctacgtaaaatttcccttaggagaaagttcaatgaagtgcaatagaccctagagatctgactcatcactagcttctatgtctagcacatagtgtgtgctctaataaatctttacagaacacatgaaaacttttttcttacttttttgaaaggcagcagcactatcattttttaacaatatgacaaattgggaaaaatgtgtcatatatgaagcaggattagtatcctcttattaaacatttgattagtatactcttatgaaacatttatacaaatggtaaacttcattaagacccatgaggtacacaagtatgtgaacaaactgccacaaaagaggggatacaaagattaatcaatagtggggaaatgttgaatgtgaataacagaattgaatattatctgtcaagttaaaatatttttttaaaataaaaaatagcaatatccaatgctggtttgagtataagtgtaatagctcatctcatacaatttgggggacttaatacgaacttcatagaagggtgattttgcattctatgttgacagccttaaaaatatctaccacttttgatcccgtaattatttttcacataatttatcttaaaacattacttgttagaaagaaaaaaagtttatgaaaaaaggtcatcatatgatcacagatattagtaaaattgggcaaatacatgtcaaacaacgggaaaatgaatcttatggtatagcctttcaatggaatagtatatagccatttaaattattttaaaaattattctatatttatttaaattatttatctttattgtcccattaaacagaggaggaagctgatacacagagggtttatgtgacttgttcagtctctgaactaactagcaggatgtgatatcgagcaggctgccttcctagtccacactcttaatcaatgcaccataccgcctgtgtttgttaaaacataaaaaaaaatgttttcagtagttttatgggtgtgtgtgcacaggtgcatctacggggggctccttgatctcctctgtacactttcacatcttccaaagtttctacaataagcatgatttttaaacattgtaaatgaccttaatgaattgtaatattcttttataatcctcaagtaaacttcattttgtgtagtcacactcaagagttttcatcttgggattattggcaccccctatttccagttctctctccatagatgccctggagagcctctggcctcgcgtccagcttgctcacccggccaccctgggctgcatccatagtaccaggatcctcactgttgaaacgctctcttatttccctgcgccgctgcagacagctccagggtaaagttgtcaagcgttcaaaggccacaggaacggagtcttcggaccctcccaggtttcggccccatatggcctcgcagattcctagcggccgcgggttcaagtcccagccgctgacgcaggtcaggcactcacccggaagcgcagcgaccttcccaagagtggggcgccggcggagaaatcccctgggactggcagggctggagtcggcctgcatcgcacaggccacgaggccaccggtgtttagggttcagatctggggaccagcgccagcagaccgcagtcctgcagcggcgccccttgaggacggcatgcggagcctcaggggcagaagtccgcccggctgaccatcctttattaaaatacgacagttcctgaaaacaatgcttatctcaagctgactcaaaactggctcttgagaaaatccggtgttaattaaagagggttgtcggggacaaaattcacggcttgtgtttcgcgggggagtggttgtggggtgatcttaatataaacacgttatctcgagagttaattatgtctctggttggaaacaggagaagagggtgactgtttacgcagtccatgggaatcagcgtctcactttaggggacggtgggcaagggtcgcccttcgatagcgcggcggctggtccaccagagaaaccaagttttctaggtcgccggggaaaagcggaaaattagacttgagccagccttgctcctgtgagacattcgtgcactcataacccagcagtgggtgcctctacctagaatgagcccttcatttcccggatccgttcagggggaaacagcgaaatccccaaatccgcttccttacgtggctaataaaggggtgcttacagagcatggaaaaacaaaacaaagaaacaagaataccttgagtgttttgacgtttgaaaacccgactccggagaatcatggaatcatattccaagtttcagtgtctaatgaagtttaaggggacgcctattacttgggtttgtaaaatcgcggcgtcgcgcccgccccaagtcaaagctgagcagagcagggatggggaaggtctccggccccaggcgcggcgcgcggggcttctgcccagtttcctgcttctcagccgcggtgtctgccccggcccagagcagtctgtgcaatttagaaactcgataggaggcagcagctggtctcccaccaccctaaaaataatccgttccggcgcactgcgtgcttcgcctaggggaggaaaactgtcatcggagtaagtgaatccgtgtcttttacatgaatgccatttaaacatttttaggaataactgtaagttgtcgattttgagctaacatttctgctatccaaaaacgccctcgcactctctcgcacttctcggcacttagctttcgcgatcgctatttctagaattaagggacgaggcccggctcgagaagtgaaggggtggggatcaggtttccagttttacttcaaaactgccgtctcctactcaaatcaactggaaacagtgaaaggagttattattattaggagttattattaccgcctttcttgtagacaattcttgtatgttcaagaagtagttttctatctgcttaatttttgttactctttacttttttttaggagttctgcgtccgggtttgaaatttacatcttaagacagtgtaggaagtcggtgttttgaaggtagctcaagtgcaccggcaggggtttgaagcagcgtgaagctattgcccaaggtatttattttttgctttatttgttcagtttgggattttttttaaaatcccattgcagtatctaaggaatacctactgagtaatttcaacatttcttttggtgtgggatggtacttcacagccactgaagagtaaatgggtggattcagatcaggcactaagtcagaagtcagtggtcatttttgccagtgattttcccacttggatctgtcatagttatagccatggtagctagctaactagctatacatcttctagtttttatttcatgaactagggactgaataacttcaaagaagtgattacagcatttgtttttgcaagtgacatccatcctgaaaatgctctagatgatgataaagccctaagttctttaaaatgtcctgcttctctttcataacagaatttggttaatctctaaacgattaaagaatgaatccttttatatgtaagaatgaaaacttttatttaaatttagcatgttttct

SEQ ID NO: 5750 - DNA, 6000 bp, Homo sapiens
tgtccatttctccattttggaggagaggggaattgccttgtaactttagttctttattgagcccaagtaaagttgttgattttcagctttcttgctttaaataaatctaatcccaacataatttccaatcttttgcatgcattttcttctttaaacttccattattttctgtttcttattttctaaaatttcagtgttatatacctttggtgtaggtttaaaaaattcattttattgagtccttaatgaactcttaaattttaggattctttttagtatgtctttgaaaatctgctttttgtttcttgttgtttggatatttattttttctttgagcctataatttattatcttgtttaccctcttttatatttttggcctactttctgggatatttctttaactttgtaattcaacttttctatgaattctgttatatattttgttaccatattttaagtttcaaaggactttatttttagtcatctgaacattccttttgttcttgcttcattggattgtgtctcagtccatgtgagaatattaattatggtttttattgaagatttcttatgtttcctgcattatcattttttcctagagttgatttctgtgtgtgatcatttgcttgttttgtctctactttcatgttggagactctcttcaaatgtctagggatccttgactctcccctcatatttaagaaggaggcctgaaaaagaggccacgaaactcggtgtaggcagagcttatacactaatgggtctcactagagggtgttagacagggatttggccattcgattggagatctcttaaacatatcagaatctgtaggtcttctcttttgtgctggtcagtctctagagatttaacctcccgttttaagccagttggggaataagatctagatgtttcaactgctcctttttaaagatttccaacaaacctcttagtttgtttcattcattacctccatctccagaggtcctaggtgccttcgtttctgagcctttcaagaactctctagtataaattagcttgattcttgttggcttctctctatgctcctcaattttctgtgcacgtggacacacacacacacacacacacacacacacacacacacacacacacacacacagagttacttgaaggcccagacctttctctctcctgataagtcagttaacacttgtttaattgctttcctgcttgtgaactttttgacatcctttgtctgcttttgtattccttcgttttttcttgttcttctgaatctttttcacttttactcctttactcttcttttagtgaggtcacaatagggagtggagataaataaatgcatttattcagataaactatatttataacctttctcaatctacaaccttatttaccttggtgttgtaattggttgtgaaacaggcatcattttatgcttttgactggccattccaagccattctgacaagaagaacttgagcagagactgaagattggccttttaaaattttatctcaaatcactgacaattctgtttaatctggactcctgcctttacatttttctactacacatttatagagttttaaaagttgtttagtccctgaggaaatcctgtttgtgtccgctaagcatactcagatgcagaagtataaaagaatacctaagctacttactataagtcatacaaacaagatggctaaatatcaattaaaatattttatttaaaacattaaaacttgggggttcatacttttccttaaacagtgatgccttggcaatagactgaataagtttgaggatctcattataaaaccaagcaacaattatttgttgaagtgcctgagttgatacctggaggaacatgaagaaaatgtgaaatattgttcttgctcttctcctagacacttagccatgccctgtggagtcctaatttgatcaaaagcacaggcttttcatttgatacataaaactaaatccccttcctgcctagttggtgagacatagttatatatgaaaaatactagcaatacaagacaacacaacacaactaagtgtttaatcatcagtcagagccagcaaatactatgacatcagaacaggaggtcaaagagagtagaagcagataccacaaatatttattgagttctcataaagtctgtgttttaggtgtcctgggaacacattattgaatgagaactttctagataacttggcttggtcttgaataatgcactggatttatacatggggagaaaaagaaaacaaaaacaaacacacatcacatgagcggatcacaacactgtgacagaactgagacctgtgtgtgatatagtttggctctgtgtccccacccaaatcttatcttgaattgtaatctccgtaacccccctgtgtccagggtgggacctggtgagaggtgattggatcgtgggggctgtttcccccaggctgttctcatgatagcgagttctcacgagatctgatggttttataagtgtttgacagttcatcctacacacacattctccctcttgcctgccaccaagtaagacatgccactttgccttccaccaggattgtaagtttcctgaggcctcctcagccatgtggaactgtgagtcaattaaacctctttcctttacaaattacccagtctcagtggtattctttatagtaatgtgagaacggaccaatgtagtgtgacttggaagggtgagagcgatgacctgattagatttggtgctcatgttaagaaaaagcagggaataagtttggattgttgggtgggcagaagcccaccaaggtaagagaattcttagtttgcagaagaaagaaaaacagcacattgtgtcacacagatcttttgatgtaaagcatgactttaatgcattcttatgatattatatagggaaacatttacatagccccttcataactgtaatatgccctagttttgtttgtcagtttatttctttgttatttactctacaaatagtccttgaacttgaggaagaaaaatgggaatggtttgtgttttacttaaattataagatcaaagatggcagatgatttatccaaagcccaggcaagtaggaaaagctcccccttcccttccccttttccaggatagaagagagttggctggttactttgcaggacttaagatgatcttcattttaaagaatctgtatcagcctccactgtggtaagatgtgactgggatttcaaggtttcccctgtctctactgatttacctaagtaggacagagatttctggggcatgcctgccggtggagggcagtaggtcactcaactaagagcacagtattgttgagaaaatgacactaaagtggtcatctgggatgctacttcgcttttggtaaataactttgcatcaacttctcaagttccacctctcagtggagacggatgctagacaaaggtaccagacaccgcagcctggtcggctgaacaaatggagttatagccttagattttgttttcgtgatgactaagctgaccaggtttcttctttgtccttgcacactttatgcttgacgagatgcttaagcaaatagaataggcgaccgctaggaggtacccgagctatgcgtcggccgccggggcgagcagaaatggctaacagcgactctctcggctcggtgggtcaaggcgggtggtgcttttccaaggtcggggttgcgataagcttatcgcttatcacaagcaagaagggcaagaaggacgtctaagaaccaacggtcctttaatctaaaaggccgcgcgcctccaaggcaatgtgacatcttgaggtctagtgtttgggcaccagctgcctgcacatctggatgcagcacttcctttcagggaggaggcgaggcggaggaccccggagtgcacgcacctcctcgtgcgcgcgctcgcttgcgcccgtgaacgtgtgtgtgtgtgtgtgtgtgtgtgtgtgtgtgtgtgtgtgtgcgggcgcgcgcgcacacacacgggccgcggctccgggaccggctaatgggggtgggggcccaggaaggaataaatctccgccagcctcctcgcgcctggctgcgggttaatatccaaccagctagagaaagactagggtgacggcagcagggtgacagcctgggcacaccggccgcttgtcgaaggatcaggatattagccagtctccgccacactcagggactgatatatttctattggcggggggctgttggtttttattgtctgccgttatctccaaagaacaagggcacgagtgaggggtgcgcgctctgggcgagtgtcgcggctcggatcgggtcgaaggaggcaattttgcgggtgggggagggagggggagaccttgatttccaccaatccccgggcgtttgtctgcgaagtccggggcgcagcggaaggctgcggcgcgccgctgaattaactgatgagagcgagttcttttcttctccgggaggggtggggagcgagggtcccggcgggcgaggcggaggagcccggggcaggatagcggtcccgggccgccgtggaaatttccaaggacttggtgcggcgcagagagcgcgtctcggggcggggtgggggggggggggttgcctggcggcgcagcagcgcgggaggcggcgaagggcgcaggagcatcgctcggaggggacaaggggacgccacgggccacatgtttaggagggagccgagccttctcccggaccctcgccgagggcgaccgtgatgctgcagaaccggcgggagcgactcgccgccgccgctctctgcgcactcggagaccccagcgcccgccttctgcaggggaagcgaccatggccatagatcgtgacttcacccccagccacttcccctagaaagaaatccttggaaaagttgcatttgaaaaaatccttgcgctgacctttggggccgacggggccgaagaagcgtgcgtgcgtttgcaagtaagagaaccaaaggtgtgtgtgcatggggggctggcggtgggggaccctccgctgccacttcgcctagctttgtgctgaggccccggcccccgcccctgggacgccggggctgcgatgagcccctgcgggcgggcccggcgacaaacgtccagaggggccatggctgtactggcgtggaagttcccgcggacccggctgcccatgggagccagtgccctctgtgtcgtggtcctctgttggctctacatcttccccgtctaccggctgcccaacgagaaagagatcgtgcagggggtgctgcaacagggcacggcgtggaggaggaaccagaccgcggccagagcgttcaggtactcctgccctcgcggctcctcccctctagcgtcctttcctccccgagtgcagaggacagggtcaccggcgaggaccgccttgcaccgtctcgcagaggcatccctttcatccgctcttccatgtcctttccctccatttgtgccattcccaacctggagactttagtcagggttccttccccacccctgatccccagagatgtgcagacacctgctttgcgcatgtaaagactcgacgcatttcttcccaaagcggagttttatttaacaatttacggataaacaaaacagagggaaggagaacccaggataacttagtctcttgcacttaataagaatttacctcttgggctctgcagacatttgaagctgtagggaacaagaagcaggtaaaaggcatctccccgaggtggagtgcacagtcggtaacataagtccccaacgtcggagtgatgggcagtggaaacatggacggatcccgcagctttgcgcagtgtgcccacagcaagtgcatagtactgactgacgtctactaagagacgatactgtgcaatttttgtgttgaaatctcgaacagctgtctagtattattatctcatcttgttgaccacaaattgattctttagaaggatgagtaacttccccaaggtcattacttttgacctg

SEQ ID NO: 5751 - DNA, 6000 bp, Homo sapiens
tcacacctgcaatcctagcactttgggaggatgaggcaggcagatcacttgagcccaagagttcgagatcagcctgggcaacatggggagacctcatctctactaaaatataaaaattagccagatgtggtggtgtgcgcctgcagtcccagctattcaggaggctaaggttggaggatcacctgagcctgggaggttgaggctgtggtgaactgtgatcttgccaccgcactgtagcctgggtaacagagtgggaccctggcccaaaggaaaaaaaaaaatcaaagcaaaagtaactgaactgagcccaagttgtcatttgtataattatacttgtaatcccagcccactttcaaacttaaatcagtgagtttctggcttgagcaattgactatgtagttggcattgctgtttagtagaagactaccaggtcttttgttgttgttgttgtcattctcgttgttgtagttatgggaaaggtaaagaaaatcaggtcagttttggacatcttgacttttgaggtcacttttggacatcttgacttttgaggtcactttgatactccaaatggaaatagtaacttggcagttgcatatatgggtcaagatcccagaagcgagttacagactaaagataacgatttgagagtccctgactaaacagatggaaattaaaattgtgagcttggatgagatcacctagggagacagtacagttggaagagaatagagacaaaaactgaacctgagaaaaacacatatttaatagttaaggacaatgagtaggctgagaagacagatgtataaaccagaataggtaagagaagcttggtttctgaataccaagaggaagattattttaaggacagcgtggtcaacagcatcaaatgctactgagagtcacgtaaataaaaaactgaagccaggcatggtggcacgtgcctgtagtctcagcaacttgggagcctgaggcagaaggactgcatgaacccaagggtttgagaccagtctgggcaacacagcaagaccccatctcaaaaataaaaacttaaaactaaaaaaagtgttcattgcatttagcaaccagaggttattgatggcattagtgaaagctgtttttgtagagtggtggtggctaaacccagatattaatagtttttggagcgcttaggaagtgaggagagggcaccaagtactgacaacccttgagtaatttaacctgaaagaatgggaaagattaacaggaacattttaggaagccaggaaagaagagcaatctaagtagtaatagcaagtgttaactgttaatttaattccacaataatttgttgatcacatgaagggcacaggacaaagaactgagaattgagagatgagtgagaagcaatccattccctcagagtgctcatggtttagtgggggttgggggggagagagatggataaataattattgcatggaaagtataataacaaatgtattagatttagtagtagcataggtgggagtgaagagcatatttattaggaaggagattagagaagatgtagaagtgacttttgtaaaaggcaaaagatttatacactctaaagagaaaccagagtattgacttttgaactgagttatgaattcatagctatttggtaggatgactatgagagagatactccaggaagaaggaaaagtatagtttattagaaaactacatgtaatcttcaaagacgtgagttcttggaatcacattgtctagatttaaaacctgcctctatcattagaagctttgtgaccttgggtaatcaccagagctttgaaaagccataattttctcatttataaaatgaaggctgataattcctacctcaggattttagggagccttaacagctgtgaaacgctgaattcagtagctggtgtgcggcaaaccatcaatacacgttaattcttgttattgataatttaaaatgcaaaaagagtgtcagggtatgaagctaaacaaggtaatcaggagtcacatcatggtagatttgtcagaaagttagcactgttcccagcattaatgaaaacaaacgagaacaattattaggaaacagttcaactgaagtcaggcttaaatctactaaaaatagttttcaggaagcatcttaattataatctcttgttgatgaagcctaaggcaacaagtacgtacaagtacctcaaagtctactaattaggaggctgagattgctaacctctaattgtgcaatttgcaactttttacattttggaacacaatgcattattttccattaatattggtgctaaacttcaattttctaatattttttctttatacatttcatattttaaaaaatgagttggtaatacggtaatacttcgatttcaccacaaaaacgacttcaactctaccacccaaaacaacaaaaaacactgatcatgccgggcaagatggctcatgcctgtaatcccaccactttgtgaggtcaaggcaggaggatggcttaaaccaggattgagaccagcctgggcaatacagggagactccatctcttcaaaaaatttaaaaaactagcggtgcatggtggtatgtgcttgtagtcccaggaacttggggggctgaggtgggaggatcgcttggcccagaagattgaggctgtagtgagctatgatcatgtcactgcactccagtgtgggacacagagtgagtccctgtctctaaataaataaataaataaaaaacgttgatcacatagtgtagccaaccttcagaattctggcaagggtattttaagggcagagtcagactccagaaaaagctgcaggtggacctaaggaaattcgcatgggatctatgacccctattcctttgacatagtttgaattgataaaagtttctctagtccaaaaagcaagcgatttttttagatttttattttgaggaagtcgttttctctgtaggagttcaatttctcacttatgtgaacaatattcctgccatagaaggaatttttgtcatgaaaagataattcgggatcactactgtttggagtatttactctattgagtattttcgaagttaaaaagatcatacggatatcttcacttaggaatgaaatgttacaatctttgagccggcatgaactctgattttgttgatactgggtatactgtcaatgctgattttgatatttggtaaggactgatttatttacatcttgtgtgtgcctcaatttccctaatatggtctgagcctgtagataacaccttactttatttatagttgggtcaattcttcaagatgtttaacgctctccatgtttatttcttgtggttgactatactttccatggtaggaagtcctgaacttctgctactactgtaggtcttatctttaggcttgtggatgcttaataagaacactgagatgatctaagagtgcaggacatttaattaaaaaaaaattttttttaagagacagagttttgctctgttgcccaggttggggtgcagtggtgagatggcagctcactgcagcctcaaactcctgggctcaagcaattctcccagattctcccacctcagcttcctaggtagctgagaccacagacgagccaccggcccagctaatttttgcatttcttgtaaagaaggggtcttactgtgttgcctcgtctccatgaggctggtctcgaactcctggactcaatcgatcctcccacctcagcctcccacagtgctgggattacaaatctgagccaccacacctaccagcagaaactttttttcaagaggagactttggatttcaaggtgacctcccccaccccgcccacagtaatatctgtgacccagtgcacaacacaagtgcctatgactgaataaaatatttcactaaatatttatttcactattcgagatgtgcctggtatctctatttctttctttcttttttttctttttttggagacagaggagtgatctcggctcactgcaacctccgcctcgcaggttcaagcgattttcctgcctcagcctcctgagtagctggaattagaggcgctcgccacgacgcccagctaatttttgtatttttagtagagacggggtttcgccatgttgtccaggctggtcttgaactcctgacctcaggtgatccgcccgcctcggccacccaaagtgctgggattacagacgtgagccactgtgcctggccatctaactctatttcacagaaaactggaaccaccacacgcacctgtaccccttccaagtagaaaccagctaatttggttttacgaatcactaaaggccgactgaaaacgctcttctagcagtcttcgctgctactccatctatcacagcccatccgaaaagcggcggtagcagctgggaaggccgcggccggaggctgtcacagagcagcactcgcgcttcggcccgcaagatggagcgtttccctccagggaagcagcgccgcacctatccacagcccccactcggtggatgatgcaggactcggcccatttccctgccctccagctttctcaacgtcagccccgcccccttatctttcctcggcgagtttagtttcgccccgccaagtgggcagagcgccgaacgatcgatgctttcttccgcgccccgagagccgccatttttgagagcgggggaggagagacaagcaggggcggcagaggctcaacgggatgctgactgggttttgcttttcgtcccagccttgtggggccgggacggaagaacccatcaaagcccttcctcccgccgcctctccggaatgaggtctcagcacccgcgcgggacagcacccttcctcctgcgacagtgagtggcgacccgtggcgcgactgccgggcgcccgcgcgcgcccccgcgcgctccttcgctgtcagttaccccgcgcgcctccgcccctctcccgccggccccgcgctcggcgcagactcgtttgtttgtttctgcaggagcccaagaagaggccgaaaccgagaccatgccagggaagctgaaggtgaaaatcgtggccgggcgccatttgccagtgatggaccgtgctagtgacctgactgatgccttcgtggaggttggtgcagggtcctgcccctcaaaacacagggagcgccaagccctgtgaaggatctacccacctcgcccccagcccctcagcctattcccccctcgactgccctcccttcggccgtggttgtccagctctcccacgagggatgaccgccgagacctcagtgtgtgcgatgggtgcacggcttgcaggcgtccgcggcacagtccgctgcgcggggaggcttgtactgttgtgcatgcgggggtgaccctgatgtcaggactcattaacaggccacctgccactcaggagatcccaaggcgtggccgcgcagccaccgacacactcacacacatacacacacacacacacaaatgccggaatgactctgatgtcaggactcattaacaggccacctgccactcaggagatcccaaggtgtggccccgcagccactgaaacacacacacacacaggcacacacacacccttggaaggggtggccagagtgctggacatcatgtttaagaaggtgcatgaagccctttatgggcacttggagtcccacagtgcgaggaaatccactctcatgcctaacattttgtgaatctgccatgcacgttctaaaacacaactgcaacacttcctgctcttgtataggctggtaggtctgatgaggtgtttcagggtaatttagcgccttgaggtaggaagtcatttaattgccatggacttaaattgcaaaattgctttttaagtctaatgattagtttaaaagtcatgcaaattagtaaaggcctacggccggaaggtaataacccagagtctgaaagaagccaagtaaagattgtaataaaaattggcgtgatgagccagagcattagagcagcaatcatttgggctattagtgcttagaattgat

SEQ ID NO: 5752 - DNA, 6000 bp, Homo sapiens
tttgtatttttagaagagatggggtttcaccatgttggccaggctggtctcgaactccctacctcaggtgatctgcccgccttggcctcccaaattgctgggattacaggcgtgagccaccgcacccggtcatgtgtgtgtatttttaataaccaaaaatgacaatgactctaaatctaagagctctccttgaaatattattaaaagacagaacatgtagatttgatagaacatttccctttgttgaaagggaatgatttaaaaccccatattttatttgcacctcatgaagcagactgctcaataaaccagttactattaaaaattatatttaggccaggcgcagtggctcatgtctgtaatcccagcactttgggaggctgaggtgggcaaatcacctgaggtcaggagttcgagaccagcctggccaacatgatgaaaccccatctctactaaaaatacaaaaattagccaggcgtggtggcaggtgcctgtaatcccagctactcaggaggctgaggtaggagaattgcttgaacccaggaggcagaggttgcagtgagccgagatcgtgccactgcactccagcctcggtaacaaagagcaaaactccatctcaaaaaaagattatatttattacaaggcagggaataagaaaagggattcacaaaacactcagttgacagataatagattgcaaaccctttcacttctagtgttgatctgaggatatccaagtgaacactgaatgtaaattaccctgaaaacatctccgctagaagaacttgttactgaaaccttatttttaatataggcaatcctttgggagtaaacatttcaaatattacatcctgctctatttattatctctccctatgggttttttagggcatgataacttgggcttttgctgaagtgactcatagtctcagcacaggagactttttgaatatcatttggtggactgttctcatcatccaaagtaataaacatatttaagcattcaaaaattctaaattatttattatttcatttatctaccaaatatttattgaagtcataaatgggtactgctagtccccatgaggggtaaaacatgaattagacactgttctcattttcaggatgtttctagtttggtaagactcaagatgtacagatataacaagaaggcaaggtggaaagtgttgagaggtaccttaaaaggtatgtgcccttagaccaggcaactgagtccctgacctgggctctgagttttacaggatcttctggattaaggggacacgctcaccagaagcctgaacttcctcctctagcttctaaactgtgtcctgagtgtccaagatcccagaatctcatacataaattcatttccccaagtatagagacagaagctggaaacgtgggccaactctctctacactacaccaccttttacagtttattagttaattagcaacctttaatatttagactacgtaataagggcctctgatactctcggcatggaaacccacaaatgttagggggcaagttggcctggctatgggaattcaggaggaggcagaactttgccttggcagtatataggaagttccactggggaaggagaacttgggcatgcagaggtgggagaagggagaagaggaacttctggaagagggaacatcacactcaaagacatgagactaaaagtgccaggttacatgtgaaaagtctggctttcctggataccaggaatggaagggcagaaactcaggttgtaaaaggagaaggagaccagatcatggatggtgtggaatacaggacatggtgagtgagggtttggcaaactgtctcatattcttagtataggagagtctatttagagtgactgacgttcacatctaacactcacatcagcaggtaggccttactgtagacaataagctgtcattggaggtttgagcagttttgatgagatcaactttgtaagtataaagctctggcttgctatgggatagcaagtgggagagactggaagggtggaaacaggcaactgtgtagaagagggcaatgatataggagaaggtgaaaaagagacatatttgagataatagaaaggaagaactaggtagagaaacaaataaaaagtgatcccaagactttgtatgaatcccttggccaccccttaggccacctctctgtggccagctaaccatctttgccatgccaacacagaagagtgaccagctccagtccccagactatattggatacctctgtgggtgttgagtggtgggtggtagggacagggtgaagaggaaggaagacattggatttgggtacatggtttgaagtttgcacctgttcattagcataaacaaccactacttattttgtgtgtgttgtccgcagatagtttgtgacttgaaacaaagattattcacaattttgatcaataatttgggtacacggtttgaagtttgcacctgttcattagcataaacaaccactactcattttgttttgtttttcgagatggagtttcgctcttgttgcccaggctggaatgcaatggcgcgatctcggctcactgcaacttccacctcccagaatcaagcaattctcctgcctcagcctcccaagtagctgggattacaggcacccaccaccacacccagctaacgtttttgtatttttagtagagacggggtttcaccatgttggccaggctggtctcaaactcctgagctcaggtgatccccccacctctgcctcccaaagtgcttggattacaggcgtgagccaccgtgcctggccaaccactactcattttgtatgtgttggccacagatagtttgtgacttaaaacaaagatcattcatgactttgatcaataattgagcatccactggatgtatagcacagtagtgccgtgcaatatggggaacaatacaatgtaatgcacagatctcttggataaacagaaacttccatttccagggtcactatgttgttctgtctcagctttttaataactcctatgcccaatgtcttggtggcccccaacagtgatataatgtgtgtagacagagaagggctggattatgtaacaggcatttctaagttgtcaagtaactttttacaaagaaggacacataaaaggagatctgtcagctgcatgctattacaatgactgggtccagtttatctcaacacacacaggctttgcactggtgtttcctggattcagtgtctattcccttctatctagcaggctttttaaacacaaacttttgtttttttgagacggagtcttgctctgtcgcccaggttggagtgcagtggcgccatctctgctcactgcaacctctgcctcccagcttcaagcaattctcctgcctcagcctccagagtagctgggattataggcctgtgccaccacgtccggctaatttttgtatttttagtagagatggggtttcgccatgttggccaagctggtcttgaactcctgaccccaagtgatcctcccgcctcagtctctcaaagtgctgggattacaggcgtgagtcgctgcgcctggccttttgaattctgggctaattctttcattttctattatgtgattataagtctcaatctaaaccatctttgaactgtaagacatgtaagacatctgactgtaagttacattttggtcagttgcacaatttgacacaacatgcttctgcacaccccaagttcctctgcctttctacaaactttgctctgtggggattacttatgtagcacttttaaattaggtggctggtatcaaaaccgccatacagtttgcctccactgtgtcttctagaagggaagagcaaaaggcttttaaaatcatgttctaagaagagggctacagaagcaacagagaaggcgtggaaaagtgtctagctgcgttttgcttataacggctggagctttaagagtcagcagctttaaacgtaaacaagccagggttgtcttgagccggggaccttgggctgatgggggtggaaggttaacctcggcttggagttaacgaagcgcaggaggcgcggcctcggaggcttaaagctcagctccactgagccctcaccgctgaaggttggctacaaaaactggcttggccaagtgacgtttacctccttggaggctcgcgtccacctggacatcagcggacgggtcgagtttcattaacgccgcgtacttgagaaaagaagaggaaaaagaccacccaaactacataacgaaatcgagatcatcctccttccctcactctcttccttcctctcttctactttcttcatcatgcatttattttttatttgtatttttttcctttacttcaacgcctacctcttccttggccagcaaattacccaccccgctggggctccaccttttcatctccagcagttcgggggctctctccattgtgctcgggtcctacagtgcgctcgcccggccgccacctctcaccctccctgcccccatcaagcttcttcgagttcccaggcagcgactgtcgcgccccaggtccggcctctccagggcggccgcacgcgcccgctcccccgccggggtcccccgccgcccctccagcgccgcccagcgtcgcgtccccgcgcgggccggtgcggcggcagcagaggcttcccgggtggcccggcctcccgagggtcgccccgccccggcccagctccgcccccggccgctgctccctgattggccgcccccccacctctccagggctcctctcctcctcctcgcccaatgggcaccggcacctggtccaaaaattcccctgaggggaccgagggggctcggccacttccagctcccgccgggcggctgtgacggccgcagcgggtcgcagagcagggagtggacacggagtggggagcggagagggaaggaggaggaggaggagcaaaggtgttggagagaaaacttcagaaaggaacaggaaacctgccggggaggcggcggcggctgcggcttctctgggcgcctgggctgcgctcttcgcggggtgtccgcagctgcggcttggccccggtctggcttccccggcgcgcacgcacggctgagccgcgacgctcagtggctcgggccgtgccctccgccgcggctcttggccgctgtagtcccgcgatccgatccgcttctgccgcggcggctccctggagagagggcggcgagggcgcagggaagaagagggacgtccactgtggaacatgaagcagcatgactgagaaaatgtccagcttcctctacataggggacatcgtgtccctgtacgcggagggctcggtcaacggcttcatcagcaccttggggtaagcgggagacgagggctgggcagcgctcgcgctccgggtcctgggaaccagtccctgtccctcctccgccgcccggtcctcccgctgccgcgcgtggtggcccggccgggcagggtcggcgcccgcggacagcgccgtgcgctccgctctctcgctcgcccgctcgcaggaagctgccctgagaggcaagactttctcagcaacttcgtaatctcaagctcagagacacatcagaaaggaggaagtgattcagaagcccggagacgggcccggcgaagaggtcttcgctggcttctccctgggttgttttgattaaaatgtgtgcttgttttccctggaaggtaaaacaaaacaccccccttttccaccgtttctcgctaccgtcctcagcccctggtctctcagtgccgggtttgaaagagcagtcgataaaagtccgtggccttggacatgaaactcaagcgatgtggtgagccaaagtgtggcgttgtcctgcgggaggagctcaccgtcccctcttcgctggagcagtttccttttggccttgccgaaccaggactcgccccactggcctgggcagccctaggggcatctgcagcgctgtggcccttggacgtctctgagggcttcctgggttctagaactcaga

SEQ ID NO: 5753 - DNA, 6000 bp, Homo sapiens
cacgctaattcacccaccagtccatgggctacttgcaggcagaaaacatattctgtttccatatttccagtacctagcacctaacttttagcctggcacatatttatcaaccaaatgaatgagtttcctagcataataatttccatataatagctactaaacaagcatttactgaatttaacttaatgaacaaagaatgtaaattactacccacaaaagagcataagaattaaaaaatacaggatgaaggtgagattagagtgggaaagaatgaatgggcaaatttcacagaggttcaatcctgccttttccctggatccccactcccagctccatttaaggtattttaggttttatttaaaaagctagggtaagttttttcccttcctccttctctccctcctgcccttccttcctcttctaaattttaacagacttttgttttattagatacagggtcttgctctgtcacccaggctggagtacagtggcataatcatggctcgctgcaaactcaaactcctaggctcgaacaattctccagcctcagccacctgtgtatctaggactacagatgtgccccaccatgcccagctaatttttttttctggttgtgtgtgtgtgtgtgtgtatgtgtgtgtgtaagaatggggatctcactatgttgcctgggctgatcttgaactcctggtctccagagatcctcctgccttggtctgctaaagtactgggattacaggtatgagccactgcgcctggcctaaacagactttaagcctctaatgatgcatatcttggatttgggaatctttcagtttctgcatttcctttcaatacataggaaaaatgaactaatctgcaaagctgctaagcttgtttgcttctcagctctccaatggaactctgacatgagcatggaaccccagccaatcatcctcccaagctgtcacaatactgtacttagaagccaaggtaatgaggccctgttctgattgctgacacatttgtcatcaactgtcatgcatgcacaggcaactgcaggcctggggaactgcgatgcaaaggtatggaggagagagaataggctcagttcaggaaattgaaattaattcaatgtggccagcatgtagaggtctgattttagttgcagcaagaacctagggaggtgagcaggagttgcatcacaaaaagcatttatgtgtcatactcaggaaggtggacttatatcttgaatgcttttataagaaaacctttaaaattatatgtatcttttacaaaatcataatttcttatttaaaaatgatacacttcaatgtagaacttttacacagaaatgtgcaaaggaaatcattcttaatttaaccacctaaagataactattttaaacattttggcatatatttttcaacctttttttctatgtacataaccaggaatgcatactacaaagaaaacaaggcaggcacagtggtgtgagcctgtagtagtcccagttagtctggaggctgaggtggcaggattgcttgagtctggtgacagaccaggagcaccgtcatctcggacaaacaccgccactttaagttccagctccctttctagcctcatgcatttcaaggaaatcacttctcttctaactataagcagccagaaagagcagacagtaaaacacagataagacagctcaggcacaaagggaggtggggggaaattctcttgggtaactgccaaacttcaccctcatacaatgggccccagtaaaacagtgggccttagtaagtacattcctttcccttcaggtgcactaagatagggaagctaaaagcagactcgggggtatgcctgcagctgcaaaaagatgtatgggaacagacacacaactctccctcccagataagcacaacagacacagaagcagtccaagcctctgataaactctcccaccctaaatccttaaaaactcttattagtccgtaagagagtgtgcctctaacctaactggccagaagcccctttcaggtttgttttctctaaaataaacttgtccttgacttctaagccacctttcctgtttctttcttctttaattcttacatctgggagtttaaggccagcctgggtaacatagtgagatcttgtctcttaaaaaaaaattacaggccgggtgtggtggctcacgcctgtaatcccagcacttcaggaggccgaggtgggcagatcacaaggtcaggatttccaaaccagcctggccaacgtggtgaaaccccatctctactaaaaaaaaatacaaaaattagccgggcatggtggtgtgtgcctgtaatcccagctacttgggaggcggaggcaggagaattgcttgaacccgggaggcagaggttgcagtgagccaagattgcaccactgcactctagcctgggggacagaacaagactccatttaaaaaaacaaacaaacaacaaaagtatccattcctctgagtcaataaaagatgtatgttaaaaaaaaaaaaaagccacgtactatatatacttattgcatcataacttgccttttcataaagacttcaatcagaatataaatgaagggctgcacaggatcctcttataaagctctatcataggttatttaactcctaattgttgggcatttaggttgttttagatgtttctgctactctaaataatactctatgaatagttctgtacactatttttttttaagagatggggtctcactatgttgcccaggctggagggcagtggctattcacaggtgcaatcatacagcactgccctcttgaactcctgggctcaagtaatcctcctgcctcagccccctgagtatctgggactacaggcgcataccacttcccccagcttatactaatttttatatgtgtatttaattatgtacttaaatctaaaagtggattataccaaatctacaaaaataagatttttaaacatttttgatgccgattactttattaaagtgtatattcccagtatccctacctaagaatgcctccttcttagctcttttatccacactggatgttttatacttttaaaatgtttacatcttagtttgttaatttgatttttttatttgtttactagtgagattgaacttttttcatgtatttactggtaatttgtatttcttttttggggtgaaattccccattcatgtcctttgctaattttttttttttggtcaacttgccttttcatattgtttgtgtgtttactttaataaaatttaaatatttatgtaaaaagcatttacgtagccaagtctaccaatcttttcctttatggttgtttcctttgctgttttgcttcttagaaagctcctcccattttgagatcaatttattaaaaaaaaaaaagagcgccctcttctgctagctcttttatggttttattactttgggattttgttttcacaattagtgtgagatagagttctgcttctctctgcccatagtgcagctaatcagttaagaacacaatttattgaataatccatccactgattcagatgctacccttatcataattgtccctttcatcttccttggatttcatctactgagggttataggaataggggcatgtgggagagtgaataagcactacagaaatagatagtgctaccaaaggtgtgaaaatttggaccaggcagtgggaaagcagagaaagaattgtgcctatgacaaagattatttgcttggccaaactctagtacggcttctgaatcttctgctaggtccatctgtgcacttctttgtaaaaatccagttttagcaaagaaccccctttcctccatatctaatcagttttctcaccctgcaccatcccccaggtgatgttatgtcttcagaagtcctgttaggtcagtttcaccaaatgccccttacctctgatgcttcctcttagtaattttccatccactgaactccatactgctggttggctataaattccctcttgcccacgctgtattcggagttgagcccagtccctcttccccactgcaagacccagttgcagtggtccctatgccaattgagacagtcctcaatagtcttcgttcggtgctttaacaagtatcattgaataattttgtctttaacacttcttcacattatggtcacagctatatattgttagcttagtagtggactaactgaacatgtaatttccaagctataagttgctcatcaaaatatataagtgaaaaaaattaaaaccagggaaggaaagcaagacaatcctccccaaataacgttaagtctatgcgtctaattccacatcatcgatgagccatctgtcacatggactactgtccctcaaacagcactcaggtatgagacttgagacgaagttcagaccaaggccgtgtcttcgaggatatttcgcttagagaaaacgaaactacttttaaatgtagtgcttatgactagtgcggtaaccactacacaaacagcattctcctggcatttttatgctaacataagcctcagcagcgaagacaattgctaccgggggaaataaccttcaattgtgtttttagcaactgattcctcttttttgctgttgtaaagggccgttaaacacggaaacaggagcctggcgacgttagtccgcaacagaaagttattttgtactttcacagtgggtttgcctacttggtgagataaaagtggggcaagaccgggcctcaagccaggacttcctgggggctcccgggagcaccgcaggctgcgcgttccccgcgcgccggcaggaggcgcgcgctgcctggaaacgccccagcgccgcccgcgcccagagacccgccgctgtgacgcagcgagagcccgggaggaggcgcgggaacgcgcgttgggggtcaggtgccggaagaggaaacctctcgctggggctaggagttcggcggggcgcgcgccggcggctgcggagctggcaggtgcgaagcgtctgcacctggcgggcgatggcgcccgatgcgggcgccccgggatagcgtgggcgaggctgcggggccccggcgcgcacgcccgcacctctccccagccctggcgtgggcccagcccggcccaggcagcaatggggttcctgcagctgctggtcgtagcggtgctggcatccgaacaccgggtggctggtgcagccgaggtcttcgggaattccagcgagggtaaggtcggggcgcctggcttctgcaacccaaagttgcttttgcatttcttgcgaggtcaaaatccgccaggggtctgtcagcctagcagggagatggtgctgggggcgttggtacacgctgggtggtgagtccagaaccggcacgaatggtgtttcctgcagcggaaacactcatggctaaggaggtcttactattaacctcctcatttagcggaggaaatgggaagagataaataattctctttttttaacacagtattatctcccttagggagcagccatgtttgtggctttaattcaacttactaaagcgcctctttgctgcccagtggactgtctgagcttctggacagcaagacttggggtggaactagcggcttaatgactgatggctctcaagctgcatggaatttttacacccccaaatctagaggcttttcaaactggttatgttctacagagtttgagagggaaaatgaacccataatgaggctttatttttaaagagcctttaccatctaatttattaataccatctggagacaggaaaacattccatactcacaatgagaaataaaggactttctgaattacagatacatagacatacagatagaatgtgtataccctcaattctacaagttcagccacaaatgaaaaataaacacagaaacacaaaagcttgccagtccaggtatcagagttgttctccttacttgagggcaagaaatttctaatcgatttgaccttaaaaaagacaaatggacaaaaactgtgttctctgttgtctcat

SEQ ID NO: 5754 - DNA, 6000 bp, Homo sapiens
gaaattgaggatgaaaagaaagtacacagtcaactcagaaaacaataaagaagatagacagaagtcaggtcaggtaaggctttacagaccacactgaaggtattcaataaatctaaagcacagttggaagccactggaaagttttaaatagtggcacaatgagaattgcctttttaaacagctaaatatgataaattaagaatttgtgtgcttgtgttcctgctcctgaaatgacactgcaatgagagtaaagctataaaaggctataaacccaaaagaacaaaaagactaaaaagaaaaaaaagacaaaagatgttaataggtttagaagatggaagctggtgaagaagcagtcactgacttgctaagcagagagagcttaaacctctagaggcagacagcaatgagaagctagtgattcaccccagagagacccagaaaaaaaaacagagatggaaacacctcatattcattctgcagaaggtgggggtaagacaagaggctaaaaaggcaggggttgggggtcaatgtaattcttaagatgtcttgaagctcaagtctccacccacacatctttaattattacccttcgccaaattgcaaataaaagaggtttgttttatgctttgttttgcccagaaatattaaccttgaaaggctctagatgctggacaccagacccaaaagaggacagagtcgggcgacagactgaagaaggaggattaagtaaaagcaggcagattttaattactaccttacatccctggtgagagactagatagtccctctctgaaaagaattgaatcactccagagaataaagctgttgataacggatatttggggtgttccaattaaaagtacaactcagttctgaattgcccttcagtgatgctcattgtttctgtgtcttaccgatgcacttggtcctgcaaatccatattacagtgtttttaaatggagatccagggatcagcagacacctgagaaaaaaatcctccaacataaagaacagaacaacaacaacaaaaaaagagttattcagagaaaaagatgacaagactaaaacgagggtgaaagcgtgttaaatatacataattaatatggtcagacaaataagaaaagattttcattcatgaaataagaaaaaagaatcactaagccaaaaagtatacagatcttagaactataaaagatgaaatcatagtagtttaatagaaagctcagagaacaaggtcaaaggaaatctccccaaaattaaagcacaaggagtaaggtgacaaaattggaaaatagaagagaagtgaaaattggcgattcagtcctagcagtcaaaaatccaacaaaaaagtagttctagtaagggactgcacagaaaaaaaatggaagttagaacattactgaaggaataaatcaatagaattcttggaattgaagaactcaacattgagtctcagattgaaatgctcactgggtatccatcaggaaaaatgaacaaattgaacataatggaaaaagagaagacaccaaatcttccagagtgatgaattgggttgtattaaaaggatctggagggtcggggacagtggctcatgcctgtaatcctagcactttgggaggccgaggtggcctgatcacctgaggtcaggagtttaggaccagcctggccaacatggtgaaaccccacctctactgaaaatacaaaaaaattagacgggcatggtggcgggcgcctgtaatcccaactactctggaggctgaggcagaagaatggcttgaaccggggaagcagaggttgcagtgagccgagatcgcaccattgtactccagcctaggcaacaagagcgaaactccgtctcaaaaaaaaaaaaaaaaaaaaaaaaagaaaagaaaagaaaagaaaagaaaaggatctggagtcagaactggacttctcatttcttctgtgcaagccagaagtttggtcatcatgatcaccagttggcagtgagtggcaattccattttctgaattgaggaatacgggaccagccccaagtgtatacagaaagttacaactggtctgttatgaatctgagctgccaatagaatacagaaaaggaaagtagtaacacttgaagtaagttcaaatttaataattttctgtgatcttcattcagctgctctgagatttcttcatttacctactctcttagttcctgttttggaggtcaaataatatttaaaattatagtgttagagtgattcccaagttccccttaccgtagagagatctctgcctaacaagctaactctccctcccccacgatatgaacgagaaagggcaagaaggaattgaaagaggattgagcaagtagggaaatcagagttttgaatgtttaaaattgtcacttaacaggtatgcttagttcacacgggtttttcctgggctccttatttccaaaccaatccctcctctacataacgtagaggtcatccagaaggaagctgtgacagagatcattacagctagtatttttttgactaacaatggctactatagtactcagcacagccaacaatgctcagtaaatatcagtctaacctgcactcctctccttttactatttcaccaattccttcagagtgtgagtggggaagtaaatgcaaatctgtattgcttgatttactttttaggttcttggtagctgaaatagttggaaaaaaaatttaaagactgaaaattgaaattcttgtcatcttatccttcagcattgaaaaagatgaccttcaatgcagtttttactttgcccaaaattcttacctgagcttttagttagtgacaaacaaaactgttttgattcacctgctaatgagctgcgagatggtccaaagaacaaagaaaaaaatcaaaacctgtgatattcattttagatgaaagaaaatttttttcagagaaatgaattcagaaaaacgaatatccaagtgaaattaactctgcttgttgtgaaaacacagcagtaagagtagcaacaggccaggaacagcataaacaaataccaggaaagttattttcagaatttgtttacctaatgtttaacactgaaatcaaacacaagagggtcattagggagaccttctgcattactccacttaagcaattagaatctgtaagtagtataaagataattactcatttggtcctcctacacagcaattagttcatatggtaaatatgaaagtacagcattgcattgcaggctgttttctaccggtctgtctgtgtagactgtagcagaatggggggcaaaaggcaattggaaagggccttattaaagtgtgttatttagttttgtgcatacagtagatgtttaatattttttgattgacagtgaaattatttctttagacaatttgacttaaaaaccacccaagtcagtgtgcataaagacaaaaaccaaatgaagcctgcagattttagtttgtcttaattcgtggtaaaaatagtcctagttaaaccaatcgtcctatggatcaggtcaaaatgattcaactaatgaatgcttccctactggagtgctatgcctaatatttatactaggtttaccatagtcctgtgcaaagcaaataatttaccatgaactgattagctgtttttaaaaaagactacttattctactagcatagacacgctaacaagttcaatgtatcccacttcaaaaataaagaatccctcatcacaagagggttaaatcaatcctcaggttatgatatgggatcaaactctgcccgaaaacagtttaaaaaccatataaacatattatatcctgaagcccatgtttattattttgtcgctttagttctactgatttgcacccatttgcattaaagaattataaaaacaggtgagcttaagacatccgagtccaaatctcccattttacagactcaggcaaagacccgaaagcaggccggccgtggtggctagtgccagcattttgggaagctaaggcggtaggattgattgagcccaggagttcgagaccagccagggcaccatagtgagatccttgtctttacaataagtttaaaaaaaaaaaatagcgcctggagtccctggagtcctagctactagggaggctgaagtaggaggatcgccaagacctgaaaacaacttcaaggttaggctgagatgtgtgacagatttgaacttaatcctgttccctttaacacccatgtcttgttttaagtcgctaagaaaggagatggagggagtcaagttgtgcattctcaatcgccaattacggattaatcgacagaatcttatctgattattagtacaaataacattttattttgtgatctacctaagagggtttgcttattcacgcattcttttttctaattaactttttcagtttttcttcgattgggatgacttttccagaagggcagaagcagatagcacagaaagtagaatacatccgtggaaaagttggagagacaaaggcggcggggatggctgcactgatgcagggaaaagtattgggaaaacggagagggctcctcgggccaactctgggcaacgatgagcatccccggcctcggcaggggcgccgggccgcccgccctccctccctccctccctcgcgagtcccttcttcagaggacgcggggagccgggtctgcgcgctccgccgcctgtcacctagcgcccgcgccgggctgcgattggacgcgtcgccgccaggcacccgccagaaacaccagtgcgctggggagaggaggggggcgtgcttgcgagtcgagggcttgctttggcttttttacggctcccccctcccctcagcactccatgccgggtctctagttccagcgcgcctcggctcgctcgcgcggcgggagagttggcgcaaacctcgcggcagccgcagcctcctcgcgcgcctctccttcccctacgccctccgctcccgccatggggccaacgtggggctcctaagagttgccggctctcagcggcgcaatctccagccaaagtcaccgcgggcggactatggcttagggcgccagaggggttagaggtacgggaagaggaaaagacggctaactgggaaaaaaagagaaaacgaaagaaaagccaaacgatgagtttccacaaggaggacggagtgaacagtctgtgccagaaggctctgcacatcgtcaccgagctgtgcttcgccggccaggtggagtgggagaagtgctcgggcatcttccctcgggacaggggcagccagggcggaagcagcacaggtaaccgggagggctccgctcgcgtcctcgcgctccgctgggaccccgcgcgctaggctgcaagctccggggttctgcgcctcccgcgccgctcccgcggcatatttggggcgccacgctttcctacctcgctccttccttcgctcagctcctgacgacttcgagggtggggcgtttgggttttgtttcctcctgtccacctgccgggcttctcccattctctggtccgcttcccgcctcccggcgccgtctcccgctcccagcctcgccgcgcctctccgcgttctcccacgcctcccatctccctcccggagtggagaagtgagtgcgggcggtgacggcgccgggacggctcgcggcttggctgcttgtgggggcggctcacctgtgggactagggctgctctcgctcgttccaccggccgctggtcccggccttgttgatgggggccaggcgggacggacaagccatgcttggacgcagaactcccttgcagaggtggctgccttggcctccgaggtaacccgcggctgcaacctgtcgggcacctgacaatttctaaagcccttttaatatatatgattttctagggtttcatgacaaagttggtaaaacaaggattattgatcccatttgtgaggcgacacctaaagctcagagcacatatcgaagaagtggaagagaggggagacgtttaaaatccctagcacacgcacgctctcaga

SEQ ID NO: 5755 - DNA, 6000 bp, Homo sapiens
acaatttgatatataataatcgattttttgttaagtcattggaaaatagtacttagaataggattatgtcccagggtagatatcttgtttaatcacaaaaatcctgttttttatgacaaaattcaccaaggtgtatctaaaattgaattagaccaagtgaattcagcatttccgagaatatcagactttgacatggagttgttttttcagtaacaaaaccatacaggcaaggaagaagcaatggccctgtgtatcagcctttcctactttcaacattttaaaacatattgactaaattaactgaaaggggaaataatttgctaagggattaactctttttttctttattgtgagtaaagggacataaggagaggttgaccaagttgttgggtaaagaactaagagctggcactccatttgtgggagccaaaaattaaaacaattgaactaacggagatagagactagagtgatggttaccagaggctggcagtgggggatggggaagtgggaatggttaatgggtagaaaaatatatttagatagaatgaataacatctagttttgatagcacaacaggatgattacagttaacatttattatacattttaaactaaccaaaagagaataattggaatgtttataacacaaagaaataataaatgcctgaagtgatggatacttcatttaccttgaaagattattatacatcttatgcctgtatcaaaatatttcatgtaccccataaacatattcacctactatatacccattaaaattaaaaagaaaaatacataaaaattttaataagaactgagagctggatgggccatctcttcccccttactagagtcacttctttccttccagtcacagggaggcagtgaattaggctaaggaaagattaacctatgagatacatgttcagacaagatatttactgggttttccttcacagaaaaagacatttccttatgaactaggtattaggtagttatgtgtaatagctgaaatgttgacctaaaatctcattttcagtgctgtttatgcctccatgagtaagactagcatgactgatagataataagagagtccaatgctgtgctattttagggccagtagagcaattaggtaatctcttgggtcaggaaacagttcaagaaagcaatacagcacagatgaaatactattaagcatttgttgaaaaggaaatccattcgaaattctcaaaccttaaacaatttatctttacctatttctaaaaattatttactttctggatattcataatctgaacatgcaacacatatacaatatacattatacatacatttatgtatatacatatatataattctctttattacaaaaaaatttctgatgttttacagttcataaaacatatatagtctctaatttgtattctatatatataaactccatttaattcatttctttcatggatattggtagggtacatgagaatatcacacttgagagcacagtgatttgagaattattgattttaaaaattattctcattgtttctcaagatcttttctaagaagatttctcccctcttaagaaaattttaataatctcccatataaacacacttgaagttgagacgtttgtgtggaaattaggcctaagtatgttttttactacagtaacaaagatttttttctcctctttcctagtttggaattcaaactaaattaacagtctcttagctttaattgcatactgtcaatagaaaaaaactgaaagaaggccgggcgcggtggctcacgcctgtgatcccagcactttgggaggccgacgggggtggatcacctgaggtcaggagttcgagaccagcctgaccaacgtagcaaaacctcatctctactaaaaatacaaaaattagctgggcgtggtggtgggcacctgcagtcccagctacttgagagactgaggcaggagaatcacttgaacctgggaggcagaggtggcagtgagcctagattgtgccattgcactccagcctgggcaacagagtgaggctccatccccctcaaaaaaagaaagaaagaaagaaaagaaaaagaaaaaactgaaagaagtaccttgacattcttagttttttacttaaatgccatatattattgacctaattgtccatatggcttcctgtcttcttgaatccttcctctgccttatctgaaggcttgtgtctagtctcagacactaggaccaactcttacccttgagagcagggagaggtgaatggtgggagtgaaatttaagtggttagagttaggtcttcacctaagtggctcaatatcaaatcaaatttcacgttgacattttccacacttcaagtaactcactttcaaccttccttgtaccacgattcaggtaacaaaatttctgtcttgatcattttcctcataaataattcttcattctcacaagtctctcactccagatgctgaaagcttgttcctgcactataacctcattatcagttggtaaactgacctacctccagctaagtcctatttgaatctctagtgtcctttgcttctagagttctcactgccatgctcctcccctaatatggctgtctctggttgtatgtattgcaaaccacttgcctcgactgccagctgctgtctgcatccttctgtgtaccatgttctgcctaacaacatcctgccatcacccccagttaggtttactctggcctttaacctgtcctgtcactgctaacccttttgtgtgtagctgttaggagatgtgacataaatgaaaggcaaccttatcttgcatacaacaaaagcaagagcttaggaataaaagattttggcaataacttccatgaccactattatctgtacatacaggcttaaaaagtcttaatgggatgatggattatgctactaatatggccagctatcaaaaaaacttgcatgagtttgacactcatgtgtcagtcagtctgctgaattgaatgcaaacaaatgaagagatatgtgatgattgtcagaattaatatgagtacataagaaagaagttttaaaattttaagaatatggttacttatgaaagtgaggatagttctttgtgataaactcagtaatgaagatcatttaatgctgagatgggttttatattctagcacagaggtttgcaaacttctataaagggccaaatagtacatattttagtctttgttgcatccaccactgtggcttgaaagaagccatagacagagagtaaatgaatgggtgtgactgttttccaataaaactttatttataaacacaaaaatgagaattttatataattttcacaggacaaaatattcttgttttgaagtattttcaaccactttaaaaatgtaaaaatcattcctagcttaagggtcatataaaattaagtggcaggctagatttggcccaccagttgtaatttgccaacttctgttctagcttgatgcatattttcctaagcttttaattgactggaaatgtgtatgtatgttgggggccagctgctggtgaacaaaactggctgtagctactgagcatactcagtgtcacttagaaatccccagaagtttcagaatatatatcacttttgtaagatttcagtagataccacaagcagaagagcaagcagaaagggagatttccgagaattttaatgagatggggggcggggacagtgaagagcaaaaaaaatggtttttccatatccaaaaatatactcagccctgacttaaaaaatgctcttggctgggcgtggtggcccacgtctataatccgagcactttgggaggctaaggcaggtggatcacttgaggccaggaggttgagaccagcctggcaaacatggcaaaacccatctctactaaaactacagaaattagccaagtatggtaggcgcaccctcgtaatcccagctactcgggctgctgaggcaccaacctgggaggcggaggctgcagtgagctgagatcgtgccactgcactccagcctgggtgacagagagagactctgtctcataaaaaaaaaaaaaaaaaaaaaaaaaaaagctttttacattttcaaaaatatgcagaattgtccttgactgttgaacaatttaaatcctccattatggatgtgaagaattttaagactcttagtttttatcaaataaccaaatggaaataggaagtagccagtagattatctctacagctaaacaaaacaaacaaagcagaaacctgcaaaagacaaagcattcttgaaaaatgaagtaaggtcctagagaagctatttccaccatccaacaccagctgaattcccaaatggttaaactttcactataagtgctaccccactccaagtaaaaactacctaacacatgggagtagtaaacatgaaacattgctctcatttatttaatagtcgtcaccttgtaaataaatatgagtacatcagatctccagttatggggctggaagatttttagcataaggacaagtaggatgcagaggaaaaagggagaatggctagaggcatagcaaataattattttctgtaacacggaagacttttatcctatttatttacaagggaaaccctcgattacaacttgtctattaggttctgagaccttttgtgaaatcagacccccaaaaaagccggggggatctgtgaaaaacagatccaagtgtatttgatatttggcattctccggtgtccctcccacttgtcactttcttttctgatccgtttcagattcattccatatccttttcatattcattttatgttgatcctcttgtccctcctccctcattttcgtggttccttctccctcctcgtctcattaaaactcttgcaaatctccctttctgcttgctcttctgtttgcggtagctgctgaaatcttaccgaagtgatgtatattctgaaacttctgcgggtttctaagtgacattgagcatgctcagtagctagggccggttttgttcgcttggaaatctccctttctgcttgctcttctgtttgcggtatctactgaaatcttaccgaagtgatgtatattctgaaacttctgtgggtttctaagtgacactgagcatgctcagtagctagagccggttttgttcgccagcagatggcctgattcgacctctccaaaaatagacattttaactctctgaactcctgtttaaggaaggatgtaattcgctttgctctctcctcattttcaaggttcaaagggaagctgcgaggattccaaggtcccaccgccctcacagccaatgaggggcctgggagggaggagcttggtgcagcttgagcttctgagagaatcattcccggtagatgcagcggagtctgagctctgctgcatctgtcacagcagaacaaaattaaaaacacaacagtggaagagaaacgctgcagactatgggacgctgtaggactttctaaaacatttgctggggatttctgtgaagcatgatcttttaaaacgaattcttttggaagccggtttgggtaactgggaaaatgacacatatgctaaatgcagcagctgatcgagtgaaatggaccagatcgagtgctgctaagagggctgcctgcctggtggctgcggcatatgctctgaaaaccctctatcccatcattggcaagcgtttaaagcaatctggccacgggaagaaaaaagcagcagcttaccctgctgcagagaacacagaaatactgcattgcaccgagaccatttgtgaaaaaccttcgcctggagtgaatgcagatttcttcaaacagctactagaacttcggaaaattttgtttccaaaacttgtgaccactgaaacagggtggctctgcctgcactcagtggctctaatctcaagaacctttctttctatctatgtggctggtctggatggaaaaatcgtgaaaagcattgtggaaaagaagcctcggactttcatcatcaaattaatcaag

SEQ ID NO: 5756 - DNA, 6000 bp, Homo sapiens
tcttgtgcttcctgctccttgtctctctgtagtggcagatctagacagggcactggccattggggtatgctgaccatcttttcttatttccctccattcttgtctccttcctttcagctttttcctcctcctccttacagcaagtcaaagaaaggttcttgtgggaagtactaaatacccaagtatcttatacttcataactaagccataggacccatactttacctttgtacttattaataatacagtatctttcttctgatgctgctattgcttattatacatacagagatgaggaataatcaaaatgatgggattctggcattactaggcttcatgaaggtaataccatcaaaataacattttgattcttcacagtcaccgttcattgactttctcttttttttttttttttttttttgagacagagtctctctgttgcccaggctgtagtgcagtggtgcaatcttgactcactgcaacctctgcctcctgggttcaaatgattctcctacctcagtctcccaagtagctgggattacagggatgcgccaccacacccagctaatttttatatttttagtagagatggggtttcacaatgttggccaggctggtcttgaactcctcacctcagatgatccacttacctcggtctcccaaagtgctggtattacaagcatgagccactgcatctggtctttcattgactttctataataaaattcaaagattttccatgagttttcattctctttgatctctgtgtaatataattgattctcttagccagttcttccttcttgaaatggtttacttggcttttatgccatgttaacttactaattacttatggcaactcaaatatattggttttattgccagcatttattcgcctgacttctggcaaaatagcacatcacatttcttatgggaaaacctcctatagtctaagcccatgtaatttaccttcactcacagctcatgatgtgggtgttgattggccccagcctgatcaccaaactgtaatctcccagctgcagtaactggggcaggaatggtaccacaactgacaaatccaattacatacaatataagtttgctagggctttggagaaagaggctctttttctgtcctttcagacatgagtggaaaaggatattatattaggctgttcttgctataaagaaatatctgagactggatattttataagaaaagaggtttaattggctcacagttctgcaggctgtacagaaagcacagcactggcatctgtttctggaaagatctcaggaagcttacaatcatggcggaaggcaaagggggagcaggcacatcacacggtgaaagcaaaggaccagatctcctgtgaactcaaaaggagctcatttatcgccaaggagatgacccaagccattcatttgggatccacccccaggatctaaactagtcttgtcaggcctcaacttcaacacgggggattacatctcaacatgcgattttgatggggacaaatatccaaactatctcaggtatagggcttggagtttgctacagccctttgagcaccacataaaatttaagaatggagcctaaggagtaggaagcagagtggagaaatggacgtctgtgtgacatcctggtgtttttagtcctttatccaactgcacttgacgccaacttattagagagttttcagagacaatagacaataagtactccctctttcccattattttggcttaaaccagtttgatctcgattctctatctcttgcatccaaaacaattcaaaaacaaacaaataaaacaacaatatatatatatgtattttaccatgtacatacatatgcatataaattcatagagaaagttctggaaagatatatttcaaagtggtagaggtggttatctctggccaaaggggtctgttatggtgggaaagacgattgagaaggggcttttcgcctttctttattgttagactgctttggaacatgttactggaggttgtaaagcaaatatcctcaaagctggaactatagaactcactgcaaaccaataatgactcttgtaattaaatttgccctgcaatagcaattaattatatttcaaaaataccctttaacactctcgtcaatgagtagttgctgcaccattatctgctcttcaaatgagagaaaaaaaaaaaaagcaaagcacaagctaatcttgtggtttgtggaaagttttacggtaaaacaatggtggtgttgacattcatctcttttgattctcagcccatgggttttccagttcatcataaaccgcagctggggccgactttggggaactccatattagactcacgcgctgatgctaagttgaactggactccctctcaaggctgagacgaattctgtttaactctccgaagctttttttttttttttgagatggaatctcgctctgtcgcccaggctggattgcagtggcacgatctcggctcactgcaacctccgcctcctgggttcaagcaatactctgcctcagcctcccgagttgctgggattacagacgcgtgccgccatgcccggctaacttttgtatttttagtagagacagggtttcaccacgttggccaggctggtcttgaactcctgaccccgtaatccacccgcctcagcctcccaaagtgctgtgattacaggcgtgagccaccgcgcccggcctccgatgccttttttttcacgtcacatttcttttaaaatgtaacctgaccgcagatacataactgtcctaatacggaacagaatttttaaagtagtttcttgttctatgaccccaaagctgaatttcaagcaaggaatgctcaggaaccaagatgttcactgcaccagctgagacaaaaagtagtttattttcatctcagcaagagggaactgtcaaagaaccagatgcttctcatctgcggagcccttctcttcagaagccgtgggaattggctcaccaccagggggcgcagttttactataccgtagcatgccgcggaaaaggcgcgctctcacctgcaatattgtccgaggtctgaatattaaagagttcattgctgcagatctaaaggctctctctgtttaactgatgcctgggaatgacggtagagccttgctttaaagccagacgataacatttaaatagttaagccgtctggcttcattagtttatttttccttgttgctggcaaggaaagtactatattgtagagataatcgtgactgataatcaaaacgaaagcagttttgacaaattctaatataagtttttactgaaacaggaatgacaaaatccttttgtctgaaaggaaaaaagttatagctgcatgaaaaataggccccaggctaagaaagcttttgctcaaataagggaaataaaagagcagtggaattgtaggaatagaatcatatgatgcttgactttttgccctcagcctgaagaatgaaagcaaattagaggcacaaaacatctttagcagtcccagctgctaggaaggctgaggcaggagaatcgcttgaacctgggaggcggaggctgcagtgtgccgagatagcgccactgcactccagcctgggcgacagagcgagaatctgtctcaaaaacaaaacaaaacaaaacaaactatctttagcccctgatgcgcaactgtatattttaaaaacatttaaattaaagggggaaacaaaccccaaatgaaccaacaactgttaattcactcaacagtttaaaaaattggttgcaaataacgttatctttgctttgtttcaagtaaatgaggctgttaaaacagtgcctcatggagggcaacagtggggattctcaggagagaagctatcctaccttttggttagcatgttggggcggggaaatggagactgcctgccgaatcacaaatcagggtcttgagttttctttctatttctgggaattacccgttacatgagtggaatgcatatatgtgaattttcttttacaggtcggggatccatggaaggagggtttgggattcaccacagagatatgttctctgtcctcaaagaatcaaatgtaccattcctttaaaataagcataaattgaggagggactggcgatgagagtggaaactagctatagaaatgggagcatgcagccctgaattgctccagaacaaacacatttaatgccagggaagtagaccacgctgggtaatgtcacaatactataaaaggaagggtacttgctaggtcctattctaggatattttttccagccctctctctaggctgctggaaggacagtgaggctggtttaggtgctctctccctcctctccaaacacggcaaacattctgggtggcttcccgtctggaagcctgttgcctgatggcatcgccacattggcttgctccaccgctgcagctcggaaggcagggttaattccatacggttgccagagccctaaatgagggagcctaggtcagaggtcgcacccaccgggagggcggggtttaggggtccggggcgggctgagcctggccccgcccaaggagggggcgggacgtttcccgggccccgccccgccggcccggggttgcacgtgacccgcggtcccgcctcccgcccgctccgcagcgccagctcggcaggcgcggggcgtgagtgtggagtgagacccgccgggctccaactccgcagcgtcggagcgcggcgggcagcaactttctccccggagcggccgtggcggcggctgctgccgtggcagccggagcggaagccgggaggaagaaagcggcggcagcggcggttgctcccgccggctcgggctgtctagctcgccgagactgccggcccgcggagccgcgtccccccgggcagccccgggcccctgccctatgtcccgcaaggcaagcgagaatgtggagtacacgctgcggagcctgagcagcctgatgggcgagcggcgcaggaagcagccggagccggacgcggcgagcgcggccggggagtgcagcctcctggctgccgccgaatcgagcaccagcctgcagagcgcgggcgcgggcggcggcggcgtcggggacctggagcgcgcggcgcggcggcagttccagcaggacgagacccccgccttcgtgtacgtggtggccgtcttctccgcgctgggcggcttcctgtttggctatgacaccggggtggtgtcaggggccatgctgctgctcaagcggcagctcagtctggacgcgctgtggcaggagctgctggtgtccagcacggtgggggcggctgccgtctcggcgctggccggaggcgccctcaacggcgtcttcggccgccgcgctgccatcctcctggccagtgccctcttcaccgccggctccgcggtgctggctgcggccaacaacaaggagacactgctcgccggccgcctggtcgtgggactcggcatcggtgagttcgggctccgtgaagggcgcccgggatcccattgtcaccgcccttgaccctgggtgttgcgtgcctcttgcccatcggggtccccgtctggtctcccagggtcagagaatcctccacttctctggcctccagagcccatctgtttgttggtccagcctccaaggctctcccgggaggtgggagggtcgggggggagggggtgtcactctagtctccctcgagcgcacgtggaatctttgataggccacggaccagtcagtccaagtggttgttgcctctcagcacttccagaaacctagctgagcaccagctctttccttgatccagcctaacctgatgctgcttcttgagcttacgagggtctctgctttcctgcactgtcccaccttgcctctccactgctagcccctttcgttttctggggctcccagcctggaacctagaccatcgtcaagttacagtgagataatatttagagttaagtaattctggactctgaaaggtttattagcgacccctgccctctttgct

SEQ ID NO: 5757 - DNA, 6000 bp, Homo sapiens
atagagaaaaggtttacatataatgtgaaaatataaaaattcacttattttatcaatataatttttaaatgataatttcctataatctgccctcccctggaaaccatactactggtttggtatttatagtatctaaataattttgcaatgtatatgtcagcttaccaaatattacttataacaatatgattatactgtatactggggtttgcaatttaataaatgttggatatgttgccatggtacagctctctcaatatttattggaatatattttcttagtttcttaacattttggtagcttttcagtagtgaaatttaagagtgtatcaaaccacagatggacaggtgttgagagggttgcagagcctaaggtcagaacctaaagttttttattcaattaagctgaatgctagtttaattatctgttcatgaaaagtaacaaacatttcctgggttgggggaaggagtatttcagaatagttgggagtaagggttagggtgggcaaagatggcagtgtgtcttcagtagtagataacaaccctgaacaaggtcaatgaacggacctggtcctatattctcccacacaacttgggctgtggactccagacagcacagctgtaaacacctatctggtattagtgtcataatcagctattgagtctttagagacccaggaaatactagaactggtggagcttctgggagcatctagttagagagggaggtgcctgggggctgccttggaacaacaggggtgaggagagttgtgggagagtgtcaggaggaagccagtccagaacttcaacaaagcagtgacacttctgtttctatatcgagatgtttatttcattttatttatttatgttttggagacagggtatcactctgtcacctaggctggagtgtagtggcatgatctcactacaacatctgcctcctgggttcaagcaattctcttgcctcagcctcccaagtagctgggactacaggcgcccgccaccatgcccagctaatttttgtatttttagtagagatggggtttcatcatgctggccaggctggtcttgaactcctgacctcaagtgatccacccgccttggcctcccaaagtgccgggattataggtgtgggccactacgcttggccgagattttttgttttagttggaaagtggattgtgttctctcctcaaaagttctaaacattgacctaatccaaactccagcatttttagagatgaaaaacacaacaccttagagaagtgattcctcccattgtcacatagtaattgacagataatagacatttaagtctcctaacttcaaacccagtgcatcagggtactgtgaagggagagtttacctccctcacaaaggaaggagggtcagggaggggatgggtgcctaggattattggagtagtaaatctaaagagggattgggtgtagaaaacgttaaagaaccagtgctctctaatcacattgctttaaatataatcaaaggggaaagagtaattggagaccttgggaaactgcaacctattataaaactttataatgcctgttagccctaagaagagcttggtatctgccttggggcccttccctggggatgccacagacccaggtaatggtaactagaatttgcaaatgttcaatgacccaccagggtataatgaccaatcggggatacaacagaaatgtttaaaattgacaagaaagtaacacatttggcataaactttcagcagtaacaaatttggaaagaaacaaaatatcattacagtgattcctttggatattagtttcttcatctgggtaagatgtaggatcccaagggttttgtgaactctacatttgtatgattgattttgtgattcttttagatacctatctacatagtcagaacaaccaaactgctgttctggaatatgctcgcattgaaaactagaactgccaccctatttaatactacatctgccaactgcccctcaaatttaggttagatgtcatttgtgattatcagagcctttgatctctcatttctattaagaaacctgaaagacatctaatcatttaaatacattcttcctagattgctggaacttacagtagttataaatcctttcaaatgtctgataccaagagcaactaactcttacccttaaaactaaaaaggaggtctttttagaagggaaaaaatgaaggcaaggagcagaaaagacctcagggtcactatatacacaacatggaagaaccagggattagcgccaaagttggctttgtactgtgtcctttatctctttctaccagacccaacgcagctggctgacatttgacaaacaaaatgctgcctctttatttctctgcctttggcatatttctgattttctattatcctctcctccattaggacattgtagttcagcttgactttagattagaaacagacttgtacaggtatagtatacttatgagggcctgagaagaataatgtctgagaatcattcattcacttaactcatgtttattaaatttgtctgctatgtgccaggcatcattctaggtgctgagaatacagtagtgagtccccaaagtccccagcttctaggaaaggagaaagacaacgaacgataaacaaatagacatgtaaatacctggcaatgctaagtgctttgcagacaaatattgcaaatggagggagggtgatattttagttagggagttgaagccttctctgtagagatgaccttagagcaaagaccaggatggagcgagggaaccaagccctgtgaatttttgggcttcctttctcaactggcccctaaagtgtgatctgcaagcatgaatattccacctggctgaaacaaaaggatgctggttgggggccttgctctccattctgcataagttcacccttgacaataacaacccctttcagaccagactaaagtctgtttcattgagattgaacctttgtaggaagcttgcaactgtctccacactgcttcatcactaaaaacgcttacaatgggtaataaaccatgacagtacctgttgaaaatataacaaaacgtatttacaagtaactgcgttagaggaagcacatttacaatggctgacatttaatagtgataagtgctgctatagtttgtagttggaagtattttgttgcctaatgtagctgtcctttaaaagctattccaaaaagggtctgcctggcttaatgtattcacctgctgatactccctttatcataatcatatgatatttcagagtttgatttaaatcaataattgattgcgcatttctcctataggtaggtagctgaaatcttccctgaggaagcccaaacagagtgaagtaggaaaaaggaaatctgacctaggtattcatggttaattttacagatccacagaggaaaatggtaacctttgaagtcttcccacaaatccctaaactaggcctaaggccagaagagttctatatcagaacgttttgggaatcgtcttcaaaaccggaatccatttggccaataaagagtctatttgaattacaaattgtgttgtccgaatcagtgtttccaaactagtctaccagcagagccacaacttttctgtttctgccactttaagagagtaacaaaaaaaaaaaaaaaaaaaaaaaaaaaaaacttctcagctgccttactttgtagctgagataacagaatttggccacagagtgatttacttgactgatctatttatggcaacttgtttatgtatttttaaatcacagttacaatgagctattgttcacgtgtatactgtagaaccacataggttgcaaatcaatcccaaggaatcctgatggtacaggattattttttagcttaaaaaaaaaaagataccaaaggaactggtgaccactttaaattgcttttatttactgatattttacaaattgatgaagctcttaaatattgcattttccccttcattctcttggtatttctatcaccttgtgataaggaggctatagtggaaactaaaatttgtagttcagaagagattagacctctactgatgagtactaatctatcattttttttctgggcttgctttgaggatatgttttgcttctcttgaccctttctgtagacaactgaagccaaactccactttctctcagtgtacctacaaatagctcagaaacaagattagcttcagtatgggacacttccttgtgtttgaataatgatattcacttaacctatttgtaaaaactctcagtagtgtacttgagttagtacatcgcgtgacctggctccttttctttgctgttatttactgataaaaataaatctcctgcgctaagcagtaggaatcactccgaaatgcagggaaagtcctaagagaattcatatgctaatgagcccttctaagtgagaacttgcttaaatgtgccatttgctgacatcattgttatgggcagagtggagatgatttctttaagaggtggcctttcatattctcccagcgtttcgtggcccgcgcgtgcacctgcgggagggggaagtttacataagcgtcctagggtatttgcatcttagcggcttcactcactgggctcgggagaatggagcgggcgggcggcggtaggtgctcgagccgctaggctggccaagggggtgggtaacttttcgaggaattgtgcgcgcgggacctcgtggagatcggccaggggcacggtcagcagtgacagttcctggaaagcgggcggcggcgggagcaggctgggcaggcgccgcccgcgggcgggagcggggagctgggtccggctgggatcgaagggcgggatcggcaggaaacgaaatggttactttttttttttttttttttttttttttttttttttttactgcgggctctgattacttttgaagatcgccggccccaggcgggctcccggcgctgagcggagacgagtttttctccccgcagaggaggatcctggaaggacgcggagctggggcttgggggatgcagtggcctggacgaggtgactccaacccgggggagcagagtccgtcacgccggcagggaccgagggtctctgcggagctggaggaccttttgtgggatgcctcacggctgctgaggggctgcagcgggtgaggatcgccgcgctgcgccgccagggagctcggcggggaccggccgggggggaaagtgcgtcacggcggggcgggggcgacccctcgcccgccaggcggggccagcaccgggacgcgacccgggggcgcggtccgctgcaatgtagtggggacccggtgcttgctgccccaccctgctggggtctcctccggaaatgagtgggtgcgggtgactcgtagggcacccagccctctgttccttcgggagtcctccgctcccgctccgggccgccagcctccttcagacgcagagcgggcgggcggctagtgcgcgccgagggctcaggggccggcgccgcgaggggctgcaggccgcgctcggccgctgtccgggccgcaggtgggagccgctgtctgggtcccagggctggatggcagccggcggcggggactgaacgcgggagggctgcagggtgcgcgccggcgaggggcttctcgttggaagctgagggacagacgtggggacccgtggctgctcggccccaccgtccagccgcagggcgagtgctgctccgtggaggtgacacggcgccaagagcggcgcgaggctttctgctggaggagggtaacggggaattcgaaggcgactgttctatgctggaggacaaggggcactgttctctcggggcttcgcgtcggcgccgaggaggggttcgctcgctgcctctgcgtcctgagctcggcctctggctcctggggccggggacgcagagaggggctggagccggtcgacccacggcccagggcgccccctcgcggcctaagcagcggccgccgcctggagcgcagagtttgcggggcc

SEQ ID NO: 5758 - DNA, 6000 bp, Homo sapiens
tttactcgtagcagaagccaaagcaggagcaggcacttcacatggtgaaagcaggagccagagagtgagaacaaccagatctccagagaactcactcactatcatgaggaaagcacacaaggggatggtgctaacccatacatcagaaatctgcccccatgatccagtcacctcccaccaggccctactccaacattaggagttacatttcgatatgagatttgtgtggggacacacgtccaaactatgtccatatcatttcccccattttgcaacaagctagggagttgcactcacagttgacctgcagaatgttgcatatcagacaagttagacattaaacttccaggactgattatttggtcctgggtctttagttaacttgaacaaatgtcacagtattgccatacagttgcaattcctaataaactccactcccagctcccctaacagataaaaaataaataagtgaccttacaaatatgactcaggccaaaatcagagacagcagacatttttaaagcatctcgggtcaggtatggtggttcaggcctgtaatcctagtatttttgggaggccgaggcaggagcgtggcttgaggccaagaggttgagaccagactagacaacaaaatgagaatctgtttctacaataataataataaagaataaccaggcatagtggcacgcacctgtagtcccagctactcagaaagctgaggcgggaagatccctgattccatttgaggctgcagcgagctattatgattgaaccactgcactccaacctgggcaacagaatgagaccttgtctctaaaattaattaactaataagataataaaagatagttttgttctgggattttaatttaacttcagtttagaatcagtgggggtatttgacctcttgcaagaaccaattttcaatctggtgaggtagaatgttcatttcaatggtggaagaggcaacaactgcccctgacacagtgctacccaccaaggaatgttagggcacacagtgccatgtatctgcagaaggctgaccaacacaatttgggagctcttttaattgcaaatgcgctttttcctatggctgctttactaatttctagtgtcaaaatattgtcatctatggatgagattcaaagaacatcaaggatgataaaaagggttaatcaggcaaagaaatgtgaaagtcaaggaaaaccagtaatcttaaagaccatttgttgtttagggtagaccctataaataggaacaaaagactgcagaataaacaatttattttctagtgagattggatttgttcatctaacagctgcagtgttttctgttacaagtaggagatatgcaggacacttgttctgagataatctcaccagctgactttcctactttttcatcatcgttaaaaatcagattttccactgatagtccttcacagatttttaaaaaacactgtattcagaaaatagttttgatcttattacccaaaaattcttatacaagaagactgctggtatcaaaccagatgtatttggaaagctttgaacaccagtgcaggaaaacacatattctctgtaagcgcacagctggtagtggccccttctgcagctgtcctactgggcaacccaggtagggagcaagtgcaacccgggtgagtacagggtgaagctgggatgagagcagatgtggcttaagctcaggctgaatcctctttggggtataattgatttttcttcacaaagctgccccaccttcctggaaccatacaaaaacaagctatgggggctacaagaaaactctcaggtgacctaaagctacccaattctattttcatagtacaaattccttccctggcatcactttcagagcagatacagaattttctcagttccatagggcagtctgcagtcaaacctggtaatgtgtcctgaataccttaataacattggaaatctgttcaaatgggaaaggtccacaaataacattagatactatcgacaagtctcttggacctcacaaccctattactgagaaaactaactccctggactctactgaaatagggcagtggttcctattcagagacagagtggcccgagaccccttccacccactaaccctccaaagatggttattccagaatcagggaacgttttagatccagccacagaaaactggcttaccagtcagctctggatgcaagatttggatgtgccacttagggctgtgtggacttgggataaattccctaacctttgagtcagggattaggataggctgccctatcaggaatgtcatgagaattaaacgagagaccatctgtgaagtgtttaacctgctgtttgtctctcagtaagcacacagtgaatagaggaatcatctagacatccctggcctcaatttgagaaaacagcagcctccatgttgatgtttactctggttctaggttgtcaactaaaatccagagaaggggtgaagatccttctaactctaggcccaagaatgtctgattgcaaatggttgtagcaccactgtgaagactgagcacggattttgaattcagacctgaaagggaatcgcttccccttcactaattactgtcttaggtgaacatggccaattcaactttgtacttgttttcttaaagaggataatacccaactgagggattgaaagctttaaatgagatatttacatgtaaagtccttagcacaatagctgccatatcataggagctcagttcataactgttgattccaattcaaaaagtgctaaataactgcagtcgttttgatatacagaaactagcaagtaagttaaaattggaaccaaaagacaagcttggttcagataatctccaaacagcgatgaatacacattctgcctttaataaggtaaatattccaacaggcctattaagctatggctcacagttcatctactttacctattcagatttcttaccttattgataagaattatttgtgccaggcaaggtgcacactacttaaaatcattaatttcacaataaattagcttcctctagtaaggtagaaagaaccaactttttgatgacctatagaatattgctatgttgtgtgtactcttctcccctttttcacaaatttagaaaacaggattaggacaaaagtaaagcagatgagggaagcagtaagtgtcagaggaagaaattgaatgcaggtctgtctgagctaggctgcccatgtgtttgcccttttggtttgctctgaactttctgtttttcagtatttctcaagagcatgccttctaaataggattctcaggaagccactgttgaactaataaaggccatttactgccattcgaagggaataagaagtttagtccgtgatgagtttcaaatttggttatcatcttgcttttccagtggtgatgaaaaagcaaaattcacccaaatacaatgactactgtctacttgaaacgctccaggtagttaatttttgaattatgattcaccttccctttcctgttttgatgaaccatgaacaggagactgaaccttccctatcaataaaaagctcgcgtttccaccctgcaaattcgcgctatgacagtctaattggctgaggcgcaggtgggatttcctgtcgccattttaagacacaactcctctgcaagcaagtgcccagccagtgaaagggggctgtgtctgaaacaaagagtaagcgggaaaaaagggaaccaggcccagttgcccctgctcccctccatgccgctccctcgtcccccggacttggagcgccccagctccgttaacctggacgcaccaggtccttcggtcgggaccacgtggggtctccaggccctccaagagctggcccccggctctttgcgcctaggccggtgctttctcggtgctcagcaaatccttctggttcacctcacacccagtccccaaagcagagctccacagggcagatctcaggaagggctgaccaggtctgcgggtgctggatccggaagaggggaggtgcctcccgcttcaggttagggacaaagggtttttaaaggtgcccgagctccccgccgcccctgccacttcggtccccttcccgccaacccgggccatctgcaggctgtgcccagggccagccctccgctccaacgctgcccgtagtcccaggcgctgcccgcggctctccgggctgcgctcggacctgccactcccgcggccatcctcatgctgcgcccttcccacaatgcaactccctcgctccttcggccccggcggggctctggcgtacccaaaatgcaggccccagcggaacgcacagccctcctgtcctccgccggtgcccctttagccgccccacccccatccctaagggctctcattctccagctgcagccgcagctgggttccgaacacgccgccgggccccgggagggagaggggcaggtgccagggcggcgcgcagcctctgctcccggtgccagcttcagtgcgccgggcacacgcgcgccccgcaacccctccctcaccctttccccgttgctcaatctccgccagccgcggtcgctgcatcgtcagagagctgcaagagggaggcagcaaggtgcggccgccagcagtgacaccatgtgaccggcacggctcactgacacgcagctttggttaaagagcgggcgcacaggaggggaggagaccgcgcgcgggacggggaggaatggcctgtccgcgttaaaccatcacaagccatggttgcggaagggccacgcgtcccccagtaggagaatgactccgattcgtgaccctcagcgccggtgcatgtcgatgtaagtgcgaggccggcgagcagagtgtgagtgggggttggtggtgaggggagattctgatgcaatcggcccggaaaggaggagagccaggcgagcgcggactggggcggccacgccactccgccagaaggtcgccaggagcctccgcccttcaccttcctccgaaatccgccaggccacgccaagctccctgcccaacccttactgacgggggccacattttcccggcctccgcagccagaccttgacacaaaggacatcaaactgccgagggtaaaaaccccggaagggcggacacctccacatcgccttttgccacctttccctttatttccggaggtaaggtgattatccgttcccggggagggctgggcgagcggcaaggggagatttagatgtcggaggaggaggtaacgtagaaatcatctctgcgggcgtgaaagcagagagagctcggctgtgcccgatgctttcggatgttgcttttaggagaggaaaagtccaggtctcctgtgcttcccgaacgcacgcggcagcgggaggaagcgccagggcccccgagttcacctttgcgtgggctgtggcttactttttggtttgttttcctgtgactttggtgtgttttcctgtggctgtggcagagtgtggtaccagatctggttccatttttacgagagccaggaaccacgcacgtctggagggagagcgcagctgacccgagggcgcgaccgtgttctgggagtgtttgaatccccggcctttggtgaaaatttcctgtgtccgcaaggcccagaggagatcgtgtgatgtccggggggtgctgcgtgcggccggctgggtagcggccgcggaccaccactaaaccggggcatgtttgccgtccttcctggtgctctgcccctctgtaacgcggggaagtaggagggcgcggggagaaattactaaaggatgcttgcagtgactcactgtcctttcctgccctgaagaggattttctaaaatgcagagggtggcaggggacagaggtagtgttttttcgagagccgggatgtgctggagccagcgaacaaaaggccacctcttgcgcggtcttgggcgcagactgctctcgcttccagtcccacctcctccccaacccccggcacctagttcgcgtccctaaacgttgccgcagagg

SEQ ID NO: 5759 - DNA, 6000 bp, Homo sapiens
aaaatgtccagaataggcaaatccatagaaacagaaagtacattagtggttgccaggggctgagagaaagggaaataggagtaactgcttaatgggcataggacctctttttggggtgatgaaaatacagacagtctctgacttatgatggttcagtttgccttaggatgtttcaactttacaatggtgcaaaagtgatacacattcagtagaaaccatacttcaagtacccatacaatcattctgtttttcactttcagtatagtattcaatgaattccatgagcaattcaacacttttttaaatataatatagactttgtgttagacgattttgctcaactgtaggctagtgtaagtgttctgtgcacatttaaggcaggctaggctaaactatgatgttcagtagatttggtgtaataaatgcacttttaacttatttattgagttttttttggaatgtaatcccattgtaaattgaggagcatctgtattctgtaattaagatagtggtgatggttgcacagtattgtgaatatattaaacaatcactgaactgcgcactttaaaattgttacaatggtgaattttatgtcatgtggattttatctcaagtgaattaaaaaacaaaaaactgtccggcctatgtcaatgaagataagagacagaccaaccagatgagtgagtggagactgcttaaagagtagccccattgtgagctcttcctggggaggacatgcagtacctcctgcagaatactgaatactcccattctatccccccatttccagccaagtaaagggagcgtccagagaaacatgccataagctgacccatgcctcctggagttcagaaagcacaggagctggagtctgagttttcccagaaaatgtatctccatataatgaaagacacaggatggggtgagagatctggttctataaaaaatcttaggcaatttacaaaaaccaactggagcaggccaagagaagaacaggatgctgtaggagctgagtgcacttccatagttgttgggcaaaggtatgtttttcttgtgggttcaagctaagttacactgtaaaaatcctattaagagtgctgcccgccagagtgatgaaactccacaggaagctcctgcatgcagcaatcagtgaccccagtgagctccatctccaaagaacacccagtgtgcctcacgccgaaaaaagaggcaacaagatatctgccagtgtataaattccacctgactacaggacgcgtggtagagtcaaaggagataaagaatgtgaaagcccttcttaggacataaagtgctattgaagtgttaattattagtaaaaatgacttagaatcatcaaacatgtgctattaatttcttgtctcatatctctaattacttaaatctttgattacaacctgagaaattgtggaaattacagggctagaactcctgtgatttcatcacctcaaattactgcctcaggcagatagtatttccaaacccagctagacactcacatgaccacacccccttctcagcatactagattcagaattatgtcaagtgtcaagccacattctactatcccttggagtcattactgaatggtcaaaaattccaatgtattatgtcatgtggaagaggccagaggaatatctatcgcatcctattttaaactcctgagaaggcaactcaaccatctgtcttggcaacccattccaggttggaaccaccctggcagaaacgtctctcttctgtttaatctaaatccttcaaatagaaccttgagataattgcatcccatttcattttcaaataatttggaacacagttgtttaccatctgggttataggattatataatgtcacagggctgtggtgagcaataaatgaaataatgcatgtaaaacgcatagctcagtgtctggcatataataaaggctcagtacatatttattatcaccatcattacatgtgttagtactctgtccgtcacaagtgacatgcaactcaaaataatttaagctaaaaaagggggtggggtggaaaatataattaaaaaggaagtaaaagtatgcagtggccttcaggtactaccagatccaggactcaaataacatttacaggactcctctttctctttcttctccttttttttaagacaagctttcaaagcataaaaggcaggacagcaaccagcagattcagttggggtaaaccgttatcttaaccactttgaataggttccctgttcatcagttcatttatcaaaaatttattgaatgtgttaagcagggttctgagagctgagaatacagcaatacacaaaacagataaaactgctatcctcttggaatttaccttctagtggaaagagggaatctgttagaaggagaagggatgctagaaagataaaaatgttatcctccacaaaataaggtcacgtcttataccttaagatcaactcttatctttctttcctcccagctagtaaactcaatccttttacaacgttcttccctttcacaaacatgtgaaatcccccaaatcaggtcttcaaatggataaatagccttgtctatggattttgagtgcatttagtttacttttgctgtgtaatctctgcataatgtttctacaatatgcctgtagttataataatataaccttcctgtttccatttttttgaatcacttattctttttagactatttttgcattaaatacaggtctttcttctgccttcatggtttccttaaaatacgatgttaattagtaaaatcctgcaaaaacctggtcatttattagtcatttaaaaaatattcctctgagcgattttaattctattcctctgtattaactattctaactctataaaattgaagtcctggagaccaagcttttgagaatcccaggaagtgtggcctaatactagaaaatctcaacttctgcctctcccctttaagtacacagtaagaaatgcttgcatgaagcattttaggctgtgttcttatgataaaattcaactttcatgaaataaattaatctgaatcaagttgtcctcatctgaaaatgcctagatttattagtgctagcccggctttattccacaaacaattctatttaaattaggtgttggtctaacaaatctgcctgaccacagcaatgactcacggaccatgtaggaaacaactttcactaaattcaagattgctcaagtgaaaaggtgcgcgggggaggggaggaagagttggttgtcctcatcatttttatttttaagtaatattacaagttatctatcctgccccaactgtttcctcaatttggttgcttttcattccactgtggttggcatcttttgtcaaggcagtaatttatttcttttaatccggatataatggccaaatgggcgatctgactcactcaaatcccatcgttaaaacttatcttggaattaaacaaaaatggatttttaatcgtagagctcatcagcctcatagtctccacctcatttctgaatggccttgttcggcttgcaccttctgtgcttgctgaaccaaagcgcgctggtcggccgcggcatctccggaagggatgaagagcctccgcgcacacgccccttacttccctgtcccgcacgcgccacgagcacgcttgcaaaagacggggaggtggcggggacagagacagaggaaatgagagagagagaacgaaagagaaaggagagagagggagagagagagggagagagaagaggggaaggagaagagagaaaaaagaaaaaaaggtctgctctgggattattattattatttgggttaatactcttatctttgcattccagccggaaggtcggctccaagccttctttcctgccctcctccttcttgaattggacaccatccctgttgccgcctcctgagtcaggaaagggatagaactttcccagggaggtgaggggtgtccccgtggcgatttcccggttacttcctcccagcagatatccctgtggagaggaaacgttcccgacttccctccccgcgacctcctccctagaaacgagcggagacgtcaggctgcttctgggtttattttgtaaacccagacagtcaactgcacttggcgcaggcaaagcctccttggcccttgccccaaagcaaagctctaagaggtccggggattccttggcctgggtggggagagagacgtgacctgtgcggccgccgcgaagtgggtctccaagggtgagacccctccctcggtggctgggcgtgtcccctttagccttcctggaccccattaccgcccggcttggagctggacgaagggacgtaattggtaggcgagtgggttgggcatcttgactcaaggaccagagtctgggcctctggtgtggacccctgccccctccccgctctgcgcggccgttctagaggtccgggtgggagctggaggaggaaagcgggaggaggcggcgaggccgcggggcggtatgagggggcgccggccgcctctcggattggctgcgccgccgccccctccgcatcgcgcgccccccaccacgcgcccagcctgctccctcccgcaggctccgagctgctgcccgcaggaggcaggacgcgcaggggtgggaccggcgccccagcccgtctcccggccccgggcgcgcgggaaccccgggtcctgcagcctcccgagtgcggagaggcggggccgcccgctgccgcccggctgcctgcgccccctcccgcggccccggctctgggagcggggcgccccgcgcgcgggcacacggcggccagagcgccgaggcggtaccttcagcctgcaatgagaggaacccgggagagcccccgggagccagcgaagagcttggctgctgcgtccagggctgctgctgccgccgcggctgcttgaaactcctcaaagttgagagccggctagagggtgccgcccgccgggagccggagggaaaggaagtcggaaggtgcaagagtgacagacacggacagacggacgcgcagaccttcggaaggcactgcgtaggcagcctccccggagcccacgaggctccccagcaccgtgagttttttcctggatgggtggttgctaagtatttccgtttaattgtttgtagcgtacgtttgcgtatagttgtgtctgttggagggagtttaaaacaacaacaacaacaacaacaacgcaggatgcaccttaggaaaaaattgagtttctgatggtgggtgagacggtgggttgtatggagagaatgtgactgtacatttttataagcaggactaacccaggaaagaggaaaaaatacatttaacagtgaagaggcaacacagagctccctattgtgaaataaaacccatttcaaaagttattggaaagaaagtaaggtatggctcttatgggttaactagtggtagtcagtttctgctttttactccctctgaattattaattgtttgccaggttcactggtgggaggctgagccggtggaaaagacaccgggaagagactcagaggcgaccataatgtcgttacgtgtacacactctgcccaccctgcttggagccgtcgtcagaccgggctgcagggagctgctgtgtttgctgatgatcacagtgactgtgggccctggtgcctctggggtgtgccccaccgcttgcatctgtgccactgacatcgtcagctgcaccaacaaaaacctgtccaaggtgcctgggaaccttttcagactgattaagagactggacctgagttataacagaattgggcttctggattctgagtggattccagtatcgtttgcaaagctgaacaccctaattcttcgtcataacaacatcaccagcatttccacgggcagtttttccacaactccaaatttgaagtgtcttgacttatcgtccaataagctgaagacggtgaaaaatgctgtattccaagagttgaaggttctggaagtgcttctgctttacaacaatcacata

SEQ ID NO: 5760 - DNA, 6000 bp, Homo sapiens
ggaactctgtctgctgagttcaattactgtatcctcagcacctattaatagaagagtgcctaacacatagtagcgagagtaggtgacagggcgagactccatctcaaaaataaataaataaataaataaataaataaataaatatgggatgaatgaataatggatctaaggggatggggaagggattttgtatccccctggagttgagcccattctcaagggtagtggtggtggtggcggtggaaatggagttggccagagcctattccaaccctggaagtagaaggggttgtgagtctctggagtggtgatggtggtggtggtggtagcagcagtgatgttaggggtagtgaaacggacaaggcatatttgctagattgaatgaatgtgttttttttgttttgttttgttttttgagacggagtctcactctgttccccaggctgtagtgcagtggtgcaatctcggctcactgcaacctctgcctcccgagttcaagctattctcctgcgtcagcctccccagtagctgggactacaggcgcgtgtcactataccgggctaatttttgtagttttaggagagacggggtttcaccttgttgggcaggctggtctcaaactcctgactcaggtgatctgcccgccttggcctcccaaagtgatgggattacaggcaccagcaaccgcacccagctgtgaattgtttttatatgtctttcttactttcagaaaataaaatgtgcagacttttggtgttttttctttttttttttttttgagacggagtttcgctctcgttgcccaggctggagtgcaatggcgcgatcttggctcaccgcaacctccgccttccaggttcaagcaattctcctgcctcagcctcccgagtagctgggattacaggcatgcaccaccatgcccggctaattttgtatttttatagtagagacggggtttctccatgttgaggctggtcatgaactcctgacctcaggtgatcctcccgcctcggcctcccaaattgctgggattacaggcgtgagccaccgcgcctggccaaattgtgcagacttttgatctttaagacagaaaagctagggaatggttgtttgcattgtaaaaggaatctttgctttgtaaaagggcgtaggcagaggctagtttagctgtaacccaaacaacccaaggaaggctcagggcactcaagcctatccgttagttacattgcagggtgttttcaacactgcttatgtatagagtgttgtccagatacacttttggctgtgtgaagcttacacttacatataatacattctgcttgtaagagtttcctcttcctgaaaatgagagattgaaaatacatcactcttgtgactatggtctgtattattaaaaaaaaaaaaaaaaggtcgttgagatcaagcaagctagacgtggagaaatacagttcctgctgactgcctctctctttcttctctttgtcagagttaaaaccttccaattggccatgcgcggtggctcatgcctgtaatcccaacacgttggtaggccacaacgggtggattgcttgagctcgagtttgagaccagcctggacaacatggtgaaacctgtctctattaaaaatacaaaaattagccgggcatggtggcaagcgcctgtagtctcagctacttgggaggctgacgtagaatcgcttgaactcaggaggcagaggttacagtgagccgagatcgtgccattgcactccagcctgggcaacagagcaagaccctgtctcaaaaaaaaaaaaaaaagtcctaatattctgtagtgctagaaatagatttgatggtggccctgccctgtcggaacttaagactctaatattcatgtccggcatgcacctgtaatcccagctactggggaggctaaggcaggagaatcacttgaactcaggtggcagaagctgcagtgagcagagatcgtgccactgcactctagcctgggcaacagaacgaaactcggtctcaagaaaaaaaaaaagattctaaggccaggcacggtggcttcacggctgtaatcccagcacttttggaggctgaggcagttagatcacctgaggtcaagagtttgagaccagcctggccaatatggagaaaccgtctctctactacaaatacgaaaattagccaggtgtggtggtgggcgcctgtaatcccagctactcgggaggctgacacaggagaatcacttgagcctggaaggtgctgggactataagcacgtatcatcacgctgggctaatttttttttttttttgagacagagtcttgctgtgttgcccaggctggagtgcagtggcgcaatctcagctcactgcaacttccgcctcccaggttcaagcgattcccttgcctcagcctccctagtaactgggattacaggcgcgcgccaccactccccaataatttttgtatttttagtagagacggggtttcaccattttggtcaggctggtctcaaactcctgacctcgtgatctgcctgccttggccttccaaagtgctgggattaaaggaatgagccaccatgcccagctaaaatttaatttttttttttttttttgagacggagtctcgctctgtcgcccaggccggactgcggactgcagtggcgcaatctccgctcactgcaagctccgcttcccgggttcacgccattctcctgcctcagcctcccgagtagctgggactacaggcgccccccactacgcccagctaattttttgtgtgtttttagtagagatggggtttcactgtgttagccaggatgatcttgatctcctgaccttgtgatccgcccgcctcagcctcccaaagtgctgggattacaggcatgagccaccgcacccggcctaaaatttcattttttaacgcatatttatctcaattgttttttgcattttccccatgtggctcatgagcacattattctaagcgtaagtggtagataacctgattcaggtattttgaagaggaaattttgatagcaaaaacaattttttttttttgagacggcgtctcgctctgtctcccaggctggagtgcaatggcgtgatctcggctcactgcaacctccgcctcccgggttcaagcgattctcctgcctcagcctctcgagtagctgggactacaggtgcccgccaccacgcccagctaatttttaatagagacggggtttcaccatgttggccagaatggtctcgatttcttgaccttgtgatccacccgcctcggcctcccaaagtgctgggattacaggcgtgagccaccgcgcccggccagcaaaaacaatttttaaggaaattttgaagtgagaagtcaggcaaagaggccccaaagatcaaattgcaggccaggcctgcacaactgagaaatgagaaagtaccactttcccattttcaaacattataacaaacatttctctatctgattctgaaaaccctgtaagaaagacaaggcagatggttttattcccatttcaagagattgatgatttacccaaggtatatagtttgcaggtacacgtggctgataaatgttggaaactggctttcccaactcttcttttccttgcctgaagctctgtcctggacttaggaatcccagtggtgatttggagtggacaagacttgagtcttgaaggacaggactgcagggagggctggtcctgaggaggaagcatcttcagatacctaggtcttgggatcttgggtggggaataggctgcttggggaagggctgaattggaaggaggagctagaggtctgactgagggaatggagagggggcctcaaaaggaagccaggcaggctgccttcttcccagctccagaatggcaccccctctaaagtcacactcacctacgtacatcctggagtgaaactccttctcctttctgcttccaccattactctaatcctcaaagggttaaccagctttcacacgattttcccatctcccaggtaacttgggcagctgctccgtgctggaaataactaaagacccagtttctcagttcgtgcacttagcaatgcaccccagtagcccctccaacccccagcagagaagcacagccctttgggtaaaagatgcctgggggtgaggctgcaagttggcaggtgcgggggaggggctcccagagagtagggcggggggttgtgggggcggcagggagagtgccccttccctgggtccctccactgggccccgaggttcgcctcggggccgctgccccagagactggggggaagaggaaagaagtggtgtgcgggcaagcaggccgcacacacctggcgccttgtggaatgagagcttaattaattattaaactgagttcccgcgggagggcgcagggccgtgacaggcagggcgggaatggctaggtgggggctggggctggggcaggggcagggaggaattggggatgaagagtgggcgcggggcgccggcccaacccctgggaccctgacaggaaggaaggcgaccctcggtgggcggggcgggggatgtagccgtgaggggtgggtttgcgggcgcgctcggggacccccggggtgagggcgggagaggaatgccggaggaggcggccggggtgaagggaaggggaccgggctgcgaggtcccctccccgcggggtcttgatcccagaacagtagctgcttgtcttcccaggactgggggaggaagcggccggaggagaggagggggcgcgcggagggaggggtcccattatttggcctcctccgcccctaccccgctgctaggaaggggagtgggcaactcggcccccacttctggggagggggagggggatgcccagacaaaaggagcttgtgcctttaaggcggggagtccgggagccagcggggaggggacttctggatccggggtagagggcggctgcgctggacagctcgggagggggcgagggccgggcggacggcggacggcggacggcgggcgggacggccaggacgcgcgggctcggaggaccgcgggacggccggccggccggccggagcccgcgggggcggcggggcgggggcccagggcaggcgcggagccgggccggcaggtgagcgcgctgagggctaggggaagtggccgctcgggctcccggtgcgccaggattggaacgcacccgagcggctctcgacaagagtttgtgggtgggggcgccgaagccttggacgggtcgtctcggcagtgttgcccgagggagttggggttggcaaagggaagtcatggaggcagtgggatcgaggactcctaggtccggcgctcgccacccccgtcgcccgccgcctgcctccctccacggggcgagttccaggctggcccggaggccaggaggatctggcacgtactgggggaggggctggcctgagttttttgctgcggggctgtggggtgtctccgagtttgggggagattccatttaggggagaggaaccggcctgggcagagggagggatgccctctgtctgcgggagtccctctccttcccctcacccaaaaccttgggaatgaaaggggtggggtcggctccccacatcccccaaggcctgccgcagggtgggcaggggagctgactttattcaaagcagactctggggctcgactgaaaggctagaggtggaatcaggcgtgggagcctctttgcccatatcctctccttaccagattacccctgtgagctggagggacctggtgggggttgcatagtaaagggtgatgtgggagccctctgtaatctttagggagagtgaggactggggatgggagaaggcggcagcgggcactggaccgacagatacaggccctgggtaggctcctctacatctggaaaggcccagaattgaagaattgaggcccatgtccgagtatggtgggtggtgctggcactgctgggccccgcctgggcagtgcctcttaccatgaactttctgaagtcgttt

SEQ ID NO: 5761 - DNA, 6000 bp, Homo sapiens
cttctaatatacctctccattcccagagtctataatttcacaaattttttcttgctgtctcaagccaatctttcattataattcttctctcaaatatttttggagaggtcagagaggtagggaggaagaattagaattgaatatctcaaagcatgttttcttttcttttcttttgagacagagtttcacgctttgttgcccaggctggagtgcaatggtgtgatctcagctaaccgcaacctctgcctcccaagttaaagtgattctcctgcctcagcctcccaagtagctgggattacaggcatgcgccaccatgcctggctaattttgtatttttagtggagacagggtttctccatgttggtcaggctggtctcaaactcccgacctcaggtgatctgcccgcctcggcctgccagagcactgggattacaggtgtgagccactgcgcccggccaacgtgtttctaaaattcttctcctcctaactcccaacgacaacatcaaaaagttctcagatgcaggaaggacttgcttaggaaattcctggttttctggtttccctggcaccctagacaagagggatattccaaaatttctagaaatttgtcctattttgaccagagagaagaaaaaagttataattcagagtcagatgagctctggctgggtacggtggctcacacctgtaatcccagcactttgggaggctgaggcaggtggatcacctgaggtcaggagttcgagaccagcctgacaaacatggtgaaaccctgtctctaccaaaaatacaaaaattagctgagcatggtggcgggcacctgtaatcccagttacttgggaggctgaggcaggagaattgcttgaacccaggaggcagaggttacaagagatcgagccactgcactccagcctaggtgacagagccaaaaaaaaaaaaaaaaaaaaagagttagctaaatagctaaataagctctttccaaagacccagaaagtcctgagaacaaaatcaccctgaaagtagtcttagagtaggcaggaagttttctttcttctctttctttcttttctttctttctttttttttttttttacaaaataaaaacagggtttcactttgttgcgcaggctggaatgcagtggtcccatgatagctcactgtagcctcgatttcctggggtcaagtgattctcctccttcagtctcctgagtatcttagaactacggggacatgccaccacgccttgctaatttcataaattttttgtagagatagggtcatgtgttacccaggctggtcttttttttttttttttttttttttttttgagacggagtttcgcttccaggctggattgcaatggcacgatcttggctcactgcaacctctgcctcctgggttcaagtgattctcttgcctcagcctcctcagtagctgggattacaggcatgcgccaccacgaccggctaattatgtatttttagtagagacagggttcctccatgttggtcagactgatctcaaactcctgagctcaggtgatccgcctgcctcagcttcccaaagtgctgggattacaggcgtgaactgcagtgcctggccctgtttaagtgtttattataagaactgcactgggttaagttttggggaagaaaagaagggggtgaattagaagccaaatatgagcctggcacggtggctcatgcctgtaatcccagcactttgggaggctgaggcgggcggatcacctgagttcaggagttggagaccagcctgaccaacaaggagaaaccccgtctctactaaaaatacaaaactagccagtcatgggggagtgcctgtaatcccaggtactctggaggctgaggcaagagaatcgcttgaacccgggaggtggaggttgcggtaagccaagatcgcaccattgcactcctgcctgggcaacaagagtgaaactccatctcaaaaaaaaaaaaaaaaaaaaaaaaagccaaatatgagtttctaattcttgaagaggagaagacaggaggaaaagaggaaagacataaatgaaggtaaagttaaacaatacaaaatatttaaataacagctcaagaggacaaatattatgaaacaatgcatatatggacaattttttttttagagacggagtttcgctcttgttgcccaggctgtagcgcaatggtgtgatctcagctcactgcaacctccaactcccaggttcaagtgtttctcctgcctcagcctcccaagtagctgggattacagtacccaccaccatgcccagctaatttttgtattttttagtagagacagggtttcaccctgttggccagggtggtcctgaactcctgactgttggaaacaagccccccccaaaatctggccataaactggccccaaaactggccataaacaaaatctctgcagcactgtgacatattcatgatggccataatgccccgctggaaggttgtgggtttactggaatgagggcaaggaacacctggcccacccagggcggaaaaccgcttaaaggcgttcttaaaccacaaacaatagcatgagcgatctgtgccttaaggacatgctcctgctgcagataactagcccaacccatccctttatctctgcccatccctttgtttcccataagggatactttcagttaatctaatatctatagaaacaatgctaatgactggcttgctgttgggtaaatctctgttcctggctctcagctctgaaggctgtgagacccctgatttcccacttcacatctctatatttctgtgtgtctttaattcctctagtgccgctgggttagggtctccccgaccgagctgctctcagcacctgacttcaggtaatccacccgtctcggcctcccaaagtgctaggattacaggcatgagtcaccgcgcccggtcttatggccaatttctttttcttttcttttttttttttttttgagatggagtctcgctctgtcacccaggctggagtgcagtggcgcgatctcggctcactgcaagctccgcctcccgggttcacgccattctcctccctcagcctcccgagtagctgggactacaggcacctgccaccacgcccggctaattttttatgttttaagtagagatggggtttcaccgtgttaggcaggatggtctcgatctcctgacctcttgatccgcccgcttcagcctcccaaagtactgggattgcaggcgtgagccaccgcgcgcggctaatggccaatttttaactgctcactgaactatgcagctggatgttgctttaagaatttagaggaggtcgggtctgttggctcacgcctgtaatccctgcactttgggaggtcaaggcaggccgacagcttgggcccaggagttcaagaccagactgagcaacatggcagaatcagctaagtgtgctggtgcctgcctgtgatcccagctgctcaagagactgagatgggaagatcacttgagccttggagttggaggctacagtgagtcgtgatcgcaccactgcacaccagcctgggcgacagagtgagactgtctcaaaaataaataacttaaaagaaaatctcccttcgtctaaatcctgtctacttccaagacacacacacacacacacacacacacacacacacacacacacacacacacacacacacacaaaatcttggccggacgtggtggctcacgcctgtaatcccagcactttgggaagccgaggcgggcggatcaactaaggttgggagttcaagatgagcctgaccaacatggagaaaccacgtctttactaaaaatacaaaattagctgggcgcggtggcgcatgcctgtaatcccagttacttgggaggctgaggaaggagaatcgcttgaacccgggaggcggaggttgcagtgagccgaaatcacaccattgcactgcagcctgggcaataagagcgaaactccgtctcaaaaataaataaagaaataaaagctgaatcacaacatcttcctctgaagtgttgttgtgacgttaaaaatgagataataggctgggtgggtcacgccttgtaatcccagtactttgggaggcccatcactttgagactaggagtccgagatcagcctgggtaacatggctgagataacgactataaagtgaatggcacatagtaagtggttagctaatgtttgactcagccccactcttcagtgatccttgtgggcatttcttcacaaagttgcaaggtatttctgtagtcctctctccagtatttttcagtatttgttctagcacacactaggtcttccacaaaaatgattgaatgaaaactcctggcagcgggaaagcggggtggggatgtggggaggggcaccccaacacaaacacacagaaaatgctactacagaacatcggttactgggcagcggtacatttcagaacccctagggtgccctcacatcctgcctggctggcctgcttcaaacggttcatttaaccaaggtcatactaaaatgttggctgctactaaaatccaggaaccttcacttttcccagataagagagacagttgctctattagtatgggcagcggtaggcccaaaagatcccgccttcctccacagggcgagcctatcagcgctcctccagcgatgaacgacagctctccaggagccaatgagttcctccccctggaaggaacccgcccatcccttgtgtcgtcactagatctcttaaaaagatggaccctcagcggcgcttcctcgtagcgagcctagtggcgggtgtttgcattgaaacgtgagcgcgacccgaccttaaagagtggggagcaaagggaggacagagccctttaaaacgaggcgggtggtgcctgcccctttaagggcggggcgtccggacgactgtatctgagccccagactgccccgagtttctgtcgcaggctgcgaggaaaggcccctaggctgggtctgggtgcttggcggcggcggcttcctccccgctcgtcctccccgggcccagaggcacctcggcttcagtcatgctgagcagagtatggaagcacctgactacgaagtgctatccgtgcgagaacagctattccacgagaggatccgcgagtgtattgtgagtgcggggccccggcgaggagaagcgggggttgcgggagacggggaggttggggtccgagcccacctggtctcagagtgccgtcaaaccatgcctgggccagcggcgggcgacggaggcctccgtccgggcagaagggcgggtgcccggctagcgatcccctagatgggatcagctgggtccctgagcgataaacaaaggccgtcgtttccgttcctcccccacacgcccctcccctgcccctccctcccacccctcacccagcgcgtcttcctgttgggggtctccggggtctgagagcctgcggagtctgccttagtctgataatcggggaaggatgggtttgcttctcaaactgggttgagggcaaactcagctgacgttggatgaaggggagacgtcgtcacactgagcttgattccagaaaagaggggaggtgtagggatggcagacgggaggaacctggggacttggtgggtcatctgctttggaagaaaggagtcttgctggggtggatcctaatatgtagagatgaggaacaaccaagtattcccccgtcttttttctttctcattggtgtttgtttgaaaccctgcaaggctgggttcccagcctctcagccattccggggtttccccagtgagtggtcctcccagggcttcagagggtacctggctgctgttccttacgccctccctgccacttagagcgacaactgaaccttgcgcacagaagtggactactcaattctggggtaggggtacccagtggagcttagggtgtcatatctttctcagccttgctttgaattttcacctctctcctttctcctgtgtccttccccagagctcaccaggg

SEQ ID NO: 5762 - DNA, 6000 bp, Homo sapiens; identical to SEQ ID NO: 629

SEQ ID NO: 5763 - DNA, 6000 bp, Homo sapiens
cccgagtagctggaactacaggcacctgccaccatgcccagctaatttttatatttttgtacaggtggatttttgccatgttgaccaggctggtcttgaactcctgacctcaggtgatccgcctgcctcagcctcccaaagtgctgggattacaggcgcgagccaccctgcccagccctttaaaactgtatcttaatatagtgtagttaccatgaagctattcctgggtttggatggaagtggcttcaggcagtggttcacagaacagcagcagtggcatcacctatgagtttgttagaaatgggaaatgcaaattcatagatcctacccccaaactcatgaaagcagaatctctctggatggggtccaggaacttaaagaaactctctttatgcgagatgggacaagctgatatctgagctgatgctaaagtttgagaggcactgaactaaaatgaagctaaccagctgggctcggtggctcacacctgtaatcccagcactttgggaggccaaggcgggcggatcacctgaggtcaggagtttaagaccagcctggccaacatggtgaaacctcgtctcataaaaatacaaaaattaggccgggcgcagtggctcacgcctgtaatcccagcactttgggaggccaaggtgggcggattacgaagtcaggagattgagaccatcctgctaatacagtgaaaccccgtctctactaaaaatacaaaaaaattagccgggtgtggtggcgggcgcctgtagtcccagctactagggaggctgaggcaggagaatggcgtgaacctggaaggcggagcttgcagtgagccgagatcgcgccactgctctccagcctgggcgacagagctagactccgtctcaaaaaaaaaaaaaaaaaaaaaaaaaattcggccgggcgtggtggctcaagcctgtaatcccagccatttgcgaggcccaggcgggtggatcacttgggtcaggagttccatggccaacatagcgaaacacaatctctactaaaaatacaaaaattagcagggcatggtggagcctgcctgtaatcctagctactcgggaggctgaggggagagaatagcttgaatccaggagacggaggctgaagtgagccgagatcccgccagtgcactccagcctgggctacagaccgagactccgtttcaaaaaaaaaaaaaaaaaagccgggcgcggtggctcacgcctgtaatcccagcactttgggaggccgaggcgggcggatcacgaggtcaggagatcgagaccatcccggctaaaacggtgaaaccctgtctctactaaaaatacaaaaaattagccgggcgtagtggcgggcgcctgtagtcccagctacttgggaggctgaggcaggagaatggcgtgaacccgggaggtggagcttgcagtgagctgagatcccgccactgcactccagcctgggcgacagagcgagactccgtctcaaaaaaaaacaaaaaacaaaaaacaaaacaaaacaaacaaacaaaaaaaacactttaggctgggcggagtggcctcacgcctgtagtcccagcactttgggagtgtgagaaatcggaaagttcttcaaagattataaaaagtcacaatttcttactataagattgctatccactgtgtgtgtgtgtgtgtgtgtatgtatgtgtgtgtgtgtgtgtgtgtgtgtgtgtgtgtgtgtgtgtattccaaatcagctgtcctagattgctcctgcatgcctggacagaactagacaagccccagcccacagtgcatgccattccttatttggtgatgcttccttaatgatccctgggcaacttccttttctttctttgttctgttccccttaaccaattttaaaagttttaaactaatagccaatcaggtaaagtgtaaaatgtgaggtcctattccagccaatggaaaatggacacagcagtagggtagacacctcagattataaataactctgtctcctttgttcggtgtgctctcatggctagacagcttttgagtagcagcaccctttctgcagaaagtaaagctctccttgctgagagatcatttgttcccgtgtttttttgtttttgttttgttttcttttcttttctttttgcaacaccaaaaacttcattcccaacagggatactgagacaggcagatcacttgaagtcaggagttcgagaccagcctggccaacatggtgaaaccccaggctctatcaaaaaatacaaaaattagtcgggtgtggtggcacgtgtctgtagtcccagctactcgggaggctgagaagggaggatctcttgaacccagaggtggaggttgcagtgagcagaaatggcaccactgcgctccagcctgggtgtgagactccttctcacaaaaaaacatgcaaacaaacaaaacagccaaatttaaaggagttttttgtttgtttgtttgttttgttttttctttccaagacaaagtctcactccgttgcccaggatagagtgcagtggtgctatctcagctcactgcaacctccgcctcctgggttcaagcgattctcttgcctcagcttcccaagtaactgggactacagacacgcaccaccacgcccagctaatttttgtatttttagtagagacggagtttcaccatgttagccaggatggtctcgatctcctgacctgtgatccgcctgcctcggcctcccaaagtgctaggattacaggcgtgagccaccgtgcccagcctaaaggagtttgagcaatgtatgattctcaaattgggcagcccctgaatcacagcagattcagagagacccagcatatccacagagacccagcatattcacgtggtggaagatttatggacagcaaaatgaaagtgaggtacagaaacaaccagattggttacagatcagcgtttgtctcatttgaacgtggttggaacagttggctacatttgattggccaaaattcagtgattggcactggtgtggtctacgttcgatttacacctccacttgttacagttcacaatgtacagaaaacctttaggccgaacttaaatatgtaaggaggcagctttagattaaacttgacttaacactagctaccacttcttacctacataactttgggcaagttgtttggcctcactggacctcagtttacttatccagtggggataacaagatcaactttatagggtgaaggagtgaaataacctgtgtaaaatgttccatgcagtgcctggcacacaggaaacctcatcaaacattggctatttattttgttttgcctttaggtcctttagatatactttttttttttttttttttgagacgagtctcactttgtcgcccaggctggagtgtagtggcgcaatctgggctcactgcaagctccgcctcccgggttcacgccattctcctgcctgagcctcccaagtagctgggactacaggcgcccgccaccatgcctggctaattttttgtattttaatagagatggggtttcaccgtgttagccaggatggtctcgatctcctgacctcatgatccgcccgcctcggcctcccaaagtgttgggattacaggcgtgagccgcgcccggcctttttttgtttgtttttgttttgagacgctctgttgcctaggctggagggcaatggcgtggtctcggctcactgtgatctccgcctcaagcaattctcctgcctcagcctcccgagtagctaggattacaggcatgcaccaccacacccgggtaatttttgtatttttagtagggacggggtttcaccatggccagcctggtctcgaactccttacctcaggtgattcttccgccttggccttccaacgtgctgggattacaggcgtgagccaccacacccggcctgcctttacgtatactttttgagtgcttcccttttcactttgtttttcttccatttccttttccccaagagaagaataaaaggatttttgtaaactttttttatttttattttgggacggagtctttggtctgtcgcccaggctggagtgcaatggcgcgatttcggctcactgcgacctccgcctcccaggttcaagcgattctcctgtcccagctttccgagtagctgggattacaggcacagcgccaccaggcccagctaatttttgtatttttagtagagacggggttttgccatgttggccaggctggtctcgaactcctgacctcaggtgatccgccagcctcggcctctgaaagtgctgggattacaggcgtgagccaccgcgcccggccttttgtaaactgttaagtccattttttctgaggaaaagtgactaatttttaagggataaagcagtgaaagtaggctgaggtcacggggcacgaagggaagaaaaggttgggagcgaaaagaactctagtggcggacagtagtgggcaggaccagctgacatccaagagaagccctgacctgagagatcgatctggcctccgggagtggagacagaggtaccgcctgggtgggagccggaacggattcgattccaacaggctgagaaaggagaatgtccccgtaaaggagctaggcctgaaataaggggtgtggccgtagctggatggaagagtgagggaggagtagaagcgtggcctagaccagcagcaaaagagggcgggcccagggccgcccgaggcgtggtcccagggccgggctgggcgagtcagaggctcgggaaggggcgtggatccccggaggcggtccccgggttgcagtgagggaagtgggccgggaggagagatgggcggtgaagaggcccggccctgccagggaggcgggcggatccgtggcagtgaccagaaggggccggaagggggtggccgccggccgggccccgccctggggccgcctccccgcgggttccgttggctgtggcggcagctgacgcttgtggcggcggtggcttcggggtgggcgtaagatggcgacagcagcgcagggacccctaagcttgctgtggggctggctgtggagcgagcgcttctggctacccgagaacgtgagctgggctgatctggaggggccggccgacggctacggttacccccgcggccggcacatcctctcggtgttcccgctggcggcgggcatcttcttcgtgaggctgctcttcgagcggtgagagcccgggagcgagcggctcgggggccgggcgcgggccgggggcgccccgctgtgggaagggccgagggccggaagcagaactgcaaggaaagcccggaagcaggggctgggggagcttgggccgcggcgggtgatgctaggcgcgtgggcgaggtggtagcctagatggagaaggagtttggggcgtgggcaagagaaagagtgagggtctaggggaatgctgggccccttcaatgttagatccggagttggattgggggggtcatataggcctcctcccaacctccaagggtcctacagatgaggaaacaggttcagtgtgagctctggcagaggccccgaagagagggataggaaggggccaggagaaccagagctagttgtgaccatggaagccgaggggtcaacgcaagggccagacgttccaagggaaaggaatggactcatcagactcttaagatttgttaggacgcttgagtttccgagaattggggggaacaggattagtttggccctaagagttggtttggtatgtcaactcatgcacgtttgttggtaggagggtagaaatctggttgggatagggtgtggtggagccctaggcttccaaagtaatggaaagatgtcagattagttgcagaacaggccttggggcctgaaatggaaggaggagtgtgttcgaagggatggaggagagccacagggctttatcagaggacagctatattgagccagattcttttttcttttcttttttttttttttttttttgagacagagtttcgctcttgttgcccaggctggcgtg

SEQ ID NO: 5764 - DNA, 6000 bp, Homo sapiens
gttgcagtgagccaagattgcgccactgcattttagcctgggtgacagagcaagactctgtctcagaaaaaaaaaaaaaaaaaattctgttttatttcagcactttggaaggccaaggcaggtggatcccttgagtcctgaagtttgaaaccagcctgggcaatatagggagaccctgttttcttgctgtgtccaactacctagaacaaccattgagtcaggagaaagaattatggatctcctgcccagggacccagatgaaaggtctctttgcttcagggctctcttaataaaaaaaagaaaagaaaaaatattctggttgcaacctacagttttttttttttcgctggaatgaagtggtgccatctcagctcactgcaacctctgcctcctgggttcaagcaattctcctgcctgagcctcccaagtggctgggactacaggcacctaccaccacacccagctaacttttgtatttttattagaaacagggtttcaccatgttggccaggctggtcccaaactcctgagctcaagggatcttcccgccttggcctcccaaagtgctgggattacaggcgtgaaccactgtgcctggccgcaatccacagtggttttttttgtttttttttttaattttttttttcagagacagggtcttgctctgttgcccaagttggagtgcatttgcatgatcacagttcactgcagtcttgaactcctggagttttctgttcttctgtgactaccctatgttattcttgtctcaattttttaatggaagggaattgtttaaggtgtacaagatggaggtcccaatatggtgtggtggttgagtcttggctcgtgggtctaacagatttgtgttcaaagcctggctttgccactaactagctgtgtccttaggcaaattatactccaagtctcagattcctaatttgcaaaatgagaataataataaataatacttcctgccccattagtttattatgaggattgtttttttggtagagtcatggtctcgctatgttgcccaggctgttttcaaactcctggcctcaagtgatctgcctgcctcggcctcccaaagtgctgggattgcaggcgtgaatttttgtgccagcctactacaaggattaatgcttgtgaagtgttaaatatagcgtttggtacacaataaaaattcaattaaggttgtcagttactcttaagtataaattggggaccaagaaggcaaaaatggagtgtgttttttgcagatggacggaggggagccaggacacagctcagcttgctcatgctcagagagttaagctgctgaccctgaaggcagggggcacacaactgtatgtgggagccagactaagcagtcgagacagggcagacagtgtgagaaagctgttgatgagagctgctgctgaataaaatcatctttcacctgtctacagctccccaagtgttctttctgctcatccacccactacctccggacctcaacatgacctttggcgtagtctaaacctgacactcataacagttacagatttctttgtcccttctacactcccacttttttgagacagggtcttgctctgtcgcagaggctggagtgctctggtgtgatcacgacgcactgcagccttgacctcctagcctcaaatgatcctcccacctcagcctcccaagaagctgggatgttccacaggcacgttccactacactcaggtaattttaaaattttttgtagagagggggtctccttatgttgcccagggtaagaattcctaaactcaaataggctttttcctgccaagactttagttcgtgggtgattttacaggtgcttctattttcccttcaagtggaacaaattggcccccagtccaatctgcagagacagctttgccttggggaagttacctgatgtagaacaaggacaggagacaggtcaagttgtagttatttgactttcgtgattaagagagccctgaagcaaagagacctttcatctggatccctgggcaggagatccataattctttctcctgactcaatggttgttctaggtaggaaccagaaccacttgctggaagcctgcattgacttatttgaatcgattactgcttttctttcttttccattctaagctattatgtttttatggtactaagcagattttcttgaaaacttctagaaaactgcctgctacctgcaagaaactgttttcttctctcctgtattttacgccaccccaatgcttctcctatgcagctttgtcgtctaagttatttccctgaggcaaaatttccccattctttcagctcccctcctcccagattgagaaattctaggcttgccctggacttctgtcttgtagtctctgggtttttttcctttctttttcttttccatcaggcaccaagtccggagtttgcgtggctctgatgtctgctcgtggatcactgattgaccaggctgaagccagagggtcctttagatcccgagggataatagagcaggcagcatttccacccacgttctgagactcctcataattgcctcagtgctgcacgtacctatatggaaaatacaagtgcactgtcaggcttggggttaatggtttcacctcacgtctcagaggagcagagtcctagtgcacctgtggagcctgaaccagctgcactccaagaggagcagagaagggaagcaatttcttactccacccctttcaaccactggcactcacaggcttgccacctactcttgctcctgccaaatggtacagagatgaaatcttagaataaaatttttgaactcaataaattgttaattaatatctaggagtggcagatatataatgcttctcttttcacgacaggtcaaagatgaaatctgattaggctttggagggcgtggtttgcctcttgaaattccttgctcgtctttagaaagctgtgttgcttagagcacccaaaagtgccctttatctaactgagggaggcgcacttgtcttcatatatagaggcaggagctggcattgggaaagtcaaactagttctgcaccatgaggaagaagcagctgaagacggaggcagctccacactgtgaactaagtaagtagcccagggaagctgcccagctgagcagacctgaaagggtgacaagtacagctctagcaattttattttctagttataatagaagttgccaaaggaaaggttccgatctggaggaacttcatcaaacctttctgaaactccacagatgtactgtagcgagaatctcagaactaatttgtgcattttcttttttctccaggagaaattctgtatgaaaaccaacctgctccaggaagccaagccccccccccccacttttttttggtccccgagtttgtttttacttcgcactttatttggatttttctctttgcagttcacgctcctttcctcatttcttggtctctcttactaatgaaattttctcctagctgtttttacgtgaataaagaagctcaattacctttaatgctgtaagcagtgcgaggggtcggggagtgagggtggcgggaggatctaatgtttttggtggctgtaaacgacattgcagaaaattacggtaatttgttaggccatttattccctcttcaccagtttggcagtctcatcttcagagcaaaagatacggtgtgaggctgaaactggcgatagagtgggattgcttttgggtaggtaggatgaagtctggggagaatcgagtcagctgggcgaggaggaaaacaattcactacggaggcttgggaggacacctaaggcggtcaaactggctgcactagctgatgtttctcggttcctcccaggtgtggggtgctcttggtggggcagcagatactatgatgtggctctgggggcgcgaggaaatgttccttccaggtggctatcctttttttttgagacagggttttgctctgccacccaggctggagtgcagtggcacgatcttgtctcaccgcagcctccacctcccaggcccaagtgattctcccacctcagcccccgagtagctgggaccacaggcgggcgccgtgatgcctggctaatttttttttttttttagacggagttttcgctcttgtttccaaggctggagtgcaatggcgcgatctcggctcactgcacctccgcctcccgggttcaagcgattctcttgcctcagcctcccgagtagctgggattacaggcatgcgccaccacgcccggctaattttgtatttttagtaaagacggggtttctccatgttggtcaggctggtctcaaactcccgatctcaggtgattcgcccgcctgggccctccaaagtgctgggagtacaggcgtgagccaccgcgcccggcctttgcttggctaattttaaaattttttgtagagaccgggtctcactatgttgcccaggctggtatcgaactcctggactcaagtgatcctcccgcctcggtctcccaaagtgctgggcattacaagtgtgagcctccgcgcctggcctggctaccctttacaggatagagctatacctcgtagcttgattgtcagtacctaacgtggcgccacggcgaactagggcaggaatcttatctgtccccagactgctagcggactggagctccccagtccaggggctgtgtgggtctggccaacgcaagcagcaactaggcagcatgcagctcccgccgggtgccccaggggccgccgcgtgccccaggggccgccgcatccagactccgcgtgggcggagcctaggtccctggtctgcgggccacgcatcccggccgctgcagggactccagccaatagggatgtgcggctgccgtcctgtcgaccaatcgcggggaggggagggcgttagccagcgtggcgctggctcccggaatatggagccctgggcgcgggggcggcgtgtcaggtggttgcggagctggtaaggtgaggggaaggcaaggtcaggggtcacggcattccgctcgctggcagggaggggcgcggggcggctcgagggcctgtgtcgggggtcaggctccggggctaggatgcgacaccggctcgccgtgcggggctgtgaggggaggtgtggccagggagggcctcaggcccagagtccaggactgatggagtcgcgccattcagagaaagacccaaagatgggggcagggagggaacgccggaggtcgcgggggtctcgccccttccccgccgcggcctaggacacatggcccagctcccagctgcaccggatggcgcgcccggcctgtgtcggggtgcgctgacctgcttcgacgcctcgaaagaggccgacgggcacagggcaaggtctttcgtggcctcttcgtcggcgccgcagggggccgggctgctctccggggcctcccgccgccccgcttcaacaaaagactcattataacctaaccgacttcagggagcgccttctgtgtgaatagcctgcatacgcggctcagtaattgtgggtagattggttttaaggctgtttgtgtagctctcagggaccctctggattccaggctccaatgagcagggtttttctacagggggatattgcacatatgtaagtgggctggatggctctcccagctgtgcgtttcatgtgtccccacttttaaagctaccgcttaaatgtgacatctcttgcaaaagcaaaaattatatggaaggagagtttgcaaggggagataggcttctaaaaacttgctggcctcaattttagtgactgttggtgaaaaatggagaagctatgtttacactgacttctggaacccgaagccccaccagttcgcatgatttcttggctttgtaaatctttgagcatgttgtttgcctctttcttcttttgttccacgtacttaaaatggggattgataatatcagtcttacagggttgttggtatgaaattagttaataaacaacaaagtacttagaactcttgatgt

SEQ ID NO: 5765 - DNA, 6000 bp, Homo sapiens
gttattaagagaacaggactaggaacaagtgacaagctctggacattcgagagtggggtacttggggagtggggttggaagttgtgtgcattgcgctcgctgaagagacagcctgaaagaatgggatgaatgggcagcaagcctggtagagaaggccaggtagaggttccaggcagaggagtggcacccaggaagcctagtgagaagaggatgagctggggacggagaggtggtgggcctgtgctgggcgccccctaggggagtcaggggcagttgagaaaggttagggagatggccttaagggccatgtgcctctgtcctcctgagcctctctctttctctctccattgtaggagctgaaagggccattactctgaagatggagattccaggcccgatgcctcccttaatccgagagatgctggagaaccctgaaatgtttgaggatgactcctcgcagcctggtccccaccccaatgcctctagcgaggatgaggttcctgggggccagggcaaagggggcctgaagtccccagcctgaccagggcccctgacctccccgctgtgggggttggggcttcaggcagcagactgaccatctcccagaccgccagtgactgggggaggacctgctctgccctctccccaccccttccaatgagctccttgtttttgccaaagtttctaggggtgcctctgtgttcatccccttcctgatctaaccggctccctcgccagtcccgggggcctgccctgctcccaccaggagagagggcaaagggatgagcctgggtttggactctaaaatctcagcactgccccatgggtcctagacttcccagggcaagaggaagaccctgccattccacagccccttcctctgccaggtgcttggctctctgagagcaaacaggaacactagagaccaaaaaggggacaaaggagaagggctgagcccaccttcttgctcctacccttggtgcctaatgctgtgtgatgcacctgcagggtgtgtgctagcctctgtgccccgtccttgtgccaggtcaaggtgggggcaggctgggccctgcatttctggggcaggaacagagggtgaaagggacagatagatgcaggtccattctgcacctcttggctcgggtgcagagttcaccctgtgccctccgttataagtccctcccccagccctgtcatgtgccttgggctcctcctgccctccatctcagccattggggcagggaccctcctacactacagaggggccaggggatccctctctccctagtgccttccaccctttactccccagagcagcttggcccagggaggggggatgctgcttagctgatcccgccctgacccagaggaagcctctatttatttattagcttttgtttacaccgtggaattgaccccttcctccaggggtcttgggtgggggagcccagggcccctgtgacccctcctttcttcctccaatccccagtttgtatttagctgccaaataagattcccattggctccctgtgttctcttggggggtcagggtgctgtcccctcccctctgtttacatctcccctctaccccgctgtatcgcatattgctgagttttctatttttgcaaaataaagtgatggaaactcatgagatgtggctccctttaggaggtggtagggaaatgaccagctgacctggtgagggagctgagtgaggagggaaagcttgtaattgattggactttgcagctttcttggtagaagaaaacaggatgaagtgtgcctggattgtggtggggacaggatgggggaaagggagcccatggggactcaccctgagtgaccgggtttcccacaaccaccaggtgtgggttcagaatctcactctgtcgcccatgctggagtgcagtggtgtgatctcggcttactgtaacctccacttcccaggttcaagcaattctcttgcctcagcctcccgagtagctgcaattacaggggtgcaccaccacgcccagctaattttttttatttttagtagagacaggtttcgccatgttggccaggctggtctcgaactcctgacctcaggtgatccgcctgccttggactcccaaagtgctgggattacaggcgtgagccactgcgtctagcttggtgtgggttcttatgttggatcctgtggatctctgggagggcatgaatggacttcagaggtctgtaagcctgtctccacctccagttatgcatatgtgcatatctgcttttctctggggaaggagtccattgaagttttatttatctttttgtttttcattttttttcttgagacggaatttcactcctgttgcccagtctggagtgcagtggtgtgatcttggctcactgcaacttctgcctcccgggttcaagcgattctcctgcctcagcctcccaagtagctgggattacaggggcgcaccaccatgctcagctaatttttgtatttttagtagagatggggtttcaccatgttggctaggctggtctcgaactcctgacctcaagtgatccacctacttcagcctcccaaagtgttgagattacaggcgtgagccaccatgcctgccctgaagtttcatttagttctcatgagggctcctggccccagaagagaagaagcccgcatctaagctacagtgttactgttttacaccagcccctcacccagggagccctctggccttctgtccccaaccaccctgctatcaccttataccttactccccccaccctctctgttcccactcttcaccccatgacctccactcactgccacctgcactgttaccttctttccgaatatctgtccttgctcccacacgccttccctctgcaacacgcctttgcagtgcctttggcctctactgctgcaccctgtactcttcccttcgccctctgtgactcccctcaagcccctcctccgtgtcctaccttccctgggacagtgccttgcctaccttgttcctggctctcttcattggtgacctgtggttatgacaaaaaagttgaggatgtgggagtaggggagagaagagtggagggcggaaagcagaagaagaaagtgaaagaagctctagaggaaaccacagggcctgtggggaaggagggtcattgccgtggtaacccctggttgtgggggaagggtataggtcctggctatcccatagcctgaggccagccaagcccacccagagaaagagcccctcctctccaattgtcccctcctagcagctacacctctgcaatccatctgacatttattgagcacctactataagatgggcacttggctaggtgtggtggctccagcagggaagccttgtagagccagtccctgcctacaaggagtgctccttctggtaggggagatcgacctgtgaacacagacctcatgtctagttccctctcaaagctcttagtgatctgtatgggccaggagcaaatcccattaatattttcctgctctccctacgggcttcatccttgccttggcttcagctgttgttcctgcactctctgcttctcccagttcacctcctccacccctttcccaggatccactactgtgttggctcctggttccccaatcacatgctctgagcctggccctatgcctctctcttccaagtttccagttgtgtggaccttgaatttctcaaagcctcttcacttctcacctctgctacttctcatccctactaattctcttatcaagcccttacttagtatgtgccaggtagtcttgtaggcaattgatatgaattatctcttttaattctcacgacaatcctgtgagtcttgctggacagatgagaaaacagctgcaggcaggtttaagtaactcagctaagctccttactactagtaagtagtagagccaggatttgaactctagcaacttggctccagagcctatgtagtcaagcacacttatataatgtatcctgggttttcaaaatgaacaagtctgtaatttctggcctctctacagtacttactgcccctattccctcctatcatgttccttcctatataagtaaatggagagatcatgaattttggaggcaggcagacctggatttaaatcccagaccagccgagtgtgcctgtaatcccagctactcaggaggccaaagtgggaggattgcttgagtccaggagttacagaccagcctgggcaacacagcaagaccctgtctcaaaaataaaaaacaggctgggcatggtggcccacacctgtaatcccagcactttgggaggccgaggtgggcagatcaattgaggtcaagagtttgagaccagcctggccaacatggtgaaaccccgtctctattaagaatataaaacgttgctgggcatggtagtgcacccctgtaatcccagctattcgggaggctgaggcaggagaatcgcttgaacctgggaggcggagtttgcagtgagctgagattgtgccatgggacagtgagctgagattgtgcctgggaaacagagcaagaccctgtctcaaaagttaaattaaattaaaataaaaaaaataaaataataaaaatttaaaataaaaatcttttttcttttttttttttaaatcctagactagctacttactagctgtgggaccttgggcaaaattctttatttcctgcttccaagcctcaatctctgcatctgtaaaattggggcttgggggaatattaacccctatcttatgagattgttgtgagggttaattgtaatatgttacgttcaacacatgacaggggttcaataaatgggcttctttcttccagatctctgtattgtccactcccttggctcagccccacccctatctgcaccaccttctagatcagtcacccccaccaaccccaaatcttccccaccctggggagtgtcacttcctcctctgccgtctcccagatcagtacacaaaggctgctgctgccgccagaggaaggactgctctgcacgcacctgtgagtaccagggcaccagcccttctgcctcctctccttacaagctctggcccacctggtcccaacctcttgggaagagggctctgacctggataccgagggtcctgtccagacttgagaaaggctctgaactcctttctgcattcctaagatcccctgacctggttccctcctccagtttcacagtacccccacctccacctctccaaaagcccaatctctcctgcatcagtttcccatgagtgggtctggaggcagggatgtatatgagtgctgtcatctgagtgcctgccatgtgccaaggactataccgaagtagggcaggtataccgattatactgagggagggttcttccaacatcacccccagctgctatccctaatgctctgccttcagctcagacttcttcctaatcggcaccttggtcacagactccactgtcctgggacactgaggcccagcagctcagttccgtcccctccttgtgactcccagtgggcagcagagggttctgcttgatttggaaggtagggatgggtttggaagaggctctgtttctcagctgctgaggggggtcacagggtgtgtactggagtcagaatggagtccagaaaaatggaaataaccacttggtcccagagagagaagggaagactgcagaatacccctaaggaaagagaaatgggattaggcagagcccaccagggctagtggggagagaacacaacttttgatggagatagtgcctgggttggagggaggaaaggagaaagcacagcagaggcctggccctgccctgtcctgccctgcccctagttcactgggtgaccctggcctcatggaatttaggtttccatttgtaaaaagagtgggatggagtagtagattcagccattctatagttaggaacagaggggaaaaggaagtaaaatagccctatgaagaagtggagcagagaaaagcagcagagagatgcaatagaag

SEQ ID NO: 5766 - DNA, 6000 bp, Homo sapiens
ggtgtggtggtgcacacctgtagtcccagctacttgggaggctgaggcaggagaattgcttgaacccaggaggcggaggttgcagtgagccaagatcatgccactgcactccagcatgggcgacaagagcaaaactccacctcccccacaaaaataattagggcgtggtttaatgggtgtccattttattactatgcttcatagtttatataaaatgtcagttctggaaaagttgttttgctttgttcacgcctgtgtcctcaacaccaagaacagtgcctagcacataggagatgctcaaaatatatgtgttgaataaatggatatacattacttgtattattttatatgaatcaaatatttcataatttttttttcaaacattttgtttttattttttgtagcaatggggtctcgctatgttgcccaagctggtctcaaactcctgggctcatgcaatctccctgcctcagcttcccaaagtgctgggattgcaggcatgagccaccatgcctagctaattttcttaaaaggaaaaagcctactttaattatgttgcccccttgactattctagcttgaagtcatactgcttccacaactcctattactcatatagcctattaaatcctgctgcatattatagttatatgtgtacacgtctttcttactgattttaaatttatgaagacaatggagtatgctttctcattttttatacccattcacaatatgtagcacaatactttgcacatagcagatgctcaataaatattggttgtggctgggcatggtggctcacacctgtaatcccaacactttgggaggctgaggtaggcagatcgcttgagctcaggagttcaaggccagcctgggcaacatagtgaaaccctatccttacaggaaatacaaaaattagccgggcatggtggcgcatgcctgtagttccagctacttgtgaggctgaggcaggtggatcaattgaacccaggaggtcgaggctgcagtgagccatgatcgtgtcaccgcaccccagcctgggtaacagaacaagaccctgtctccaaaaaataaaataaattaaaaaataaacaaattcaaaggaaggtgaagttcttccccagcaaaaatgtttttggtcatccctctgccaccatctctcctactgattcctccctcagaagcctggataccagtgatcctttcccttccttcatctactgttttctttctttagaagtagggaggtttaccgatgtctcacagtcctgatgtcttagggaattgatttagcaaggaaaagtagaaaatatatcagtcagttcccaccagcccatcacagcccaggagcttgaaattaacaatcactaataaatagagaagctcaatatgtataaagtattggcagtgcaaagtttccactttaacttgcagaaaagtgcctgtttagcagaaagaaagaaaatcctggaaagttaacactggatgaaatcttagagatcacctacttctctccctgatttttccaaatgaggaaactaaagcttcgagagatgaagtaactagcatagttattcaactatttagtagcagggctaggactagactccagtctcctgcctcgaagacagctgttctatccatgccacttgctggcaacatgtgcatctagcaaaacacatcataaagtatcctcatcttaagccatcaggaatggaaatcaaaccatttaaacccttcctcttctctctagcaatattttttcttcgcatttctctgtgccctggtctctctctctctctctctctctctctctctctctctctctcgtttttaaaatcactcctgtttctttcgtggctctttctcattgtggcatgcctgcatgagtatcttgatttttctgctctaagctatggtttcttgtccaaagaaacatatataaacaaatcaaaacccttccttggtgacctttgtagaaaaggacacttggaatttctatatgagagaagctgaacctctctcttagcctatccagtcaattaaaatgagtctgtggcccccctgagggttgttaaccaatcctaagaaaggaaagatcaatctcatttcttcgtcaccactgggcagggaggctgccaaccagtcagaatctgccactcacagtcattaaaaaaactggccaatcagtccaaccttgttatatggtctggtaggaaaagaaagggactgattggaaaggatagttctgtctccacaccctttccttcctggaccccggttttccctttgtgaagtgaaagaaggacccttccccaagcctatagttaagaagatcctccgaccctcagctaagcttctcttggatcttttgctgtcttcaaattcacccctccccttacaaacctcctttttggagcctcactgctcccttgcggatttgatttcttgcttcaagcctcgtagtaatagtcccaggattctcagcctcccctcagatctccactcaccagcaagtaaaataacttgttttgtatgacttatgcaggtgaaaacgtttttaaagtgtagttgagtctctttcaggagatactatctcaaggaccttgcaataaacagtccatataggtagcagtgcagaattgagttgcaatgcccttaactatagaagcagtgatgatgatggtgatgatggtggtgatggtggtggtggtggtggtggtggtgacgatgatgattttaatgctagcaattactgaactcttactgggtaccaagtaccttgctaaaagcttcatatgtattatcccaatattggctgtgtgataagtactattattcttctcaatttacataggaggaaatagatttagagggggttaaacagctagctcaagatcacacagcaatttgggaacccagatttgtctgaacgcagaacccattattctatgagggcaagggagtgttaaacatcgcaggctgtaacaacttttggaaagagccagctttagcttcctcccaggccccttctctgatcctcctctgggattgttagccatatctgagtgtctaaattgtcgcaacagctgcaacagccgtttgggggtggtggctcctaagaactgtggactttctctgccactgaggatgtgaagctgacagcttaaaagaattccgttttggtgggaatggagatgtctggagacctcaggggataaacttgtgtctttgctagcctgtctttctcctaacagcatctccacagtgcctggcaccacttggtacttgataaatacctgttgattgattcccaaagatcccagttccatttcccacgtacctgcccgctcggggcgcaatcaacaactaaaactggagatttggggatttcagaggaacctgtgagaatcctgatggagctggaaatgcgaatttaggaaagacaggcagtctaccaccctcctcttctcgcccgcttctcctatttctccccactccttcccctccctttcaggagctcagggccataaaaatgcagatggaggatcggtgtgaaataacgggcccatataaatccctctgccgcccgcctgcaagatggattggccgcattgaaattcctccgcgaggataattaaactcggggcctcatccgggcaaaattacattcctgtaatggcgtcgctcggggtcccgggaaattgctccgtgggctttcagcggcggtttttatcgccggccggggtgtgcctgtctgcggctcgcctctcctccgggaccgtaaagctgctgccgtgatttatcctccccttctcccaaatccgattaaatggaggagctcggggccggggcgccgcggggcccgggagccgggagggggcggcgggaaggacggggccaaggaggggaggacaaacggcccctcagagagtggcggatttgcctttatttacagccgcggctttctttttattttttattttttatggggtttggtgagcttttcccgtctttctcgtgctgcgttcaagcacgatgcagggacggcaggggtttggaactggataggccttgtcgccctgttccaaagggcagggcaggtcctgtctgggagacaaggaggcctaggaaagatgagggccaggaagcctcccccacctccttccatcaggggaagggcgagcgaaaggggagagaaaacccacgttcaggagagcatgggggcgggaggggagggcgctgcttatcccaactcgcgtagttgaaacctgagcagaggctcgggcaagcctggagtgacctcgcaaccttacagcgggtcgcaggtgcccgttattcctagactgtcccaggagccaggaaagagggattcggatcatatttaaccctatcttctggctcgctgatgctgcttctctcatggtttatcaccggaatggaaaggaggaaacggggagtgggggaaagggcgaagccaccagaagcagctgcggcattttgctgactattcgcccatggagccggtttgccatccagtgatgccagagtcccggcgcgacagaaagcaggactcccaagatcttcctcctgctgcattttaggcactgaaccccaatcccgaccgtatgttaacactgaattctgagtaggagttttgttttggcagtgtgacgactgcgcatgctcggaaaggggacgcaagtccgagatcccaaacgcggtacagaccaaaccgcagtccacgttacggatcggcttactccgcggagttggcctcatttctgcagtcggcgctccctgtagtttctcctctcgaacgccaggtggagcaaccggccggataccgccacagccctggcaggcggcgctgtgatgcctgagctgatcctgtatgttgcaatcactctatccgtggctgagcgactcgttggcccgggtcacgcatgcgctgagccttcctttcgctcttcccgctgctccgcccctctctgtcttctctgcagtgggagcaggtaaggccttgggacctagagccctctgtgcgctgcgcacgcgcgcgggacacctcaccttgcgcggatgctttgaggcgcttaccttgcgtgctcccaccctggtcctctcgccctttcttgcttccgctatcccttagccttagagttggctcttccgcgtgccggtgacctccaaccgcgcgggcctggcgccatcttggatgtctcgcagggggaggataccttggagctggccaaagttagatcctggagtgctgcttttcacctgttccacccagtccctgcaaacactcttttctcgccctctggccctttcagattgtgacaacccccaggctctcccctcctatctctgctttctcttctcatcctgacttgtgccttctttattctgaaatctccagactttaggccccagaacctcaggtgctccgagcaatggagatagtggatcgtctaaagtcaccaatccctctagtcagcacccctcaatttaaaaagtaaaccttgaacatggtagaagtgggaaaaaaagccaaaacatcgcctcccgttaggttgtggcttgggatagctaaggcagaagagagaggctggttgctttggaatcactagttatttaccagtacctttctcgcatcccggcacgctggtgaagttgtaaaagtcacaaatggtgggctagagatgagggtttctgttgaggcagcaggcccagaaaggtggggtaaggccaagctagtggggccagcatgagaccctgcctgccagctttcctgtgaaggattaattaacctccccagattctgctgttacaaggaaaagaaggtttaaggaaaggaatagttaagttactacccctgtgactcatctacactgaggaaaaagcccgtgatgattttggagtcctgattctggatagtgcctttgcccaagttgtaggctaacaattgcagagttgccatggttagatagccaatggt

SEQ ID NO: 5767 - DNA, 6000 bp, Homo sapiens
ttggaagagaagacattagcaagagtgggggaaattccttcccattgatctgcttaatctggattcctgggtcttatatcttgtatcccagtgtcctcttagctctgctcctttcctgtcagtgcccatcccctagtccctgtctccatgtgcctctccaacctagtctcgcctggaaaaactcccagtttggtctccacagaggtatctagtcacaggttttttttgtttgtttgtttgttttgagtctgagtctctctctgtcgcccaggctggagtgcaatgatgctatctcggctcactgccacctccacctcccgggttcaaacgattctcctgcctcaaactcctgagtagctgggattacaggctcccgccaccatgcccagctaattttttgtatttttagtagagacggggtttcaccatgttaaccaggctggtctcaaactcctgacctcaggtgatccacccgcctcagcctcccaaagtgctgagattacaggcgtgagccacgacatctggctctagtcacagtcttaatcactgggttcggagtcctggagcaacaatagaacccacgaatcttattgctaaggtctgcttttgtcaccctagtaaacatcttccatccacccctcctgtgctctgtgcaaactggggatagaaaaaggagaggagcctgggtttattttaggcataggacacaggggaggggtttctcctgggtcagacagcgggtagggatggtggaggtgactcacagatgatagagccctcagttcctctaggcagagacctgagtcagagaagcaacagagcctgagggtgcaaatggtctactcctgtactttccaatttccctttcttagacatacacgcacacacacacagaacaactccccagcttcagcagtctctggatcctggtataactgggctcctattctacttctggaaatccccccacccccgccttcagcttcataattttcctaaatatcccaccttccttccctctgtgagatccaacttctttgtttgcttgtttgtttttgtcttgttttgtttttgagatggagtctcgttctgtcacccaggctggagtgcaatggtgcaatctcaggtcactgcaacctctgcctcccaaggttcaagcaattctcctgcctcagcctcccaagtagctgggattacaggcacccaccaccacgcgtggctaatttttgtatttttactagagacggggtttcaccatgttggccaagctagtctcaaacttctgacctcgtgatctacccaccatggcctcccaaagtgctgggattacaggcatgagccactgcacccagcctaggaagttttatttcatggacacctcagcctctaccacctctacccaatcagactttttacagcccaacaagacctgagtctgtttcttaaaaccaaggcatccagccttagtgttctcagaatttccaggcatttgagaatcttaaagaagccactgagtctcaccccagagaaatcacatgcatataaacaaaaacttccatccagtttcagaggattaatggattgtatacccaatcttcccccaccccaccccaaggacaatggatctaggttataattcctactctagaatcttcccccatacctctgtagaaacccagccggtttacagggctgacattgcagtgggaaaagcaacggctctgaaatctactgggattgggtttggatttacctctgcccctttctgttggccttcgcttagtcacttctctcctttaggcttcgatttcctaacagtaaaatgaggatcatgataccttcagtgctggataagttgggataaatgggatagaggcagattaaaggtcaagcccagggccaggaatacagcatgtgctaaataaaccattatcagtactccccacccctcttccacactactaaaattcagcatgacccctggcgttagaacttgcacctgtatcctgaactcctctgtggaaattcactcttgtggttctaaaactccagccttcagggcaagcaggctggcgacaacaggagcctgctgagtgtcctggccttgcccttcacccttcttcctctccatcaagcagaccatgattaataatggtcagtcatcacagcaaatcattcctactgagcaatgaagggacagagggtaccaaagaggtcaggtttaagagaaaaagcagaggcacttggagacacacaaacttggccagagaaaggctgagagatatacaagatagaaagaaaaagctgagaggagatagatcatttagaggggcagtgggcttagaggagaaggcactgggtctggagtctaaacacttaggttctaggctcaccgctaactggctagccatatgaccctggacaaatcacttcatctctctacacccatttcctcttctgaaggagaagattggactgatggcttctatcccctcctcactggcctttctaggtcagcttccaggcctggaggtctgtgctgaagtagctctaattaggaggggaccccaagttaaggacgaacccagagcagaggaagagaggatcaggcaaaggcaggcatggtgagaggaaaggcaggaggtgttggggccactgggagaggacttataagggcagaaagagccaagagaggagggatattggggagagtagaaaggccagccaaagaatgactaaggggctcccggtgtaaacaggagcagggaatggacagggagggggcctgtttgagttggccaaggctaggggtggagtggggaggaggactggggcaggacgctatgtcccctgtcccccaccaaggctcctgggaggagctgagtcacacacctccttccctgcacccctccccacccccacccctaatctcccaaatcctgggaaaatctaaagagtttgcctagactgagaaaggagagtgtttggttcacacacgtgttttgctgggctaaaaagcaatcaggcctcagcccttctcctcccaaagggggttcccagcccatggcttgagtagctctcacctaaaggttgcctttttggcaatgctgggcttaaagatcctgacccagagattccctgggttcctcacctaagaaagggtcaggacttgcagatgtgagaatgggatacgggccagcattgccccacagtctggccagccagcctctcccttgggctgcagctggctctggaggggggcttttaaaaaagcagatgggtgatttgggacaggaagtggagtagcagagtgagggggagagtcatggcaggaaaaaaacattgactctgggcactcttattctgagcctttcagcccgaagtggggcaggggactggagaacagaagggacagggttgacaggatattattgacagggtattattctggaaagtgaggagtcctggaggaaagagactgaaaggacttgtagtcccctcccccagactaagataaaggctagaatcctgaaaagtgatctcatcacacagagcctgagcttggggaagaggtgggcagggggtcactgccttccctttctagagtcccttcctctacttccacaggggaatctgggaagaatggggtcctggctttccgctcccattgtttttttggtttttggtttttggattttttttttttttttttttttggatacagtcttgctctgtcacccaggctagagtgcagtggtgcaatcgcggctcattgcagtctctgcctcctgggttcaagtaattatcctgcctcagcttcccgagtagctgggattacaggtgcggaccaccacatctggataatttttgtatttttagtggagatgggttttgccatgttggccaggctggtcttgaactcctggcctcaggtgatctgctcacctcggcatcccaaagtgctgggattacaggtgtgagccaccgtgcctggccagagctcccagcgtttacagccattaggagctgaaggttgggtccctttgcaagactttccaccaccaccaccacctctcacaattctccaggtttgtaggaacccggccagtttaatcaagcaggtactgaggggccagccactcgcaggcttttggtcaactgtcagatccaaggaaggggctcagcagaggtttacataccctaggaccaagaagggggcaaactggagcagaatcctcctgatgaatgaccccaaactcctgggttttcaatactagcaagcttggaggaggaagcagcggaacttgaggagcccgtgtaggtcctctagcaagctgactgcgaacgctgtctctgtacctcaactgttgtgtcccaaatccagctggccagaacccaggcacccggcggccccggaaggcaagggggaatcccagttggccggacgccagaggagtctcctgtctctttagaccccaaagtctcctccctaaagcactgagggagaccccacacacatatacaggcttcctccgcccaccagaggtgattcctttcctcattaggaaattctccgctcccttttccgactcgttttccgagcgtttacgttgtacatctggaaaggaatggggaggaaggagggggaagcagagaggagggggaagaacccaaacccgcccagtctaacccagtccagacaaccggcttccagctggggctggggaaagggggttggaggggtgcgccccccccccacgccccttaggggtgggggacgcgggctcagagttccagggacccaggaatgcccccccgccagccccctcggcaggcggggggagggctcagccgggagtttggcaaactcctccccgcgttgagtcattcgcctctgggaggtttaggaagcggctccgggtcggtggccccaggacagggaagagcgggcgctatggggagccggacgccagagtcccctctccacgccgtgcagctgcgctggggcccccggcgccgacccccgctgctgccgctgctgttgctgctgctgccgccgccacccagggtcgggggcttcaacttagacgcggaggccccagcagtactctcggggcccccgggctccttcttcggattctcagtggagttttaccggccgggaacagacgggtgagtgaggagggctggagacgggatgggggtgggggagccgcctggagactgggggcgcggctggggtctggaggggaccagggcttaagtttgagggtggagtttgtaaggaatagagctgcagttgggggccctggctagagttgggggcccgcgctggagtagggagggcaccgtggcgggtgaggaggggccctggcgtttgagatcagtggggagacatgtgtccggtggggagaggacacggagctggagaagtctgggcaggggtctccgggccaagggagaggagagcgcgtgaatggagagctgagggtctctggctgaagtctgtgggctgctgggacctggggcgggtgggggcgcagagggggcgcagaggccgggaagggcttttgggggctccaggagacctcgggatccgtaggggccattgtgcggcgagagaacgggtagaagccgaatgagctacgtgtagtaggaggaaagtcaaagactgagggggtcggaaggttaaatgggggccagcctcatcctcccctcccccctcaactcagaccggggaaagacccgagagaggacggcggctccctctcctttctcctctgtctcctactcctccctccgcccccaatctctgttcaggcgaggggatccgagaactgggggcgagtgcggggaccctggcactggggccctggggctgggggcgaactcagccaagggcgggtgctgggatgtgtcgggaggggtgtgtgcgcgcgtgaaggggggtgggcggtttccctcttcctctggctcttgggaggaagagaaaagctggtt

SEQ ID NO: 5768 - DNA, 6000 bp, Homo sapiens
ctgcagttgaagctcagcttcacttgtccttggtagagatggacacaagtcgcatacatatctatctggagaatgactcttgaaatttgaagtctctttctgctcacctctccttacgatttcctactcagattattttcccttggactgaatgaatgcaactccacactcctttcttcactcatttccctcttcttttgaggtctctttcagagttagctttaattagcaagctccaaactgactggctgggccaaacagggctggaagctgctgagttgttaggggttggatgagggctgagggaggacacagagtgagtagacaaggcttcacatactgggagatctggctgggcttcaagagagggggttggtggtggtgtggctaagttccaaatgttggcctgaagccagtgctcaaagaaagggggcccttgagacagtccaaatggctccctttggtaagtgacctcccagtccttctcaagtgttaagggtttcttttggatcgtcaaagaccggagcggtcaagctgtttccccactgaattccctcaatcacatttatgttcttttcctcccagccactcccatggttcaagctttgactacaaccagaattcagaggcaggcagaaggattccagtgctggagaggtgagtgaagtaaaaaagttctcatggtgtgcatgttgggacggaaaagcctgaccttgggacataagctccaaggctctgttgccagatgaggtggagggagaagttagccctgaagtgtgtgttctggaagtgtttgcttgtaagctagagacaacagttgcaaaaagtgtgatttgagggagctgaaaaatactgatctcaaagtggggaagaagatgttgaaaagggaaggagctggagaaagcctcagcttccactcatacaaaagctaaagggctaaaatcttggctggatctggacatttctcaacgtctaaaattttggaaatttttataaagattattaatctttcatttttacatttaatttatttaaaaagttcagtttctcagtcatactagccacatttctttttctttttctttttttttgagacagagtctcactctgttgcccaggctgaagtacagtgtattaatctattccatggagtggagtggataatctattccatggattatcattttactttgttagtggtatccttagaagcacaaaatttttaaatttttttttttttttgaggcagagtctcactgtgtcccccaggctggagtgcagtggtgctatctctgctcactgcaggctccgccttctgggttcaagcgattcttgtgcctcagcctcctgagtagctgggattacaggtgtgtaccaccacgcccagctgatttttgtatttttagtagagatgggtttttgtcatattggccaggctggtctcaaactcctgacctcaagtgatccacctccctccctcccaaagtgctgggattaccatgtctggcttggaaattattttgaaataattatagatcagaggaagttgtaaaaatagcacatgaagtcttgtgtacctttcactcagtttcccctaatggtgacatcttatgtaactgtagcataaaatcaaaaccaaaaagttgatattggtacagtattgttaactggcctgcagacctcactcagttttcaccattttttacatgcatttatttgtttgtttgtagttctgtgcagttttatatcttgtatagatttggataatcaccaccacaatcaagatacaaaacccatcaccacaaaggaacccccttgtgctattcctttatgtttgtccccacccccctccatccttgtcccctggcagccagtaatctggtcttcatttctatagttttgtcattttgagaatggtatgcgagtggaataatacagtttcagcattttttgtttggagacagggtctcactctatcacccaggctggagtgcagtggcaagatcatggctcactgcagccttcacctcctgggctcaagtgacactcccgcctagcctcctgagtagctgggaccacagatttggctaacttttctattttttgtagagatgggggtctccctatgttgcccaggctggtctccaactcctgggctcaagtgatcctcctgccttggcctctcaaagtgctgggattgcaggcatgagccactgtgcccagctcagcattaatttttaatttaactaattcctaagctcttgactgaaatacaagaagttctctaacagtttatttattttaatattgagcttaccgcattctctggatccttctagtttcttttttttttctttttttctgatgtggagtctctgtcacccaggctggagtgcagtggtgccatctcagctcactgcaacctccgtctcctgggtttaagtgattcttgtgcctcagtctctggagtagctgggattacaggtacccgccaccacacccggctaatttttgtatttttagtagagacagggtttcaccgtgttggtccggctggtcttgaacttctgatctcaggtgatccgcctgcttcggcctcccaaagtgctgggattataggcgtgagccaccgcgcccggccccgtctagtttcttaatttccctcttcacctacgatattatcttccactccaacattctggtctcatttctccttgagagaaatctacatgtctaaatttactaggctggtctagcacgctcttgtgtgttcccctccctcctttgcccctctatttatagccaggctaattttgggtggcctctctctctcttctttcctgatctttcctcctgtggtggtgaggtgacttctcaaatatttggagagaggaggtcagaagcagattcttggcatctgatttcagccctggatcacagaagccagtggagtgggaatggagacaggcagaagctgcaggtgcagataggaggcagcttgggctctaaaggcattttgagctgggtcgggggcggggggacctgggcagggagtcagtagtcccagttctgtcctaattttgcaattctgcattcccatgtcagctcttctctactgtctggggctctgagatattaaaaaggatggggagggcatggtgaaagtagaatcctggtgccagccctgctgacagcatatgtatttccttatagtacctgtttagagatgtgttagtgctctggaggggatagccacaggtgtagtattggaaaacagagggccagacttccaaatgtctgttaacttatccaaggcaaagactgtcccagggcagcagagtaagaacccactttttttttgttttcaaagaagtataatcctgaacaatgaagtaggaaagacagaacacaggaagaggaaggaggtaggacacttattggaacttttaagaaagggaaagagaagaaagaatcgtaagaatatgatagtgtttgaagggcagagacaacactagaaacattgagaaatactctgagaaagattccaagtgtggcagagacaagaatgatgacaaaatagaatttgggatgagacaaaatcagatagtgagagagagaagggaagatggacagatgtatattcacaagaccaacaccagtaagcaaggggagtaggaaggggaagtgggagcattcgaggttcccattatgccaaattatttcctgtctctccttctggccccatttctgtatcggagttataaatagcagagagttggaaagtgtccccccacccccttgcctctgtcccagcctgagggaaagggagaggaagagggacaggccaatgggtccctgtggagatcccatctcagccccacccaggtcctgctgagccagtccaggactctgccccctcccatcccctttcatggataggaaatgtgcagtcctgggacgggtctggtagctggggacaccctttacatccctctgcctcttgggtccagtctctttcatctttgccttctttgacacccactcccctccccactgcttaatttcctcttcctgtaatcatccccagtcgttttcttttctcccttcattccatcccttgtcaattaatctcttgcccttctttcttcctctctattcctttcctttttccatttctccatttgctccccgtatctcccgagtttctctctctcttcttgcctctttttctctgttcccttgaatcctgacgatgtggctagcactgctgtggtcattgccgggctgggggcgggggatgggataggatgggggagggcagcggtctgatcccaacagcagaaagagtgctctatgtgaccatgggggaacagggagcactaagatgccacgctgcacccaggcccaggacggctcccctttcatttcctctctatctgcacatctctcttcccaggttgtcttttagcgtcttcccaacttctcatctcttaccctccttcctctgtttcagcccctctctttctatctgtacttctctccctccgcattccaaggcgccgcctccaccactcccggggtggggatggggttgggggagaaggggaggagagcgccgcgcaggggcggagccggagacggtgctgggcttggggggcgtggtggtggggggtcagcaaggctagtttccatcccagccaccagcctgggcatccccttggagacgggcttgggtctccacctgccgcgggagcgaggggcggggccggaggcggggcctgagtggcgtccccgggagaggaggcgggagccggagtgggcgccggagctgcggctgctgtagttgtcctagccggtgctggggcggcggggtggcggagcggcgggcgggcgggagggctggcggggcgaacgtctgggagacgtctgaaagaccaacgagactttggagaccagagacgcgcctggggggacctggggcttggggcgtgcgagatttcccttgcattcgctgggagctcgcgcagggatcgtcccatggccggggctcggagccgcgacccttggggggcctccgggatttgctacctttttggctccctgctcgtcgaactgctcttctcacgggctgtcgccttcaatctggacgtgatgggtgccttgcgcaaggagggcgagccaggcagcctcttcggcttctctgtggccctgcaccggcagttgcagccccgaccccagagctggtgagtcaccgcacccgcccagagtcgccatgcccgagccacagatcgtccccctccccactctgtgggcctcctcatttctctgttttctagccccaccaagacctagactgcccacagacatcccacatcccaacctggagccttgcctcatctggcttgcgtctgaagctgcacttcccggccctgagaccagtattttgctttagggatgagttggaaagcaaggttcttgtcttggcagcgaaccatctccttcttctgggcctttcccccaacttgcatccttgatccagccccagggcctctggctcccctgcttcttccaagggctgaattccccaagggagggagactgtctgtctctgcttagaatgggaggagatggaaaggacatagaagttgagggtgccatgagagggatgcatgcagggcagactccagaaataacttcctgctagagcattgccatggatggaatgagggcagcagggcactggaaggccaggagagagcttccacttctgtggcttaagaccacgggaagattgggagaggatctgcaggtctgccaacctgcagtaggtggcttggtgatagagagtggcagcaaactgaaccctcaaagtactagtagcagtagtagtagccgcagcagctgtagcagtgagagagatccaggaaggatgctggccaggctgctccccttcctcctccttagcaaatttccaactccaggaatctcagcagctgggaa

SEQ ID NO: 5769 - DNA, 6000 bp, Homo sapiens
ctcctttttttttttttttgagatggagtctcactctgttgcccaagctggagtgcagtggcatgatcttgactcactgcaacctctgccttccaggttcaagcaattttcctgcctcagcttcctgagtagctgggattataggtgtgcaccaccacgcccggctaatttttttttttttttgagacagagtctcgctctgttgcccaggctggagtgcaatggcgtgttctcagctcactgcaaccgccgcctcccggggttagagtgattctcctgcctcagcctcctgagtagctgggattacaggcgtgcgccacaatgcccggctaatttttgtattttttagtggagacggggtttcaccacgttggtcaggctgtctcgaacttctgacctcgtgatccgcctgccttggcctcccaaagtgctgggattacaggcgtgagtcaccgccctggccacacctggctaatttttgtatttgtagtagagatggggtttcactgtgttgtccaggctggtctcaaactcttgacctcaggtgatccacccgcctcggcctcccaaagtgctaggattataggcgtgagccaccgcgcctggcctggagactcctttgtgttccccagtctccaccaaccagtaaatacatagtggtgatgtcgccatggagcccgtgcacagtactcccctgggggctgcactcagtgctggtgctggggcatataacctactctctggagagccctgcgggatggtctatgagcttttctgccagcaggacctgcaaacgcgcaggtgcagcccctccttcaccctgcgatctgagagatgccatcaagcaccgtgcctctatccttatccaaagctgaggcctctggacttaaatttcaggcccccatttcagacccaacctctggaccttgaattttatccaccactctccttaccctcccagtggggggatggctttgatgatgcatccttgtttccttcttccctcccatccctatctcttcctcttccctctccccactcctctcttacacctatttttcaaaaattaaagaaaatgttttttaaactgaagcccaagaagcattgatccttcatgtatttttgcctcctcttcccccatccttccccatgcctcccaccctcctctatgtctctcactttccggtttttcctcacccctctcccaactctcctcaactgttcttttcccttgattctggatcccttctttcttcctcaccttcctcatatcccctcaccctcctcatatcccctcaccctttcctgtgcttagatgcaggctacaagctgctgtgcatggcactgggtctggctgatgcctacatgctctcagaaggctgcaggtttgcttgagacatctgtggcccccatgctgtgtcgctgggcctaggtggaggcgtggtgaagctggagggaaagctggctttgcttggtgtggagggacaagggtccccgcctcagcacacctaccaccaactggtgccaggcaaccaagaggcagcagcctgggccagccaggacggcttggtggcatatctggatgtcaggcacttggaacaggtgctgggggatctgaaggatgtgaagggccaggtctgagatcagccacttcccactaagaggcccctctatcctgcaccccagcaaacacatggagctctgtgtcaactttccaggctgtagaagtgggccattctttgtgtgtatgtgtgtagtaaaatatatataacataaaattcagggacattgagtacatacacattgtgcaaccatcagcaccatccatctccacaacattttcatctttctttctttttctttgagacagagtctcgctctgttgcccaggctggagtgcaatggcacaatatcggctctactaaaaatacaaaattatccaggcatggtggcgcatgcctgtaatcccggctactcaggaggctgaggcaggagaatctcttgaacctgggaggcagaggttgtggtgagttgtgccactgcactccagcctgggcaacaagagcaaaactccatctcaaaaacaaaaacaaaaacaaaaaacctagatgtttatggttaaggaaacaaattaataataataaaaaagataatatcgattcttacaaaatacagtaattaagaaaattaatcctttatcacaaacttttgtagcagagcacatctctccatatatacaagcattataccgagggtgaatgtgttcctcctcttactttttttttttgagacagagttttgccgggcacagtggctcacgcctgtaatcccagcactttggaaggctgagggggcggatcacgaggtcaatagatggagaccatcctggccaatatggtgaaaccccatctctactaaaaacacaaaaattagctgggcgtagtggtgcgtgcctgtagtcccagctacttgggaggctgaggcaggagaatcacttgaacacgggaggcggaggttgcagtgagccaagatggcaccactgcactccaccctggtgacagagcgagactccgtctcaaaaaaaaaaaaaaaaaaaagagagacggagtttcactcttgttgcccaggatggcatgcagcaacacgatctctgctcactgcaacctctgcctcctgggttcaagtgattctcctgcctcagcctcctgagtagctgggactacaggcacacatcattgtgcccagctactttttgtatttttagtagagacggggtttcaccgtgttggccaggctggtctcgaactcctgacctcaggtgatccacctgcctaggcctcccaaaatgctgggattacaggtgtggtgagccactgcgcctagcccctcctcttactttggggaacatcctactctgtctatggagcagctgttgtttcaccactttactttcttaataaacttgcttatactttgcactgcgactcgccctgaatctttcttgcatgagatccaagaaccctctcttgtggtctggattgggacccctttcctgtaacaaatgcattggctgataggagaataaagaaaaaaaaagaggaaaaactagagtaacttctctacataatcatattatatgaccgttttgttaaccatgataacagttaacaaaataattttcttatgtctaattctcagtccatgtctgtatgtcccaaaatgtctttcacagctggtttgttcaaccattcaatgaaggaccaaacattgcagttggttgttatgtatctagtctctcaatcttgatcttcagaccaccttcagcccatctcaccacatccgtcccaagccctttgagccagccaaccccaacctgccatgtactttacaaaatgctccttttttttccacagtcgactgcttctctgtccctggagctctcccctttattctccaaggtcaccttgagcacatccttctgctccgtgaaatccattctcctctccctttccctccctctgagcttaaccagctgccaccgcaggcttctgcctttcttcacagtgtggccagaactcggttctgcctgctagcagagggcagggccgctgtcttcctctccttgcagcccccaagcctagcacatgcctggcatctagtggcagcacaataaggaacctgatgaatactcctttcttctgctctccgctcctcctccacagcctgccagccatggtcaggaagagcaagatccggaatgggcttggtgtgtcccgcgggaaggccgtgatcctggaagatgcttctcagcccagcccggatctccttcctttagctctagagacttctttcattctttgtgtacacacatacactaagactcaggaagtggttcttgaggcaggaccttaagagcccaaggagtggggccgaggctggaggtgtgggggtgtgacggccggtcctactctccggcctgttcagatcagctccttctggggaccacccctggcacacaagggagggaggcagcttgatccccctagcccgcttccagccctcacctggctttgtcttctgggataagacggggaaatccagaggatgtaagcctctcctgccttcgtgtcttcccccaagccctcgctatcacagacggatgcaggagctgtctgggaggctggaagcacagaccttgtcaatcctcccccagagggcgggacccgacgcggacgtgtcttgattgactgggtagcgtggcttcggggaagggcttcctccccttttctcagactaggatccctggaaaatggagaagctgtgctaatagaggggggccagaaatccccactctagaatgctgtagaatgttgggagacacccaggatgtgagccagggactttctggaagtgtttgttctggccccacccgaccccaggcagtccccagctgtctgcacagtcggatggggagggggcttgcacagagttggagccagaggagagagctggctcatcccctacggtaggatggggaaacctcacagaccacattgtcacccggcctcagctctccgccccggcgctcagagggtaactctcacccacctcgtccgcttctctgaaccagagtgacccaggctgcgctccgccccgctctcctaccccgagttggcacggaggtatagcgccagaggggggccccaggcgccccgaggtcttgcccttgcggctttccctttgcgggggtgggcgccttcttccgggtaggggccacgtggccctggccgggcggggggctcggcccaccccgcgccgggcccagtgactcaggccgcagctgttaccgcgtcacatgagggaggccggcggccactcggcgggggaggggaccgtggctggagcccggggcggggccgcgcggcaggcggggcgggagccggggggcgcagctagagagccccggagccgcggcgggagaggaacgcgcagccagccttgggaagcccaggtgaggccgcggggacccggcggacttcggcgcgggctgggagagaccacccgcagtcccttcctccagggctcgccccaggcccgcggagactcgtccggcgctctccagccgccctggagcaactttgcttcgaagttccctgggcccgggcagggtgtggcgggggtgctggctgcactttttttttttttggtgggcggggaggtcagagcccaggggaaaggggctggggcgggggtcggggttgggctgaagaccgtttctccaggctgggtgttgggtggggaaagggtgtttgacgcccggagactggcgggccgagggtcggcgtcaggctcaagcccctgccggcgcccttggatctgtcctgggccccagaggcggcggggcggggtccgggcttcgcggccgtcgcccccacccctctcctgcgggtaaagagggggctgggagacgtggatccgaccgcgggtttccgggtgggaggggccgggaatcggggccgtgaagggaagccctcgagggccggccgggagcccggaaaccgaggtcccccttcggccagttttaatccccccgccctcccctctgccccaggcccggcagccatggcggtggaaggaggaatgaaatgtgtgaagttcttgctctacgtcctcctgctggccttttgcgtgagtggcgaggggtcctggggggcgcgccggcagggtgcggggagacctggctccacagtggtgagggctgagggaatgagaattaaggcagctggagaccagatgtggaaagaaagccagggaaagacagcgcagccactccctcctccagttttcctggacacctgaggcttgtttccaccgagaatggccatcctgggtgtgcagcaacccctacccccatccctcctggcccttcctgtctggtgacccaaccacttgtgatatggggcagtggggcaaccagccaaccgcctgatgctatcgcca

SEQ ID NO: 5770 - DNA, 6000 bp, Homo sapiens
tgacctcgtgatccaccctccttggccttccaaagtgctgggtttacaggcgtgagccacagtgcccagcctgagaccctgtcttaaaaaaaaaaaaaaaaaaaaaaagcagctgtaagtcttgagagtggagtggaaatgagatgagggggggatgtttgatcagaatggcttaggttatgatgttacatctaattattcttttttttgagacagagtttcgctcttgttgcccaggctggagtgcaatggcatgatctcagctcactgcgacctctgcctcccgggttcaagcgattcccctgcctcagcctcccaagtagctgggattacaggcatgtgccaccacgcccggctaatttttttttgtgtctaattagtagagacggggtttcaccatgttgggcaggctggtctcaaactcctgacctcaggtgatccgcccgcctcggcctcccaaagtgctgggattacaggcattagccaccgcgcctggctatgagctccttattaagtacctatttggtacctttaaaccatagtttctctgtaacctttttctggattctgtaaactaaggtccaagtgaaaatcttattctttcttctctgtggtcttttctggttttttctcagcatgtttgttgataattttgtgatgtgacctgctctgtctacctgtcccatttatcagacatgatcttttttctcacgtgctttgattattgagggatcacagtgaagacccagagtcgatgatcagccacactgggcttctctcccctagtcacttccctatccaagccctgtgtcctctgcattctcccttctagtcaagaaccctattgaggcaagtgtcttgctggctgaagcctcgctggcacggaagcagcggaaaacacatactacctttattccactgatgctgaatgagatgccacagattggggacctggtgggtctggatgctgagtttgtcacccttaatgaggtaaccaagaccaaagggatggggcattggaagagaacgctgaggatattaggagttgtaagcatttctctgatttccttattaactcttctcatgtaggaggaagcagagttacgcagtgatggtaccaagtctaccattaaaccaagccagatgtcagtagccaggattacctgtgttcggggccagggacccaatgagggtatccccttcattgatgactacatctctacccaggagcaggtattaggatatggagatgcaagtgaggcacaccctggtgcttacttacagtgctcaagaacccagggaagagtgataggggaagactccatctcacttcctgaaaaaggcttgtccttttctctattcctaggtggtggattacttgactcaatactcgggtataaagcctggtgacctcgatgccaaaatttcctccaagcacctaacaactctcaagtctacctacttaaagcttcgttttctcattgacattggagtcaagtttgtgggtcatggcctgcagaaggacttccgggtcatcaacctgatggtttggcagggctcttttaagagtcttcttgtgagagtgggcccctcagggtatacattgtgcctttagagaatggggaattataggtcccctaccttaagtctccccctcttttatccttgccaggtgcccaaggaccaagtccttgacactgtctacctgttccatatgccccgaaaacgaatgatttccctgcgattccttgcttggtactttctgggtgagttgctctgccttgtaggcccctgctacattaatagcagaagcagccatttaaaaaaaaagaaatcatgttctttgcggcaacatggatggagctgtgggccatcatactaagtgaactaactcagaaacagaaaatcaaataccacatattctcacttataagttggaactaaacaatgagtacatatggacataagaatgacattagggactctaaaagttggggtggtgggtgaggggtgagggttgaaaattacgtattgggtgcatagttcactatttgcatattagggataccagaagcccagtccccaccagtacacgatacacccatgtaacaaacatgcacatgtaccccaaatctaaaataaaatttaaatataaaaaataaaagcatggggggaaaagaaaaagtaggaaaagtgttagaggacaaaatgggagtaggggagaccctcagttagtggtgacagttactaatggatttaattaacttcaatatcccttctgtgcactgaggaagatgtctgacaattttccttaagggcagtcaggctttttagttttctggagtcaggtaggagtggggagacatgttcctacctccctttgctgggtcccaaactattccacctttacttaccccagacctgaagattcaaggggaaacccatgacagtattgaggatgcccgcacagcccttcagctgtaccgaaagtatctggagctaagcaaaaatggcactgagcctgagtctttccacaaggtgctcaagggtctttatgagaagggcagaaagatggactggaaggtgcctgagcctgagggccaaacaagtcccaagagtaagacctgggatgggacaagggaaactggactgggtggattttgtattttgtttgtttgtgacagggtctcactctgtcacccaggctgaagtgcagtagcgtgattacagctcactgcagcctcgacttcctgggctcaagtgattctcccacctcagcctcccaagtacctgggacaacaggcacacaccaccacacccagctaatttttgtactttttgtagaaacaggattttgccatgttgcccaggctggtcttaaactcctgggctcaagcgatccacccaccttgggctcacaaagtgctgggattacaggcatgagcctgagcgcccccaattgggtggattttgattgcacatatggagaatagcacttaacagtttacaaagcacttcatcctcctaacattcagtaaaatacattttatcgaaactctccattaactataacttcctcttgcccaagtctaaaatgttcagggaaggtccatgcccttttttctcttgcatttttccttcataggaagtatgagaagatgctttttctccactcagcttgaatcatgcttttggttttgtctctgacagatgcagctgtcttctcctcagtgctggcgctctgactacccttcccaaagaaccacggccctctccctttactgttctatagccccagaactgggagatggcttcctaagttggctataccttgtccacttccagtactggacgtgctcagggtctagggtcacagatggtgctattaattgaactggaacacagcagaattgttgcaaaggttctaggagccagattcattccttcttcattctttgcaaaacagtggtacagacatggagtctagaattgacccagatggaaagtaattggtattcttaatatcctgggtgactaatatccaggcagagaagctcctggaaccataactgtaagttcctagctggctagggattgaagtcctggacagtgacagaggataccacagtagttcaagacttagcacaagtcaccaactgcttcagggatacctggaggggccagcaagtagagtgttggtggcccaagcaaaccagtgttgccaataccattgccaaaagggcctttggatcctggacaaagcttggctgccggcttcatttattcctgctgatggctgagaagcatctgtcttccatcccacttgcctgtcccaagttttgttccattttttaaaaatttgttgtaaactgcatgttttataaaataaaaataaaatatcgtttgttatttatctcattagagaactgctagtgtgggttctctggcttcagtcttcctctccttcctttgaaggtaaaggtccggaatccaaagttatggatatgaaagggtataattaggccgggcgcggtggctcacttctgtaatcctagcactttgggaggcagaggtgggtggaacacgaggtcaggagttaaagaccagcctgaccaagatggtgaaaccccgtctctactaaaaatacaaaaattagctgggagtggtggatggcgactgtaaccctagctgaggcagaaaattgcttcaacccgggaggcggaggttgcagtgagccgagatcacgccactgtatgccagcctgggcgatagggcgagactccgtctcaaaaaaaggggaaaaaggtataatttatgccttttctgggcaatgctgggtctttgctatagctgcccagtaccctaagtcagactgaagatgtacagtatggtttccgttaattgtgtaagccgacaaactacaggtcccaggatagcttgagacttgtagttgctcacaaagatgggtccggtgctgcggtgcttcctgggagatgtagtttcctgtgtattgaaacctggactgctcgctggccggcagcgcaccgttttgaaggtcctagcccacctgggctggctcacgcgcacgactagccgctcccatacagcacgcccggactctgtcgtcgcttaaggccactcctattctacggctgacccctggtggtcacgtggatctgttcgccacgcaagtctgggtccttcggcgattgaccggggtccttgctgttcgggagcctctcctaagctgcctgttcgcgcgagagtttggaggggcgggtttggggtcggtgtctgattggggctcgcaccgcagcacgctggagtcccgcttaggtaccagttagcgtcaggggagctgggtcaggcggtcgccgggacaccccgtgtgtggcaggcggcgaagcgctctggagaatcccggacagccctgctccctgcagccaggtgtagtttcgggagccactggggccaaagtgagagtccagcggtcttccagcgcttgggccacggcggcggccctgggagcagaggtgggacggatgcgggcggcgaggcgctgggcgctgagggttggggatggactgaagcgaaagcaatggcggagtccttagaaagggggctggtgtccgtacgggtaatcacttacgggctggaggtggggacgcaggaatcttcggtgcaggatccaaatgggccctagttattgctctcctcgctggcctcctggcctgactgagggctccctgccggcagttccctagtgcctgtagtcctcacgtaatcgccaacttacctcctgtagctgccacaaagccccgtgaaccctaggcatgcagtgctaaagtaccaacacttagggcctcacctatccacgtagagtctggggctgagccgcaagtcctgagctcgcgctcccacccaccaccctgggggaatcagagccctcaagcgctggaacagagaagcccctttgtgtcccggccatttcctggaaagtagagccagagtcacaatgaggcctttgaaagccttggggtgaggattgggggggtcagggaaaaatggagtcggctcctcacacttatgttttattcccactcaaacccaggtggagcgaccccattacgctaaagatgaaaggctggggttggctggccctgcttctgggggccctgctgggaaccgcctgggctcggaggagccaggatctccactgtggaggtaaaggcacaacgggaaaaagaagtggaggaagcagagccttgggagggcatgagatccaaggcctgggagaaggatgaatggaaatcctgggttgatcccattctcctcacaccctaccccctaccctgtcccctgctctcattctctcctcttccaccagcatgcagggctctggtggatgaactagaatgggaaattgcccaggtggaccccaagaagaccattcagatgggatctttccggatcaatccagatggcagccagtcagtggtg

SEQ ID NO: 5771 - DNA, 6000 bp, Homo sapiens
tctctacaaaaaatttttaaataagctgggtgcagtggcacgtgcctgtagtctcagctactcagggggcttaggtgggaggattgcatgagcccagaagtttaagactgcaatgacctttgatagcgccactgcactccagcctgggcaacacagtgagactatgtctgtaaaaaaaataaaaataaaaggctaggctagtagaaaacaataagcatactaattgtatgtaaatctatgcaaaaactcaagtaagcttttaagagttcatctctagttaggtttgaaagaggctggcatttatctaagtggggagactgatgtcaaaggaaatgggccgaggtttagttctccatggaattcttgtcaatgtttgatgaagaatagaggcaagaggatggtagctgcagataaggaaagctagccattttatttgtcgtctataagagattgaattaactgccctttgctgttccatctcttattataagaggctacaggattagtgggtagagataacccattcctgttaataaaaccccattgagtggcttctgtttactttttaaattttttaattataatttttttttttgagacggagtctcactctgtctcccaggctggagtgcagtggtgtgatctcagctcaccacagcctccacttcctgggttcaagtgattctcttgcctcagcctcccaagtagctgggatgacaggtgaacaccatgacgcctggctaatttttttgtgtatttttagtagagatggggttttgccatgttggctaggctggtcttgaattcccaacctcagatgatccgcccacctcagcttcccaaagtgctgggattacaggtgtaagccaccgcacccagccaaattttcaattttttttgagacagggcctgactctgtcaccaaggctggagtgcagtggtgccatctcagtccactgcaacctctacctcccaggctcaagtcatcctcccacctcagcctccccagtagctgggactacaggtgtgtgccattgtgcctggctaatttttgtattttttgtacaggaggggttttgccatattgcccacgctgctctctgactcctgagctcaaacgatcctcctacctcagcctcctgatttgctgggactacaggtgcaggtagctcctgtttttaagtgctttattctgtgccagacactgtactagtctctttacctacattatcttatttgatacagaggaaactgagactcagaaagcttatgctaatctggccaggtgcagtgactcaggcttgtaatcccagcactttgggaagcctcggcaggcggatcacttgaggccaggagttcgagatcagcctggccaacgtggtgaaaccctgtctctactaaaaatacaaaaattagacaggtgtggtggcgtgcacctgtaatgccagctatttgggaggcttgaacccaggaggtggaggttgcagtgagctgagatggcaccactgcactccagagtgagagactctgtctcaaaaaaaaaaaaaaaaaagcaagcaagcttatgctaatctaatctattcggcaaatatttatttactgccttctgtgtgttaagcaccaggttcgcactggtgaaaaatcagacatgggccctgccctcctggaacctatatatagcggggataacttgcccaactagaaagtggtaaagcatatattgttgtcactgctgtttttaattaatttggggtacacagaatattttgttgttcatgatatcctctcctcattggcctatatatatggctcccacttatttgtttttaataatgataattaagcatcatttctaaccatccatccaatagaaaaactagaaccttgacaattactattattttattttattttattttatttttgagactgagtttcgctcttgttgcccaggctggagtgcagtggcacaatcttggctcactgcaacctccacctcccgggttcaagcgattctcctgtctcagcctcccgagtagctgggattacaggcacccaccaccatgcccgactaattattgtatttttagtagagatggggtttcaccatgttggccaggctggtctccaactcctgacctcaggtgatccgcctgcctcagcctcccaaagtgctgggattacaggcatgagccattgcccccagccaacaattacataaagttacacgatgtgctacccaagtttctcgtgggtatataagtgagaagtggagttgctgagtcagaaattatgtaatttgacctggcatggtggctcacacctgtaatcccagcactttgggaggctgagaggggcagatcacttaaggtcaggagtttgagaccagagtggccaacatggtaaaaccccgtttctactaaaaatacaaaaattagctgggcatggtggtgggcacctatagtcccagctacttgggaggctgagacataaaaattgcagaggttgcagtgagctgattgtgccactgcactccagcctgggcaacagagtgagactctgtctcaaagaaaaaaaaaagaaattatgtaatttgttcatctttataagtaggtgttaaactgtgtcccaaagtcattatctcaggtggggaacagtgcctcacgcctgtaatctcaacactttgggaggctgaggtgacaggatcacttgagcccaggagtttgaggccagattaggcaacacagtgagaccccatctctacaaaaaataaaaaagttagctgagcatggtggtaaacacctgtagtcccagctatttgggaggctggggtaggaggatcgcttgagcccaggaggttgaaaatgcaatgagctgtgattgcaccactcgactccagcatgggtgacagggtgaaaccctgtctaaaaaaaaaaaaaaaaaaaagtaatatctcagtttatactcccaccagcagttgtaactggttcttttttttttttttgagacggagtttcgctcttgttgcccaggctagagtacaatggcgtgatctcggctcaccacaacctctgcctcccgggttccaacgattctcctgcctcaacctcccgagtagctgggattacaggtacccaccaccatggccagctaatttttcgtatttttagtagagacggggtttcattatgttggtcaggctggtctcgaactcctgacctcaggtgatccacccgcgttggcctcccaaagtgctgagattacaggcgtgagccaccgcacccagctggttctgtcactttttatcctcacctaattggaccagagtatctgtggccaaaatctctgctcttaacaccatgatgtgctaccctctctctttatcctgtccaggggaacttttctggaggcagtgtgaaccctgcatgcttcctgaggccagcagtggtgactgggatctgggagcattactgggtgagatgcactgagggttacagggccttaagtcaggagactgatgaggcttctagaatataggagattccaatgacttctagtggactgtttctcttctatgtaattgagagctccaaaccctttgggtgctctctgacctgttctcagcaactcttcctgccagtggataggttagatggaccctctaccttcactataactctctttctgtccatccccaagctgggtattatgaggagaaagcacagcccctgatctgtgttccttctctctccccacaggtgtactgggtaggacccatgctgggcaccattcttgcaggcctcacctcgaatttctgctctctggtgcttcatgagaaaagtttgtggccggtatgacttgccactatgtggagatggtagaacctatcagtatgtcccattctaccttctccatcaccacacaaccccacgcctaggtcccaagtccctcaccaagcccgagcacaactgaacctctttccccaaactttccttccccatattatccttttccctctctttgatcggctgtttccccagatctgatcccagcacacccatacctttccctggggatcaaggcttagggtgtgctgatcatggctgtattaaaggacattagaccttcccattgcttcatagccatgactgtttccttcctttcagtacttcttgctatgaccatgtgagttaggaaagatgaaatacaagctgattctaaggtttaactacgagtccctttcttattcctatccctccaaccccactcccagcccatgcagggatgatagtgtcttctctctgtcggtccctgtagtttaaaaagccaggcctagggtttgaaaagggaggtgctgtcatggactgggggtagggaacccgggctcagagaaagccagacgcagcagaactattttgtcccagagctgcagggtccacagattccagcccaaactagccaatgggagaaaggcttctaatccctgggaactaaagaattctctttagttatccaacttccctgctgaaccccactccttaccactccccccaacccttacccctggcagactcagaggaggctgaggcccccaggagctcagccccaaatgccatgaagtgagctcagcttgatggaccttccaaagagagctgaagagtattctaatgttgatgtcaatcaggacaatgaaccccaattttgacacacacagaagggcagactcttccagtcctgctgttcttcacccccacttctcgtagtctctcttgctgtgaccccaatcccaccctcactgccatggctctctcggctcatctcccagttgagaaaggcgggaaaatccagcatttttaccatgtaggggaggggacttagccctccacagctgtgaaggggttaagaggctgggcctgctacctcagcctgcccctcccagggattaagagtcctctataaaggggactgtccacccagacaaggccatgggggtagcagggacccaggcactgtgaccatcccccctgccatgtgggaactgcgatcagcctccttttggagggccatattcgctgagttctttgccaccctcttctatgtcttctttgggctggggtcctcactgcgctgggctcctggacccctgcatgttctgcaggtggctatggcatttggcttggccctggctacactggtgcagtctgtgggccacatcagtggagcccacgtcaatcctgcagtcacttttgctttccttgtgggctcccagatgtccctgctccgtgccttctgctatatggcagcccagctcctgggagctgtggctggggccgctgtgctgtatagcgttaccccacctgctgtccgaggaaacctagcactcaacacggtaatggttggctgagaggggatggggaacctggtgtcctgtctctctattgccctgactccctgactggtgcaggtgaatcagctcccctggggtctgggacaatatgtgcatgtgtgagcatgtgtgtgttgaagtggtgaggattgacaggtggtttagagctttaaggaaggcatagggccctggactgagaattaagaaacctgagtttgagtttcagctttccttccaactccttgcaggttcttaaggaaacttattttacctttcaaggcctcagtttcctcatacatgtaagtggctgcaatcatttccatcatgaaggagcactgttaggagatggtaagatgcaaatacaatgattatgaagggggttgtattatccttcctctccacggacctgatgccgtaacgagatccttgccggggaagtcttgaggaggtaacactgtggcagccctcctgagctgtctctcttcttcttcctttgcacagttgcaccctgcggtgagcgtgggccaggcaaccacagtggagatcttcctgacgctccagttcgtgctctgcatctttgccacatacgacgagaggcggaatggccaactggg

SEQ ID NO: 5772 - DNA, 6000 bp, Homo sapiens
aaaacctaatctgaactgaatttattttgtggcagaacctgacctaaacttacataaggttatttatagttttcacttttccatctttcacttaccacagtatgaagtcatatgtgtcattccagaaatattaatttgtttgattactgggtgctgtcctgatgcattgggattgttgctttatattttgtatatgcaccatactatctttcaaaaatccaaaaaattttgaaacacattaaccatccagatttcccaccccatttactcatcagtgttggcctgagttcttttggctatttgcataaatccaatccacctgcagataatgaatattcattgcattgtgtgttatagactctgaaggagattcttgttgttttgagcagtgtcctcattaaaacaaagctaaaagcttcttgaatgactatcttgaaatgacagcactcatttggatgataagttgtaatgtgtttatggacagccagtctcattaccatacacttcatttatatattttaatagtcagtggtcagtgatcttctgaaattagttcccctggatttgctttagtgaaaaccaaagagcaagctctgaatgatgagaatggggcctgataaaaaaaaatgaagtatgtgtatatatatgtgtatatatacctacacataaaaaaatacatatacatatctatacatatatattagcctttattttattttatttatttattttgagacagggtctcactctgtcacctaggctgcacagtggtgcaatcacagctcattgcagtcttgacttcccaggctcaggtgattctcccacgtcaacctcccaagtagctgggaccacaggtgcatgccaccacacctggctaattttttttttttttgtattctttgtagagacggggtttcactatgttgcccaggctggtctcaaactcctaggctcaagtgatccacctgcctcggcctcccaagacattgggattacaggcatgagccactgcacctgcccaatttattcatttttttagcaacaaggtcttactctgtcacccagggtggagtgcagaggcatgatcatggctcactgcaggctcaacctcccagactcaagtgatcgtcccatctcagcctcctgagcagctgggactacaggcacgtgccaacacacttggctaatttttgtatttttgtaaagacagagtcctactatgttgcccaggctggtcttgaattcctgggctcaagccatcctcagacccggtctcctaaagtgctgggatcacaggtgtgaaccactgaggctagccaactttatttttagaaacattacatgtacagaaaaattgaaaagataatatggtgaattcctatataccctacattcaatttcctcaattattatctgacattagtatggtacatttagcaccattaatgaaacagtattgaaacattattattaactaaagtctacagtttattcagatttcctttgagtttttgttgttgttgttgttgtttagactgagtcttactctgtcaccgggctggagtgcagtggcactgatcttggctcactgctgcaacctccgcctcccaggttcaagtgattctcctgcctcagcctcctgagtagctgggtttacaggtgcccgccatacgcccagctaatttttgtatttttagtagagacggggtttcactatggtggccaggctggtcttgaactcctgatctcgtgattcgcccgccttggcctcccaaagtgctgggattacaggcgtgagccaccatgctcagcctccgtgtttttttttgttttcttattttttgagacggagtcttgctctgtcgcccaggctggagtgcagtggagcgatctcagctcactgcaagttccgcctcccaggttcacaccactctcctgcctcagcctcctgagtagctgggactacaggtacctgccaccacgcccgactaattttttttatttttagtagagacggggtttcaccatgttagccaggatggtctccatctcctgacctcatgatccgcccgcctcagcctcccaaagtgctgggattacaggcatgagccaccgtgcccagcctcgtttttttaaactaatgtgtttttctgttccaggatcccatctagaccaccacattatgtttagttctcaaaaacataatgggctgggcatggtggctcatgcctgtaatcccagcacttcgggaggccgaggcgggcaaatcacctgaggtcgggagttcaagaccagcttgaccaacatggagaaaccccatctctactaaaaatatgaaattagctgggcggggtggcacacacctgtaatcccagctacttgggaggctgaggcaggagaatcgcttgaacctgggagggggaggttgcggtgagccaagtttgtgccattgcactccagcctgctcaacaagagtgaaactctgtctcaaaaaacaaaaacaaaaaagcccataatgatgtttggatgactttgacagctttgaggagtactggtcaggtattttgtaggatgcctctattggaatttgtctaatgtttttctcaagattagagtggtgttatgggttttgggaaggaaaaccacagagttaaaatgccattttcatctcatgttatcaagggtacatagtatcaacatgattgatgctgacttccctaggtcagctgagggagtgtgtgtgtgaaatacaggatgaccatatcagcactgttggcctagacttttccttctgagaatgaaatctcttctcttgcccatagctcagccccattttgactttttttttttttttttgagacaagagaggctcgctctgtcacccaggctggagtgaagtggcatgatctcggctcactgcaacctctgcctcctgggctcaagcaattcttctgtctcagactcctaagtagctgggattacaggaacctgccaccatgctgggctaatttttgtatttttattagagatagggttttgctgtgttggccaggctggtctcgaacttctggcctcaagtgatcctcccacctcaacctcccaaaagtgctgggattacaggcatgagccaccatgcccagcccattttgactttttttttttttctcttttgagacagagtcttgctctgtcacccagtctggagtgcaatggggcgatcttggctcactgcagcctccgcctcctgggttcaagggattctcctgcctcagcctcctgagtagctgggcttacagccacctaccaccatgcctggctaatttttgtatttttagtagagacggggttttgccatgttggccaggctggtctcgaactcctgacctcagttgatccacccgcctcggactcccaaagtgttaggattacagacctgagccaccatgcccggcccattttgacttttaaaaaggtccttgttttagaccaggtgcagtagcttactcctgtaatttcagtaatttgggaggccaaggtgggataatcacttgaggccaggagtttgaggtcagcctgggcaacatagcaagatattgtctctacaaaaagtaattaaaaaaaattaagccagacatagtggctcatgcctgtagtcccagctacttgggagattgaagtgggaggatcatttgatcctgggagttcgaggctgcagtgagctgtggttacaccactgcattccagaagggttacagaaggagaccttgtctcaataacaacaacaacaacaacaacaacaatgaaacaaacaaatagctgggcatggtggtgcatccctgtagcccaacctatctaggaagctgaggtgggaagatggtttaagtccaggaattcaaggttacactgagctgtgatggtgctgttgcactccagcttgggtgtcagagaatgaccctgtctctaaaaacattaaaaaaaaaaattcttgttttgaaagcttgaaccttccccaggagatgcccccttccttgaattcctcaattcatttggctctatcatctgtagttttcctacccatcaccatcagatcctcttaaaaaaaaagtttcaatttctactaacagtttctgaacacctggatctctgctgggccctgtgttaaatcattgaatgggaagcagctaatccatataaataactccggctttggagtcagtaggatttaggttgggatcacagaccagatgaactatgaaatcttgggcaggttcctgtggctgtcttggctttggcttcttaaatggagagaattatatttgtctcacaagatgataagaggaataaatgaatctttcttaatcctaacattaattttacttccaaaaataaaaatcctatgaatacatttttaaaagctaatgtttatgcttataaaatattgacacacacttttttgtgacttctattttaaatcctttaggactttggagaaccacacttttgtcagtcgactttaaaaatcgtcctatcagggtcctactcataaagcgatctcaattgtaggcgtctcataacagaaaggtcgtgataaaaagtaaccgaaagaaaacggaaggaacttcagacagcttctatggaaataccgagtttggtcaaggaggcctctcccattccgattttctattggttaaacttaccatcaatcacaccagttgtaaataaactgaagacggaagcatgttgttagcggggtgggatcttcctgtcgccactgctagggtgagaacccattttccaataggctgaaagctgcttttcccgccctctctcttcagttgctaaggggcgggactcatagggcccttggagggctgggtgctcgaagccctgcccatcccattggttgataggggcgggtttcgtagaggataggctgctgtcgttgcccgttcggagttagttgctggggtaaggcacgtgaggaggaggtggcttgaggcaaccatggcgggaggaatgaaagtggcggtctcgccggcagttggtcccgggccctggggctcgggagtcgggggcggtgggacagtgcggctactcttgatcctctccggctgcttggtctacggcacaggtaccgcccgggcagcagctgccaagggggcaggtgccgagggggttatttttggaaaagggattgtcccgagggcgcgggccgttactctgcagaagggcggtggctctaccgagggccgccggcgtagtgtggtggaagaaacttggcaggctagtgggcgtcgggactgagggtctgggccctgaagcgggctggggcagcttccagagtggggaggagcctgaagccttttggcggagacaggaagggaggcctagactggttgagaagcagtcctgggggctgtgtctcgttgcagaagccttgagtttcttggttaaaagcgagaaaacctggggaccattctgggcaggcagagcagccgcgggaaagggaccatctcattcattcggcaaatcagcaaacaccatctgagcgtatgctctgtcaggacgcagggcacgggtggcagaacggatgtagttgacagaaatgcagtgatctctactatcttctgctcttgtaaaaccttgattccttaccgcccccggcccgcgagatggagtctagctctgtcactcaggctggagtgcagtggtgcgatctcgctcactgcaacctccgcctcctgggttcaagcaattctcctgcttcagcctccggagtagctgggattacaggcacccgccaccgcgcccggctaatttttgtatttttagtagaaatggggtttcactatgttggccagggtggtctcgaactcctgacctcgtgatccatccgccttggccctcccaaagtgctgggattacaggtgtgagccaccgtgaccggccaaataatgcatgtttattttagatgatttggcaaggtacaattaagtataa

SEQ ID NO: 5773 - DNA, 6000 bp, Homo sapiens
ggcagaactgcacttgttgaacccagagggcccactgtaagtatgtttaatatcctcaaagatgaggaaacaaaaagacatgacaactaaatacactaagtaaaaaatcagctgggcgtgttggtgagcacctgtagttccaccacttggaggccgagatggacttgagcccaggaggtggaggcttcagtaagccaagatcataccactgcccctcagcctgggcaacagagactcaaatctcaaaaaaaaaaaaagtcttaatgtctacaaaacatgagaaaaagagagagagaattaaaatcagtatttcggtattcagctgaggctaaatatcaccatcatagaatgaaatgctgagatacaagaactaatatgaagttctattagaaagttttaattattaatatttcattatgaaaaaactttagtttttagaaagcgtgacagttacacgctaaaacaatttctcagtaccgtcaccaaattattaaatagacattcactttcttttttgtttgttttcaagacggagtctcactcttgtcacccaggctggagtgcaatggcattatctcggctcactgcaacctccatctcctgggttcaagccattctcctgcctcagcctctggagtagctgggattacaggcgccagccaccacgcccagctaatttttgtatttttagtagagacgggctttaccatgttggccaggctggtctcgaactcctgagctcagatgatccgcccgcctccacctcccaaagtgctgagattacaggcatgagccaccgcacctggccaacactcactttcaactaaagtaaataaaggagtgatttttttctttttatttttactttgaaataatttcaaacttagatatttaaagaataatacagagcactcccacgtatcatttattcagcttcaccaatttttcacatttggtcacattttatcattttctctctatatataattctatataatttataataaatgtgattaattatcaaattaacaataaaatataaattatacattatatataccacacatatatattatataaatgtatcacatacacattactattatttattttttctgaacaatttgagagtagattgcagacatccttccactttaccctttaacactttaggtcatattctctaagaacagggatattttattacatatccacggttaccaactttgggaaatttaatatttaccatttatcttttaacaaagataaaacaacgtttatccgatcaactttccatattccaatttttttttttagaaaaaaaaaagataggttcttgctctgttacccaagctggagtgcagtggtgcaatcatagctcactgcagcctcaaactcctaggctcaaggaatcctcccacctcagcctcccaagtagctggtactacagccacgtgctgccatacctggctaattttttaaaaagtttttgtagcccagccaggtggctcacacctgtgatcccaaaactttaggaggcccaggcagaaggactgcttgaggctagaagttgaagaccaacctgggcagcatagcaagactccatctctacaaaaaataaaaataaaaataaatttctgtaaagatgaaatctcattatattgcccaggctggtctcaaaggcctgatctcaagcgatcctcctactttggcctcccaaagtgctgagattacaggcatgaaccacctcacctggccccaattttttaaatagtcccccaaaatgtctgttatatcacttttaatctaggatcacatattgcattgagttgtcatgtctctgtagtctcctttaatctggagcagttcctcattctttgtctttcatgaccgacatttttaaaaactactagccagtttctttttctttttctttttttttttttttttgagacagagtcttgctctgtcacccagactggagtgcagtggcgaaatattggctccctgcaacctttgcctcccaagttcaagtggttctcatgcctcagcctcccaagtagctgggactacaggtgtgagccaccatgtccagcttatgcctggctaatttttgtattaagtttcttttttttttttttcttgtgacagagtctcgctctgtcactcaggctgaagtgcagtggtgcgatcttggctcactgcaatgtccacctctgggttctagggttcaagcaattctcctgcctcagcctccagagtagctgggattacaggcactcatcactatgcccgtctaatttttgtatttttggtagagacagggtttcaccatgttggccggactggtctcgaactcctgacctcaagtgatccacccacctcggcctccaaaatgctgggattacaggcatgagccaccgtgcccagcctgtttcttttatacagagaaaatattccttacttggggtctgtctgtttctttgtatttaaaatcaagttatgtattcccagccacatcactacataaatgatgtcatgctttctccggggaacatttctggaggcacatgatattcttctgtccctcattggtgatgttaattttggccagcaagtcaaggtgctgtctgcttttcccactgcgcggttacaatttttcctcttgcaacgaataagccaactatggggagatactttaagctacgtacataagctgcttctgtcaaactttccccctagaattagcattcattgataattcttgcccaaaccaacttttactctgatggttgcaaaatagttattttcatggggggaggggggaggaatagctttaggagatatacctaatgctaaatgacgagttaatgggtgcagcacaccagcatggcacatgtattcatatgtaactaacctgcacattgtgcccatgtaccctaaaacttaaagtataataataataaaataaaattttaaaaaatagttattttccaactccatcagctccctccacatttattaattggcattctcccttctccttcattcatttaattaattaattaattaattatctatgtattatcagtgtggagtcatggattcctatgttttcaatggttcataattcattcctggtcatctccgctgggggcaccaaccagataaagtatacctgtcttatatgttacaaatattttttcacagtttgtcatttctctctcaaatttagtgtatgttaatttcttcactcaagtttttcatatagtcagatttattaatatttccctttacatctggcttagagatctcttccctactccaagatcataaacaaaacaaaaattccatgatttcttcttttgagacagagtctcgctctgtcacccaggctacagtgccatggcaccatctcagctcactgcagcttcaacttcccgagctcaagcaatcttcccacttcagcctcctaagtagttggactacaggtgtgagccatcttgctgggctaatttttaaattttttgtagagacgggggggggggggggtctcaccatgttgcccaggctggtctcgaactcctggtctcctatcgcagcctcccaaagtgctgagattacaagcatgagccactgcgccgggtttcatgatttctttcactacttttatgatttcacctttaatattaaaatatttaatacatttggaattttggtgtaagaagtgtagagattccactttcaccccagctgattagtcatttgtttgtataaaattcattcattcaataatccaccacacacacacacacacacatattttcgttatgttctatatttcttgttatatctttttttcctattgaatcttgatgcatcttttattagaaccacggagccacagaactccgattctcggcaatgtgaggtatcaggctatgacctaaggcttgcaagcagaactaccgccaatctggcctctctggggttcccttcctcctgcaaggttgcaccaagcggcagttcggggaaatagggccttcaattacccagtgtgtatctcttgagtgtctgttaaataatggggggcagggcggggaggagggggagagggaggctgtgcctcagtctttgttagccaggcagagcgtttattttccaggggttgtttcctttatcttcatcctaacattcaaacttgacttgagttttagcgcgcccccgccctacctcctcccaaagcccttatttgcccatccttgcctacaagctcagaacgagcaggcaatggaatggatgtcgtgggagcaggcggttgagatgccagtgtttggaggctaaggactgggggctgtgagcgaggaccttcccgcgtttgctccgcgcccccgcagtttcctccgcgcccactagaaggcgccggggcgctcgcattccccgcgcggagccgaagcagccgcaacgagccgggagctgagccgcgctgcgctgcggtgcgaagagccgggcggcggccagagccctccccgcgctgccagtgggacgcggagccagggatccccggctttgccccggggctggggtgcaacagactcttaacttggtcctcgcgccccgccaaccgcccccgggcaggaaacgcccagaaccaccaccgcgccgcgctccacaaaagccccgggagttccaagacgggagggatcgggcgcgctccagaggcaggagggtcccccacaccctcaggctcatgcccagctcccccatcgggcagcccccagccccatgaggaccctcaggccggggcgagagcccggcacagcccggaccgaaattttgccgctgccttagagcgttagacaggtcagtgcccgggggtgggtgggggtgggattggttggtgaggggaggaggaggaggcgggaggaggcgggaggaggcgcgcttcccggtccactctgtcccccgcgccgcttgccgaggccactcatcgggtcacctccgccgggggcgcccgccagcacgggcatgattctgcattttttcctgacaggctaggtgtggagccgccctccgcagcccaccccggcccaggtgatgctcagactgaggagtcgggggcgcgccggccagggcgggcggcgggcttggggactgccactgccctgatagagcggggcttttccgcttacgcacggccgcgtcgaaaccgcggcatccaaatgtcttcagcattaagatgccaggcctcgggtgtgtgaggaaaccgagatgcaggagagggcgagaagaaaggaggccgggagaccctggggcctgggaagtgaggggaggggtaccgggaaaaccgcggctggcagtgcaaaccctagcgcgatgtgtggagtggagagcgctcttgggagccggcaggagcctctgaggacgcgggggccaagggccccatcccttgccctcccttcttccctccctttctcactccccaccctacccccacctaggatgtggctgggccgccgggccctgtgcgctctggtccttctgctcgcctgcgcctcgctggggctcctgtacgcgagcacccgggacgcgcccggcctccggctacctcttgcgccgtgggcgcccccgcaaagcccccgcaggcccgagctgccagatcttgctcctgagccccgctacgcacacatcccggtcaggatcaaggagcaagtagtggggtgagtgccgaccgcggcggcgcagcgcagcgctcgctgggggtggtctgggggcttttgttttctccactgctgggctcagatgcctgcattctcctaacgggctgtgtggagtgaagtgggaggtggaagtgggaggctgctgaggcttgggctggggaaaatctgttctccctgaaccttgccatggggataaggatggggatgggcgtgggaggttgtgcagtcaagggagggccctgaaagactccctgaggtcctgattcaggtatgagaagag

SEQ ID NO: 5774 - DNA, 6000 bp, Homo sapiens
ccgccccagaagcgctactaccggcaacgtgctcactccaaccccatggcggaccacacgctgcgctagtgaggagtgggcagagggagagagaggagggcgggattctcaaagcagccgggagagcagttgtgctgcaactgctgggaggatttggggtagacccgggaggatcagatgggtgacgtcagtttttgggggtgggaccgggagattcgaccgagagaggagttggcgggttgagagtgggcgtggcgttcgggcctaagtctgggtagcggtgctaagtttgggaagagaaataaattgttactgagactgaagtgatagaggcagaatgtcgtttccatcttttgcttttgtttgttggatttaataaaaaggcaaacatatacacaatcctgcccgcaccttaccttaccttccctccccgcagagcacaaacacaaagtaggatcccagtgcattaggcagccagtctcgggagaaggggaacttgtgccccagaaagggcagttacccggccagggtcacatcaaccgccagaagtggagttgggcaggtcagcgtttatgggcctcatgatggtcctatgattcacactgggagttaagggtggtttccattgtccctcttagaggccacagggcccagtgttacagaatttttgagaaaccctcctcccttttacctcccaccctcacccacccacacactctcacagtaccacttctgcaatggtgtgaccaaccttctcatgcttcttatgtcttctttccaatagccctgtgaagccagaggagatggactggtctgagctatacccagagttcttcgctccactcactcaaaatcagagccacgatgacccaaaggataagaaagaaaagagagctcaggcccaagtggagtttgcagacataggctgtggctatggtggcctgttaggtaacactcaggccctctttttggggtgagaagaggcctagtagcttctgctgcctcagcaacttttgtggggggtcataattggcctttcccctttcgtccagacactggtgacatcagcatggagaggctccacctaccctctactctgggtctgtgacctttgccctggagagtggagggggctgcctcaaatgcttcttaaaacctgggttgtcctttctggcgtcaatccctacatgagccatttcatctgccaggttccgggtcagtgagctggtcagcacaagcatcagagattagccgttgtggccagtgatcctgaactgtcttttctcagagattctaccatctcccctcccctttgcccctccctcgccagatctcattccttctgccccactctcctgttttttgggttcctcttgtattgtctgtattgtcccacccatgcatgccaagccactccctatttttagatcttcccaaacagataacagcctgatagagaagaagagcatggtacatagaggcagaaaaccttggtttaaggtccagttctgcctgggcacagtggctcacacctgtaatcccaacactttgggaggctgaggcaggtggaccacttgaggccaggagttcaagaccagctactcaggaggctgaggcaggagaattacttgaacctgggaggcagagattgcagtgagccaagattgtgccactgcactccagcctgggtgacagagcaagactccatctcaaataaataagttccagttctgccccttcttaactctatgatcttcggcatatctgaccctcagtttccttatcttcacaatttaccacagagtgttataaggatgaaataacacaatgtgtgaaaacactgtggaaaactctaaagcaatggcaaatatacatgtatcctcagccctcccattctggtcctggtgacaattttcatttctccccccgcctcttgagcataaaactatccatatatgtatctctgtcctctcttgccgttctggactttggtagttgcaggttgaggcttcctttcctgtgttgacccctttgcacttcctacaagtatatggttgatgattccattgctatttctgtgtgcagtggaactgtcaccgctgttcccagacacacttattctgggtctggagatccgggtgaaggtctcagactatgtacaagaccggattcgggccctacgcgcagctcctgcaggtggcttccagaacatcgcctgtctccgtagcaatgccatgaagcaccttcctaacttcttctacaagggccaggtggggaggggccctggtgggttaggctggtaggcaggtgggggcatggaggccaggctctcacaaccctgttggtgtgtgtctgtctcacagctgacaaagatgttcttcctcttccccgacccacatttcaagcggacaaagcacaagtggcgaatcatcagtcccaccctgctagcagaatatgcctacgtgctaagagttggggtgagttgggatcggagggatgatggggtgagtggcctactcaggggcccttcactaagaattcagtgggggtgcatttagggactcacaccaccacttccttcatctggctgctgacgttgcatgcagcctcctgtctagggtgattttgcctatgcaggggctggtgtataccataaccgatgtgctggagctacacgactggatgtgcactcatttcgaagagcacccactgtttgagcgtgtgcctctggaggacctggtgagtaggggacctagaggaggtggaggccctttccagagtggttctgtatttggacttaactcagtgccaggaggatgggataggtgtctaagggccaggggcagtctgaacagtgggcaaggacttattggacccttccttctcccagagtgaagaccccgttgtgggacatctaggcacctcaactgaggaggggaagaaagttctacgtaatggagggaagaatttcccagccatcttccgaagaatacaagatcccgtcctccaggcagtgacctcccaaaccagcctgcctggtcactgactgcttactctaccttagctggacctcgtctcccagggattagagaaaagagcaggagtcctgggtcttcccagttgagactgctggagctgagacacagtactctcttaaagaaggtggggagctgcccagggcagaacccactggtgttcatgactacccctggctcctctcaccttgtccctccactgccaacagaaaacaaagcagctgactgagatggtcaaaggactttggaccataggggatctttggaaggctgtggggtcttgctcttccttagcactcctttctccttgtgagatctctcctcagctggaatgaggaatgtagtccatctaaactgcttgctaggctcaattaccacttctgtttgctttgtggatcctgggataacatgtatatgtgtacacatgcctattctgccatttctcaggaaagggtggagtatgtatcatatgccttctaccatcctcctgtcctctccctgcgtaagacttgacctggggaatctgtgttccctaagtgttgtctctggagagtccttgggaaggtgtgggggtggagaccctctcctttttcacattgaccttcaattccagaacttcagagctagctgactggcacagagcctgatagagttgcagtggggaatgagggagtaaggagcagagaggtaaactgtgggagattcttttattttaattttttttagagacaggccctctctctgttgcctaggctggagtgcagtggtacaatcataactcactgcagccttgacctcccgggctcatgtaatccacctcagcctctcaaggcactacaggcatacgccaccatgcctggctaatttttgtattttttgtagagacagttccactatgttgcccaggctggtctcagactcctgagctcaagcagtctgcccaccttagcctcccaaagtgttgggattacagtcatgagctgccgtgcccagcctaatttttaaacttcttctgtagagacagtcttgctatgttgctcaagcttgtctcaacctcctggcctcatgccatcctcctgcctcagcctcccaaagtgctgggattataggcatgagccaccacaggattctgaggctaaaagtagaaaggagctgctaaccagaaagccccccagaggagaccgagtcagctggggaattagaacatccacatccatttagctcctctaacaccccacagacaatctctgaacttaactaatgtacaaaaagtttcatttctgcttctcaagccccaaattcccatgtctggaaggagggggcttgtatacccaagagacccccttatcctcaagaaagaaagatggaggttctaggagccattttagcccattaacccacctgccatctgcccagtatatgttaggtacaggaggagggggaggtgtggctagtgcaggaaaataatgcagagaagatacaacccactaagccaagaatgtggggacagttacagctgtgcctcccctgcttcccttcctggaggagctgaaagatggggaattcctgaggatgggcctaaaggggctgggctcactggtagaagtgggaatatcagagactgactagtgtagcttggtcacctagtccctactaaaaagccttatagcctttcctaggatgagactttgaggctcctagacaaaggcactctcccaggaggaaaatcttaggccctccctcccatgagggtcattgcaacatgagacccaagggagttgtgaagtcagccccagccccgcctactgttcctgggtgctaatccccagcacagaccactcaggaggagggattggctgaggagcttggagagggggcgtcatcacctcacccaaaggttaaataggggttgagatatgatgctcaggagaagcgctttctttcgcgagcaccctgaaccagaccatgacccagaccctcaagtacgcctccagagtgttccatcgcgtccgctgggcgcccgagttgggcgcctccctaggctaccgagagtaccactcagcacgccggagcttggcagacatcccaggcccctctacgcccagctttctggccgaacttttctgcaagggggggctgtcgaggctacacgagctgcaggtaggaagggacgcctttcccgagacagagtgctggggaaactggttttgacagcgtcagaaaggactgactagtgcagagcaaatgtgggacagccagagagaacggatgcccatgaaataaggaaaaggcgagttgaggctgggggcggtgtggctacactcgggcagagcccgtcccgactcttagcagagggcgctgcgaaagcgccttctcgctgtcctgaggtgtggagatcctgcagataaagtacaagtgcgcgggagggggaggccggagtgggcagtaccctccgcctgcttgcggcttaaagctacatgggttccttttcattcactgaggactcgtcctgagatggacagtccagacatggaacttttagagatttctcctcgaccgagatgatcagagaggtcctgaatgtctgccttgcacaaagttccggttttgcccatcacactcaaactttctagggatgggaaatgagagaggaggagtttgcagtatcaaaggcatacactagttgggcacccgagaaagagcagaagctccctattcccaagcccagtcaacgcccttggcgtgggcacaggtcaagctgaaagtccccgcccaggtatccaagtgtccgctgtgtccgctcccccaggtgcagggcgccgcgcacttcgggccggtgtggctagccagctttgggacagtgcgcaccgtgtacgtggctgcccctgcactcgtcgaggagctgctgcgacaggagggaccccggcccgagcgctgcagcttctcgccctggacggagcaccgc

SEQ ID NO: 5775 - DNA, 6000 bp, Homo sapiens
aaaagagcactgggattgggttatgctcaccacaaaatgggtggtaggagacccttttgaaaatggatgaaacttgccattcactgggacacagctggaaacgagaaactgtctggtgtgatctcagcaatttccaatggaaagctaacttccaactacctggttaaccagtgtaaacctctgaaggagtagagaaatccaacatcttatctcattttatttcaaatgttaaaagacctctggtcaaaatgaatttgactttctcatactaaattcttatttgtaagccattatccacaaaaactgagattcaacatttgatagcactgtgtcctctgtgtgtgtgtgtgtgtgtgtgtgtgtgtgtgtatacaagaaaatgacatcataagagtatcagagaattcagtgatacattaatcctgtttctaggtcactgttattccctgatacattttgggagattaaacagaattttatgtacctcttcttcctctattacaactatctttgctgtcactctgccttcacgcctattttctatatactgtaaaggaatcagaacagagctgtaagggacctcaaaagatattagttctcatctgcccagatggatacccagtggaagttctctctgccctgtggttcatgaaaggtttgagaagcctgtgaaaatattacattgatgtaaagtttcagccaggcaggtggctcatgcctgtaattccagcactttgggatgccgaaacgagtagatggatttcttgagcccaggagttcgagaccagactggacaacatggttaaacgccatctctctctctctatatatatatatatctatatatacatatattaaaaatacaaaaattagactggtatggtggcatgcgcctgtggtcccagctattcaggaggctgaagtgggaggatcgcctgagcccaggaagttgaggctgcagtgagccaatatcccgccactgcatttcagcctaggtgacagagtgagaccctgtctcaaaaaaataaaaataaaaaaattaagttttcatgtaggactagttcccctttgtattgaccacatggttaagcacatatcgaaatgtagaacagtgatttttaatgtgcgctgtattctttccatgtcatcctcttttactctctcaatgatcccattaagttctgagtaagcttaagccacacccataaaacgtcctctgttgattaattcccaaatacaattaaagtggaacaagatcttacttgcaaagtaacctttccaaaaaaatctcctagatatttgtaatctcctcctcccatatttacaactgtcttatcttcatctaattggatagcattgttttatcgattacctttaaagaatctttcccaaccttcaaattcattatcatagaaataaaggtattttcttgttgcacttgtatttggtttacacaatattgtgtaacattaataatatatataaacaagtctgtaactactgtggatcagcacctgacaggtaggagcaaatatgcaaaggctgttctaaggagaggctggtagtttctagatttcagctggtcataggcatcagtcaggttgtacagagagaacagagtgactgctaatccagtaactgataaatggaagccagccagataagatcgttttttattgtattcccaatttacagactgagaaactggggtactgaaaacttaggtaatttaacttcacaatagctggtaaaacccttaaaggcgataaggaatacatggttatcggaaaattctgtagtattacctgggggttagagtgaaaatggtctattacattccagtcaatactgatgtgctggaagtatactggaggtatagatagttaaacctgactcagggaagtgtttgccaaagaaggaatgccatcaaccaggcagaagaaggagcagagaatgatttggacagaagaaccatttgcaagagggctgaaggcaagagtacagctgggaagagaattgcaagtagctcctagagtaggagaaaaatgatgaaagacaatgaattaaagagataaatagaggctcaatgccaaaacaaacaaacaaaactgtataagtcactctaaagaatttgaaccttattctcaagacactaggaacccaagaaaagaactggtcagttgagtcacaggctcagatttgaccttcagagatatcacttaactgccctgaggagaaagcagtggaatgcctgataggtggcaagagctgctggtggtctggatttgcataatttctacagagagaagatacatttaggagctagctttaacatgacttgctaattgattgactctggtggtggtggtggtggtggtgagaatgaagtaatgttaaggtgactttcaggtttctggggcattcatctggatggagggaagtatccactctttaagacagtgaattcaggaggaaacaagtcagtttcaagggtggtgaaatttaattctagacatgttacatttgaacatccaatttttaatgacctgtgggtaattgcacatatggatttcgagtttaggaaaaagacctgggctgaaatatggatgttgtatatgtcagcatgtaaatgtaaatggaattcatggaagaagatgaaattatacaaggagaataaagaatgagaaaaggaaatgagccaaaactccccaaaatggtagcacatttatatccctgtcatatgtctcatgtctcaagagcaagcctccatactgatgttaccttgcttatgcataatggcatgtgtacaatggaatctttcttctttttaaaaacttcaatgaattatacctaattttccttgtatgaaatagatggggggccgggtgtggtggctcacgcctgtaatcccaacactttgggaggccaaagcgggcggatagcctgaggtcaggagttagaaaccagcttggccaacatggtgaaaccctgtctccactaaaaatacaaaaaaattagccgggtgtggtggtgggcacctgtaatcccagctacttgggaggctgaagcaggataattgcttgaacccagggggtagaggttgcagcgagccgacatcgcatcactgcaccccactccagcctgggtgacagactggagtgtctccatctcaaaaataaaaaaataaaaaaaataaataaaaatagatgggggatactgagctggaaaatccttactatgactgtagtgtgttttgtctactcccaagcagacaaaatcataaattcaaaaccaaggtgccatcattatagatattttctaattataattatacatcatccaaaaaggtagtagcgttgttgttaatggtagctggaaataagaaaatgggataccatatctaaaatagggtgtgttaacttcaaagtgagtcttttccttcccccgtaagtgggagtgatttgctacagtgaaaaatcaatgggccttagagtcagggttaaagtctcaactccacaagctatctccactcctcaatcatgagcagtttacgcaactccaaggacagacaagcttgggcagacagcatgcaataaacaatgtatagaagtgaaaacttactttaagcttccagggtttgttttttggtttgttcatgttttctgtcttgcttttatttttattttttttgcaacaaacacattagttacgttctctaggtctatttccttacccagaggaggaaggccccttagcacatgatctctgcggtctccattagtttcaacatcttgtggcgctgatcacctgtaagttaaggaacaaacttcactgggaagtcctgtagcctgaatccagccccaaacatccactcccccagctgaggaggccgggaggtacttttaccctggtagcattctcaatcaacatgtgtcattactcaaagcgcaagtggaccaaggtgcatatactaattttttcctccaaggtcttagttttcattttactttgaaatgtcactgtgactacttttattattactattaccaggaatctatgattgccatcgaggtctattagaaggtcatctcccatcccccaccccgcccagctttatccagtgcacgaaggctggctatttgtaattcaatatacactttccaaaaccacgagttttacgttttattattgtttttacttttgaagccgatgtatgggggaacacccaccagcattaacgttgaaagagctgttttcattgaaaccactctttcatctgtggatggtaggataatttatcagtgtctttaatttggaattgaaaagtttcctgaaaacactgctaattaaactttacttccctgaagttctcctaaatacctccaactccgagaactagcccagtatttgctcacttccttttgcctttcaactccatttgatatatgtttcccacgacgtagtggagacttctggctggagaggctggaaaatataactctgaatttcctacaatctcagctccactttctcccgcgcgtaggcccccggctggagcggtgttattgtcacgtggccacggggacgcccgcagccgagtcggccaatgggcgcgcgtcggcctctacccgcccgccttgctactccgccgcgcggggacttggcgcagtgccgcggggtggaggcgaaaaagtttcttttgcagacaagaaggggcttcggcgagccgacgctgctcaagctgcaactctgttgcagttggcagttcttttcggtttccctcctgctgtttgggggcatgaaagggcttcgccgccgggagtaaaagaaggaattgaccgggcagcgcgagggaggagcgcgcacgcgaccgcgagggcgggcgtgcaccctcggctggaagtttgtgccgggccccgagcgcgcgccggctgggagcttcgggtagagacctaggccgctggaccgcgatgagcgcgccgagcctccgtgcgcgcgccgcggggttggggctgctgctgtgcgcggtgctggggcgcgctggccggtcagacagcggcggtcgcggggaactcgggcagccctctggggtagccgccgagcgcccatgccccactacctgccgctgcctcggggacctgctggactgcagtcgtaagcggctagcgcgtcttcccgagccactcccgtcctgggtcgctcggctgtaagtattcttcccgcggggggagggggcccgggccgctggagattcgagaaaacaggagccggcggggaatggggttcggcgtgcagtcccctttttgccgtatagctccttctggcccaggccgcgatcggcgctccgtgggcgtggaaaaagaactgtccgggcctcagtttccctcccacgtgctttgcgggcggcgcaggtgggctcttggcgcgtcctaactggctgcaggtagaccagggttgggggccagtaacgacgccagagattggggatgaagtcctgcgccctaagctagccaaggggttcaaatgcttgctcctgccaggcccaggggagataagcggcaacctgcacacatcaggagtttgcagttctcgctgagttatgagtctggttcagttttagtttctagctgcgtcagactccttttcctgttcccacccagtaactgaagtcaggcttttcatttgggaagccccctcaacagaattcggtcattctccaagttatggtggacgtacttctgttgttctccctctgcttgctttttcacattagcagaccgtaagttcccactcctcaaccagattgtaaagactggtcggtagctatggaaagggcggaactcgattatccagaatcaagggcgtgatttctgtagctcctcagaacgcccagacggtttaggggagagcgcagggagctcttatgcaagtttttggatttttagctgcgaagtctgaaaacctgaaatcactgccaactgcgtgaagaacaaggaagaa

SEQ ID NO: 5776 - DNA, 6000 bp, Homo sapiens
gacgaagggccgccaggcagaggcgctcctcacttcccagacggggcagccgggcagaggggctccccacatcccagacgatgggcggccaggcagagatgctccccagttcccagacggggtggcggccgggcagaggctgtcatcttagcactttgggaggccaaggcaggcggctggaaggtggaggttgcagcgagcggagatcacgccactgcactccagcttgggcaacactgagcactgagtgagcgagactccgtctgcaatcccagcaccccgggaggccgaggcgggcagaccactcgaggtcaggagccggagaccagcctggtcaacagggcaaaaccccgtctcctccaaaaatacaaaaaccagtcaggcgtggtggcgcgcaccggcaatcccaggcacttggcaggccgaggcaggagaaccacgggagcctggggcagggaggctgcagcgagccgagaccacagcagcacagtccagcctcggcaacagagggagaccaaaggtgagggcgagggaggagggaggcaatgatagttttaaatacaaatttaaaagggcgtttaatgcatatgtggaatcaccaaaatgacacgatttgtatttcatagcttgtacatatttatttcattcttataagaactgtggaaaattcacacaaaattaaatcaattatttttatttcacttcttcatacatgcaaactatatcaacactctctaccttcagcttattgcaaaggataacctgaaaagaaaaggaactatgattgccatatctttccctttccttccgtgtctttgagtgtaagtggttgacatttacagggaaagaacacaagtaaaaaactatgtgggctgggcacggcggctcacgcctgtaatcccagcactttgggaacagaggcgggcagatcacgaggtcaggagatcaagaccatcctggccaatatggtgaaactccgtctctactaaaatacaaaaaaattagccgggcatggtggcgggtgcctgtagtcccagctattcgtgaggctgaggcaggggaatcgcttgaacccaggaggcggaggttgcagtgagccgagatcgcgccactgcactccagacgggcaatagagcaacactctatctcaaaaaaaaaaaaaaaaaaaaaaaaaaggatgtgacagcctgtaatcccagagctttgtgaggccaaggctggaggattgcttgaggccaggagctcaagaccagcctgggaaacacagcaagaccctgtctcataaaatttaagaaattaggtccgggcacggtgactcacgtctgtaatcccagcacttgggaggctgaggtggacggataacctgaggccaggagcttgagaccagcctggccaacatggtgaaacccagtctctacaaaaaatacaaaaaagttagccgggagtggtggcggatgcctataatcccaggtacttgggaggctgaggcaggagaattgcttgaacccgggaggcggaggttgcagtgagctgagacctgcgccattgcactctagtttggacaagagggaaactccatctcggaaaaaaaaaattagttgggcatggtggcatgcatttgtagtcttagctactaaggatgctaagatggggtgagcccttaagcccaggagtttgcagagagctatgattgcaccactgccctccaacctgggcaacagaacaagaccctattaagaaaaaaaaaaggatgtgaaaagattccttggtcattcatgtttcttaaaacgtcattgctttccttctgcattcaaagtaagttctcctcggtaaggaaagctaggcctcttggggctgtctgtgccttctcttctcttccctttactaagtcacaagtgtgacatgcttatcttttactagctttgagtctagcttaactcccaaacattgcaggtctaacagaattctgagctcatggggcatgctaaatgcttaaatgcaaatgattggcaggaaacagtggacatccacattgtgcatacctcttctattcatgttcatgttccattgtactttcagacttcacttacaaaacacatgttcaaaggcaaaattactaagtatttcaaaatggtgacagctgagcattaaaccaagtgcagagtccttcggagtccagggctctgtgcaatagcataggttgcacaccttttaagtcagctcttatttgagttctagataatccagttttgccaacacttgatattatcaatctcttaattttaatcatttggtgggtgcttagagatatctaattttggcatttatttacatttctctgatcaacttttcatatattagccacttggctgtgtgtgtgtgtgtgtgttaggttcctgtttcagtcttttttccttctttttttttgtttttgaggtggagtttcgctcttgttgcccaagccagagtgcaatggcgcgatcttggttcaccacaacctccacctcccaggctcaagcaattctcctgcctcagcctcccgagtagctgggattacaggcatgtaccaccatgcctggctaattttgtatttttagtagagacgggatttctccacgttgaggctggtctcgaactcctgacctcaggtgatccacccgcctcagcttcccaaagtgctgggattacaggcatgagccactgcgcccgcctccagtcttttgtctatttttctattgactgtctttttttggtctggatttgtaacaattgtttttatattctgaaaaggagccttaggtaggttatatgtatagcagatatcttcccctactctatggcttccttttcactctcttatggtatattttgattactagaaattcctaattttaatataatttaatttggcaatcttttcatttgaagttaagtgctattttgtatctggtttcagaaatctttgccttcctccaaatcatattctcctgtatcattttctttaagttttattgtttttgcctttcacatttatatccacaatctatctggaatttatttttttttgtaactggtaagaggtaaaggatcaaactttgctgatgctgtttttagtcaatacaaaggtgggttcccaatttagctccagtttgtcctctataataaattccattattacggcggggcagagaaagaggggatggcttcgggttaggatgggagagaaaacggattacattcccagtgtcatctgaagtaaaacttttctcagatttttctcagcaagctttttaagtcctctcacctggagagtgactaaagagatagaggccatatcccattcacctatccattcaacaaactaaactaaaacgaggggccggacacagtggctaacgcctgtgatctcagcactttgggaggtcgaggtagggggatcacttgagcccaagttcgagaccagcatgggcaacatggcgaaattccgtcactacaaaaaatacaaaaaattacccgggggtggtcacctgacctcaggaggtcaaggctgctgtgagccgagatagagccaccgcactccagcctgggtgacagactgagactctatctcaaaacaaaccaacaaaaacaaattaaaatgatatgcttgtaaaatgtttgtaaaatcataaaagataaagtgtttttttgttttgttttgtttttcttgtcattgtggaagtgacgttagttcttttggcaaaggcttctgagaacatcaagtttaaggatttagtttagaatagactgttccacaactgttctgaattccacttgctaagtgttcgggtgttgtggttaaggtgaggactgggcaatgtgggtagatcagagtaaactcatcaaaacaattccaagggaccctaggatgacactactctgggtatgtctacacctctttatattggaatgacaacaatatcatgaatattcactctaatccattgtatttgccaccatcatctctctcttacagtaatacaactttatccccttttctctgcctttggtaatggccctcttcaatgtattctacttctggcctaggatgatctggcctttgtttatctatccagcctcattctttgccacctgtcccctacaccagctgagcttcaccgtctccctctttgcagacgttggtcccttgaggcccagcctacatcactgctctttctctggttggctcctacttgcctttcaggattaaatattacttcattcagaaagcctggtttatagaaagtgctcaataaatgtaggtattattattattttaaaataatagaagtaaaaatgcatcctcggtgtgattattgaaaaagtggatgaatgagatgggtatttgttgagtggatgggtgactgggacatgggttctatcactttagcaactctccaaggtgaaaggacttaaagtgtgttcaggctgggcgcggtggctcacgcctgtaatctcagcactttgggaggccgaggcgggcggatcacgaggtcagcagatcgagaccatcctggctaacatggtgaaacctcgtctctgctaaaaatataaaaaaattagcctggcgtggtggcaggcgcctgtaatctcagctattcgggaggctgaggcaggagaaccgcttgaacccgggaggcggaggttgcggtgagccgagatcgtgccattgcactccagcctgggcaacaagagtgaaactccatctcaaaaaaaaaaaaaaaagtgtgttgagaaaagtttcacttcagatgacgccgggaatgtaaaccgttttctcttccattctaactcggagccatccccgctttctccgcccagctggaatttttgaagcgagaaaatcgactcgctcggtgttcgcccgccgacgccgcacggcttgctggggctgggctcttcctcgcggaagtggggaggaggcggttgcggttagtggaccgggaccggtaggggtgctgttgccatcatggctgaccccgacccccggtaccctcgctcctcgatcgaggacgacttcaactatggcagcagcgtggcctccgccaccgtgcacatccgaatgggtacgttgtcccctctccagtgcctcccagccgcttgtctgcactgctcggcctctagaagccgacttccggcttccgagggagagcggccatctcctgggactcacagggagtgctcactgagctcccggccctccttctccgggtaccagaggactggcgccctcctcagggagtcggggaggcgcttcctcccctcctagcgggtgtgggagggcgccaggcccagaaggcttgcggctgtcctgtgtgcgccccggctccccagcgggcgccgcggtgtaggaagggacagatggaaaccgccgcagcctgaatttggcatcttgaagtgaaaagaaacgtcgtggaaatgagtcggttgatcactgtgactgacgtacacacgagtggaatccacggcctgatgtttttgttctgtggggtttcgcgttacaggcttatatttaccgtcctgtgctaggctggaagctccctgacggcactatttcctctccgcagggcccagaatgcaacaggtctttgaggattattgaggaagttgctcaacacagaagcttcctaagtcagtctaaattgtgttttaagttattacgtagtagccaatgggcagaaatttttgaatttaaaatgctcagcttcatctacgtggaagccattgcctgctctagtttggtcatttgatcgccgaaacagccccagactttcagcctgtttaggcagctggaacttgttctggaaaaggaaagatgaagatagttctgatgtgctaagaatcttagtgcctagaacttgttctggaaaaggaaagatgaagatagttctgatgcaccaagaatcttggtgcctagcatttatatttttggaattgaattttgaaattattttggccagt

SEQ ID NO: 5777 - DNA, 6000 bp, Homo sapiens
agtctagttatactgttctcattcttgttgacatctattgaggtacttagccccgactatagttattccctctgtcccaattcctgctactatcttagggaaattcagagtccttaaacagaaccaatccaacactctggctttttcattccttaatttcccatttccagtgatctttacctcctcttcacttttgtaattcactctaagatattttgatcctgttttcattcagaattagtcattggtcctctctaacacttttgtgctttttcctctgctttgcttttaaattaaaatgccttcattgtttttccaatttaaaaaagcaatgcatgtttggtggaaaaacttttcagaaaatacagaaagatgtaaaaaagaaaattaaaacattgcaactcgtggatttgcactcagcatgttggtaaccttagaaacacattgctgggaatagtttttttttgtttgctttatctaaatgagatcttactatttattttacttttattatctgcttcttgcctgaacaatttgtctttccaagtgaataaatgcagatctacattgacattattatggctgaaaaacaattaattgtacagctataatattctttaacccagggtgtcttaacttcagcactattgacattttgggctgaataattctttgttgtgggaggctgtgttgtgcactgaaggatatttaatgcctccctgccctctgtatcagcactagatgccagtagctcccatccctagttatgacaatcaaaaatgtctcaagatattgccaaatgtctgctgtgggcactactgcctcaagttgagaaccactgatctaaccaatctgctgttgtttgacatttaggttttatctactttgtcacaatttaaagcagcagcacttatgaagctcctaacatatacaaactcaacacatcttcaaattacttctatagcataaatttctagcaaggaatggcacatacaaaattttgatgtctattcccagatttccctccagaaagattgtattaatttagaacaccattgaaacagcataaatgtcatttcctgagatcctgtctacttccaggtattgtcaatctttttaatcttgctttgtgataagcaaaacaaagtattactttacccttttaacttgtaattctttgattgcttaccaggttggtaacctttactatatttattagctatttgtgttactgcttttatgaactgcttattcatctcctttgctcattctttattttgtaagagcattaattccttcttccagcttgtaatttttctcataacctgatttaaacctttcttcttataacctttataaggttttctgtacagaagtcatacatttgtatgttttcaaattattagcctttttattatggttttacctttaatggtgccatacttagaaagatcacctctaggtccaggcctggtggctcacacctgtaatcccagcactctgggaggctgaggcaggcagataatttgaggccaggagttcgagaccatcctggccaacgtggtgaaaccccgtctctactaaaaatacaaaaattagccaggcgtggtggtgggcacctgtaatcccagctactcaggaggctgaggaaggagaattgcttgaacccgggaggtggaggttgcagtgagctaaaattgtgccactgcactccagcctgggcaacagagcaagactctatctcaaaaaaaaagaagaaagaaagaagatcacctctaaaatctctaaacttcagtattttactctattaggctaaccttttattttgctgttatctttcatactcttaacactaaatttttttttctctcttgaccagtgcaccttaaacttgaatgtacatatacatcatctggaaatcttattaaaatgtgtgttctgattcagtaggtttggagtggagtgacagattctacatttccaacaagctcccaggtgatgccagtgctgtccctggcctgcactctgagttactagctcctaaaccttcagcactcagtcctctgtaccccctacctccattctctgactccttcctgaagttgcctcccttcctacctagtgtgaaccccaatggcagcaatttcaactatagctcatctctgtttttccagaacaacaatcctggcaatctccattccagtattgatgaagccaccatttcttccagtctccagccacagcaccctgcaggaaatcagatagtgtccacgtacttctcttaaaaagataggatttctaaggtacatcagcaagccttcactttgttcccacccagttccctttcccattcctagagtaactttgcctaaatttaatcttctcaagctccagtccccctcctcagacctcttagtcaatgaacaacaatgaaagggaaacgtcttcaacccttccagtggaaataacatttagcatagtgactactgcacaattaaaaaaaaaaaaacctactcaaagactctacaatgtcatactaagacttccaactcttaggccaggcaaggtggctcactcatgtaatcccagcactttgggaggctgaggcagaaggatcacttgaggccaggagttcaagactagcctggccaacatggtgaaacctggtctctattaaaaatgcagaagttaggcatgtgtggtgtaaaaatacaaaagttacgtaggtgtggcgatgcgtgcctgtaatcccaggtacgttagaggctgaaacacaagaatcgcttgaacctggaaggcagaggctgcagtgagctgagattgcaccactgcactcaagcctgggcaacagagtgagactgtatctcaaaacaaacaaacaaacaaacaaacaaacaaacaataaaacaacttctctttaagaaaaaaaaaaagatggccaggcacggtggctcacgcctgtaatcccagcgatctgggaggccgaggcaggcagatcgcccgaggtcgggagttccagaccagcctggccaacatggtgaaaccccgtctctactaaaaatacaaaaattagccgggcctggtggcaggtgcctgtaatccgagctactcggtaggctgaggcaggagaattgcttgaacctgagaggaggttgcagtgagccgagatcatgccattgcactccagactgggcaacagaattgagactccatctcaaaaaataaagaaagaaataaaaaattaaaaaaaaaattccaactcttggaaaattccctttaaagagttacgaattaagctggtttatttatgtaataaacgcttcgcacagttcttacaatgtgcctgccaaccttatttaggtaggtacaattaagacttccactttacacaccagaaaataaggcacagagtcgacacagccactgagtgtcagagcaagaattggcactcatcccgtgagcgcctcagttctttttttttctttatatatactttaagttctagggcacatgtgcacaactgtggcacatatacaccacggaatactatgcagccataaaaaaggatgagttcatgtcctttgtacggacatggatgaagctggaaaccatcattctcagcaaactatcgcaagggcagagcgcctcagttcttaaaccactcttctatgctgcggcagaatcactggaagtctcagggagtcctgagtgcgcaattctaggaaaagtatctatatctgtaagaaagaaggggcagggaatctaacggttctcagctcttgaaggcacattagattcattcaaggtcctctctaaaaatacactttcttgggcctccacgagaaaaattctattcaattagtcgtgggcttgcatccgtatttttagtctgtaaaagtggaatgttatctcaaatcagtggttttcaaactttttatattctgcggaccttgacacgggcccccaataccctgacacggttacttacaatccgggagagagtgggagaaagggggagagagggaaggggagagggggaggggagagagagagaatgaatgagaatgaatcttttagagaggtagagggggttggcccgtgccacaaaccacctctcaggtttgagtgaagccttcgttctctctcgtgcagagaccatgccatccttccagaaaggagcattttaggacgttttaggacgagagacctgtaattggcctaagactcaggtgcaggtggaggaagcatcggatttacaacagtggtcctgccttcttcgatgtgacttccagttttaaattcaattctaatttacacaaatcccacccactatgtaaacttgttggaaaatgtcctgcactctgcacttcgtggcatttaaaacttccacacacgcgcgcgttctttctcgaagccccgtgattgcttagcctcgctgggcagcttggcactgctgggagcttggctcgccctgccggggccgacgccgcccgtcccgcaggagcccgcgcggggctcagggcactcaggactccgcatgcgtcccggctccaggtgggccccggcaccgccaaccgcaggaaacccgccgagccctaaacgtctcccaagcggctgcagtctgcgacagagagtgtccctcggtggagcgccctgtggctgcccaggctacagccgtggccgaggcgaggacacacttctgacctggggctccagcaaagactgtccgcgagcggcgactccatgcccgcagccctccgcccagctcagccgcccggccgcgggcaccagcagccgcgccacgaaagggcgcaccgcgcgggcgccgtctctcctaggtgcgaaggcggctgaggccccgcccgggaggcacccgcgcggctccggagtgggccggagggacgtccgggggcggggcccgggcgcgcccgccctctgaccgggctataacacccggccccgccgggcggccgcgggtgggtagaggtgcgcgcctgggacctggtgaggctgggggtgcgcggggccgggcgcagctgtggcagctgccggacggcggaggcgccaggaggaggaggagagggaggcgcgggcggctgggtcgagggcaccgaggctgcccgtgctcccggtctctggttgcacggctcactcccgaaggtgttgcttccagcttttgcctccttaggaggcagggagcgtcagtgtcgggagaccctgagaccggagtaccgagacgtagctggtgatgcccccgcctgccctcatgtgttctcaggttcttcttatttttattcatctctagaacatggacttcccgtgcctctggctagggctgttgctgcctttggtagctgcgctggatttcaactaccaccgccaggaagggatggaagcgtttttgaagactgttgcccaaaactacagttctgtcactcacttacacagtattgggaaatctgtgaaaggtagggtccgtctcgtgaacactttgccaaaccctcagtcctccctttcagtattcattaaatatgccccagcttcctgtctgctcttccacgcacctactctgagtggcacagaacaagtcaaccggtaccgtgcgtgttggttgttttctgcttttgttgggaggaatagtaggaagaactgaattttactggacttgtccattgtaattcagtgtcactgagtcctttccattattggagttcttctgtctttttggatcttgcagacattggttatttgggatgtatgttttagttccttttcaagataaactcccaagtaagtccgtttatccgtttcagttcccctttgtgtgggcttctttatatatgacttggactgttaatgtcatttcttcatgtctcttttaaactgaaataatgcagttttgttggtaagatttctgtgtcatctgtagttagccttttatttaaagttatgcaaaactatcatttctgcaagtttcttttaatctaagtagtacagttc

SEQ ID NO: 5778 - DNA, 6000 bp, Homo sapiens
aatggaagactaatatattgacgatagatagtgatccagtaaacaagagcattgtgctgaaactaacaagttgaaattaacaagaataaatagaaagccttgcatttagtttcaaaaatccagtagcataattacaggatgggagaaagctataatgtccacattcaaaaaaagtcttgttgactttttatttaatctacaccgtcagttagtatcttaaaatactaccgagaaccaggcaccatgtaggcactgggggacctcaccacctgatgcacctgcaaacacagatctattggtctctaacgtgcagctggaagagaaaataagcctgcttcatagatctcatcagaaggagacacaactctctaagaaggtcatatttgataaaatagcctgtagaagagggagactagagtggtgagtgacagaaaaaccaggctgtacagaaatattgagtgaccacaggatgtttagtctaaagaagaaaagattataggactttgatggctgttttccagcctttggagagctgttgtgtgactacaggggagccttaagacgtcttttgggttatttcagttggaccaatgcggtgaaagttagaaaggacagattcatgttgatgtcttaaaagttttcctgccaaccttggaaaaggctgcctctaaaattgcaagatttctaaaaaagctatattgtcagtgactagaatggatgatctctaagaattcctctgatgccagtttttttcatttttattttccaaattaagtgggaggtaagagaacttttcatatactttcctgaagccttcagacctgcaagaattttgccagcccacaattaatgagtatgcttctccatcttccccactttcactggctaaaacaaccttgatttagtgaacagaatgtcatagtaaatatactccaaccattaaattacaccactgacccacttagggtgaaacagttattaaattctaaactgtgtctccattcattcaccagttggacatgtaaataccagtgctgaccagaacatacaagaaggggaaaatcttgcctcaaagtgaggtaaatggtgagaggaagctgacagaccagagcctaagaggtggagcacatagaagcttccacatactgtctgcagctcaagagggagtaatggtgccctgagctgtgcaaatgccagaggaagggaggcacctctcagctccctggagctaccctaatatttactgtggtggtgtctcccaagcttcacagttcaagccagcatcttcggaacacctgctatgattttagatgagcccagatgtcatcacacagctaagaagataaaccattaccacattctcagctggccatttctgttgttcacttctgaccaaggaatacttagcccagaaggttgccttcaatgcaacaaaatgtacagctctaggggaggaagaccaattaaatacttctgtcaataagttgctgtcaccaaaaactgtgaatttacctctttattttttgccaattacatcattttgacatcatgttaattttcctggggaatcactgtttagtttaaaacaaggaagttttactgctctaatattgacatagattgacaaataaacatagaagcccagtttttattattaccattaactagaagtcttgttacagtgagacaagatatcttgtttttaagttgaagtgcctaaataatctgaaagttattttgaatgatactaacaaccacttggaaaaatctggttaaaacatagagttaaactaaaagataagatcagttgcatgattgcagagttacagagaatttacaagactttaaatagttaccgatagtgatgcttttatacagtgagcaggaatagtaacatattaatgtctggtaactttgtcaagctaaaaaatcataattataggactggacaccgtcgttcaagcctgtgattccatcactttgggagcccaagacaagaggatcacttgagtccaggagaccagcctgggcaacatagtgaggccttgtctctacaagaaaaaaaaaatttaaaaattgtccaggtgtggtggtgcctgtggtcccagctacaccagaggctgaggtgggagaattgcttgatcccaggaagttgaggctgcactgagctgtgatcatgccactgcacaacagcctaagcaattaaggagacgttttctcaaaaactaaaattaaaaaaggatcataattatgaagggggaaaatgtgatataggtattatgtatataaaaacataatgagaagcaccgttatttctcatgaaggcaagtgctttctatgaatccattgacaaggagggtgctgggcagctagtgatgataatggtgataaccaagaggaaaatgtcacagcagagccaattccctttttccaactcatttaaggacccacccactattgtgtttagacaccccgtacaccaaaaggctaaggttgcttctgtacaacatattcaaataaaccattccaaggtagacttcattttacttgtagaaagcaacattttgcagatgagttttgtttggtttgtctccgtcaatcaattttaagccaaatgtataaaccattttaacaagagatgaatcatgaggcacctgagaagtaatacaaatataccagctacaatgaatttatttaaccttcacagcagtagttactgttactatcctgctttaacagaggaagaaactaaagtgcaaggggtttcgaggaatttgtccaagatgcatacagctaagaattggcagaggagggatttgaactcaccttggctgatgccaaatccaagtacttgatcattaggctgtaccacctccccagtaatgttacacaggtaaaaattaatcacgtgcctagtgtgtgctgggaactgtgttaagccctttatatacattaccatgttaactttgatagttgagacatttggacacaggtaagagggataacaaaagaaccactaggtcgactgttctatgtgtctttggcataataccctagcttggatgaaatctctgtgttacttgaaattgcaagattttagcaaaatcagttattttatgatttcttccttgcagaggtggaatggtgcaaaccagtgagcagtatgaatttgtgcaccatgctctgtgcctgtatgagagcagactttcagcagagactgtccagtgagtcattgaagacttgtcagaccatcaatctcttggggtgattaatcaaattacccacccaaggcttctagaaggagcttcctgcaatggaaggaaggagaagctctgaagcccatgtatggcatggattgtggaagactgggcaacatatttaagatttccagctccttgtgtatatgaatgcatttgtaagcatcccccaaattattctgaaggttttttgatgatggaggtatgataggtttatcacacagcctaaggcagattttgttttgtctgtactgactctatctgccacacagaatgtatgtatgtaatattcagtaataaatgtcatcaggtgatgactggatgagctgctgaagacattcgtattatgtgttagatgctttaatgtttgcaaaatctgtcttgtgaatggactgtcagctgttaaactgttcctgttttgaagtgctattacctttctcagttaccagaatcttgctgctaaagttgcaagtgattgataatggatttttaacagagaagtctttgtttttgaaaaacaaaaatcaaaaacagtaactattttatatggaaatgtgtcttgataatattacctattaaatgtgtatttatagtccctcctatcaaacaattacagagcacaatgattgtcattgggtatatatgtatttactctctattattgggcataaaggtggcttctgctccagaactctatccactgtatttccacatcgtgagtcattttactttaaaagggaaaaacaaatttgtagcaactctgaagtatcaagagttttaactacttgtctctcttttgctaagaagggatttttgaatatgctatctacctggaatctctctctcaacaaaaggtatatgccttcaggaatgatataatctgtcccattttcgaggctccttataaggacatttccatgtatgtccttacatttctgaaagctttcaatcttcaagagacaaaaaaaattaaaataactaccctcagcaaacactagctgttctgctcatatatgaatttttaatgcagcaatgttgactttgtttcatactgccaataaactcttaatactaaatactgagtaaagcatattcttttttttttttctatttggaaagacgccatcctctgtttggggaagaccaaagtagataatgtgatgggtttaattttagtgtctgcatctccccagtgaagatgacgatctcaaaatgtaatattgtcatcacttgggagataatgatctagaagtgccatcattatgtggttttcctcaatagactcgcagcatatcattatacaaacagtacatgtttatgtctttatatcacttgtcatagaccctcatcaattacatggcttatgtttattcagcagaatcacatcacctgaagagatgtaatgtttcaggaacattcaattatctgagatttcaattcctttctttcttcttgaggttaagaagcagtcacatgccaaaggaaaggtaggtgaggtcttaacgagatttactctgctcttgaaggctggaatattttctacattaaaaaaaagaggtaatcataatcccttctttctaaggaaacagacaaaaggacactggtgtaaaacttccccaaacaattcaataggaggaagtgctcgtcactgacttttccccccaccatgaaggcacatttccttcctagtctttgcttctcttatctgggagaattttttttttccccaagcgaagcatgaacagttgctaagtggaaaatggaggctgaattttacatggtgattcttacctgcttgatcttcaggaactcaggtgagtgggtctgcctcagtgtcctgaggcatttcttcaagatctagccaaggagtccctggtctttgaagtgtctgaaataaggtagaaggggccaggtctccatggcagtttagccaaagacgatgaaaagcaggaataaaaggagccagctatgcccatactgttgagatttctctccaaaagaaaataaatgctctcctctcatcctccaaatgcttcaggcagcccctgaaatgatacatttagagcagagcgtaaagaaccccgaggaaaagtttgtattattatataacagtctgtggctttccccaagcctttttccgacccggttatagttttattttcttttgtgttgaagaaagaaaattgaaggaatatgattaaagggggtgaggaaatgtagtgtgttttatttggaagttgtcatttgggagggctgaacattttcatgagcgagctgggcaatttaagtaaaacctcattgaaaatggtttctgagccagagtatcttgctctttaatactgatgtttagcaatttgatgtttaattttcttacactggcacatgatgatttttagaaaatctattcgtatttgagagaaaactgtagatattgtcataaaatagagaaatgctcctctccacgactaaaggaaatttagtttgtgataatcaatactttcattggctgcaattagctaggaggttgtgcttggagaagtgggaaaatttgttttattttttgataaatgtatgcaattttaaaaaattgttattcaaactatgaaatttgtatataaatactgcaatgtgaatttaaagactggaaaagggggtgcttttttaaggtaagggaggaagcttatatcgaatatgtcaaatggttaaaaagggagctgagcatttcataacttcagcatatcta

SEQ ID NO: 5779 - DNA, 6000 bp, Homo sapiens
gcagaatctataggtacatatagcctttctgcttttcatattttatgttttactacaatagcataattcacatatgcacagaaaagtatatctgccttgttttaggtacctaatttttttccttaggatacatattgctgcctttgtgtgtgtgtatcaaatgctttaatttaacaaaactacaactgtgttaagttataaaatgtaattgttgttatccatcttgaagtctgtgtcttgggataagaacactgttttcaatttaagtattaaaataagttcggtcattaagcagggatgttgtacaatacagctgataacagcatagtgctaggggtcaccatacctgagttctaatcccagcttcaccacttaccaactggatggctataggcaaattactagcttcgctgagcttcagttttctcctctactacaaaaaaaaaaaaaaaataatacttcacacagctcttgtgagacttcaatgtgataatatatatttttagaattttagtgcttttcctcccctattcttattgccccttgcaatttcattgttctcttcactgtatgcttatgagaaagggtagatcattcttcttgttatggttgggaaaatactaaaaaataataatggtgaatttatatacctgaacatggtattttcatctgtgaattttgaattcattccttttcatcctgagctatattccactctgaatatagcttaattcacatcaattatttactttgtaaaaagaaattatttttcttcttttctcctcttataaaagatagctctcagacaaaaggaaacagactttgggattgataaagtggctgcataaaggatgggaaagggcaagcacagaacaaatcttagtgaggtgtttataactgttacctattgctcccttacatgttcagaagttccttgaatccattttgctgctttatatctctgccactggctcacacaattccctggcctttctcttcatgtagagcagttagaacctacttatccagccagactcagttcgtttcctgttgcccaccagtttcttgcctgctgcccatcccctcctctgctcccaccctccatagaagaaatcatttcctccattcttctccattctatcttaagcatctttctaacacagttcctctaagcatgattttacttgctgtctttgttcactagatgctagggcccagagtccactgccacaagcagtgtctcttgttctcctggagacagtcttctatgagtgttcctcaacacagagctttactgtggggccaggcatctcatgcccagccctgatctaatcatctaattctagtgagcaacctacaactgagtgtgtgtgtgtctgtgtgtgtgtgtgtgtgtgtgtgttattagaggtagtataatatagtggtttggtatcaaattatcagatgtacatcttaattctatcaatttactttttaactgattacttactacttgattttgggcaagttacttctccatgcctcaactatattatctctaaaatgagatcattatagtatccttttgtagaaatattataatgtttaaataggacatccaaatgcttagaatagaacctggcacacaggaagcacagtcaatgttagccataattatacttaaataatagtaatctaaataacttaagtaggagatccttataatcaatggatctgatttctcaatttaaagtgtcttaaggaaagatggctgacatgaataattttcatccatttatagagaagtaaatatggatgctcataatgattaaatctgttttgaaggcaggctctgaaaagcttctttcttgcataaattttctctaagactcacctcataagaaaaagaaattatgcatcttatgtggaggaaaattccatatgatattttttatttatcttgtaaaatgtaaatgattcttttatgacatagctctgtaggccactactaatttgtatagttctctcatagtaatttccatgcttctttgaattacagctaactttttaaaaccctgatgcagtgttttaaccaagctttttttccaaaacaccaagtcaccttcactagcattagatcacagttaaggaaaaacagcacctatcgactcagaatatttctgtatgagttaagtggttgactttttcactaattggctaattcattcattgctgtttgacttcacgaacagcaatgagtgaattagccaattagtgaaaaagtgaattgaagccgttacaagtatgatattagattgactcacataggaatatgacctttttcgttactttatcatttctaagtaaattaataatgaatgtctagtcaccaaaattacagcccactcagggttatttttaccatgctgaactaactattctaatgatatatccagccaaattggaaattggaaatttttgctgctaacggaattttcatgcatagtttaacaattcagctacctgcagccctgaacaaaatacattgccagcaggatgctttttggcaaagtcatagtcaattataataatgggaattttaaatgccccaccaataaatgttggaattatctgtggaaaaggaaggggttcagaacattactgcagcattgtttcattaccataagtaagtatattttattcttggagatctatgtaagtttgataattagttattttaggaaacaagaaaataagaaaaatagacctattgtaagtgggatacaattatttttccctaacctccagccctgcagcatttctagtaacagatgttagatgagaagagttattcttctaagctttacagaatgctaaataaattatctcaaaggttgactcagtaagaatttcaaagagttaattgtcagtattgaactttgtcaactatcattttcatttattcatttttgagtatctattttgcatgaggcattgctctagggagttgggacatatcaataaagtcatcaaagttcttcaacattggagctcaaattctgttttgcgggggggagtagggaaatagatactaaacaatagattttataagtaattattttggtttgttagaaagtgatacgggaaaagcaaactggaggacagtgaatcaggaataggagaagaggttgcagcttagagtggtttgggatgaaatgatagtgccacagaaatggagtgtgccacacgcatgggggagtagggggtggagcacgttgctagagaggggctagacatggagatatgtctctattttcagcagagaaggcctgtcaagatattaaaagtacatctcattgtccccttctcccacttgttggagtgcttcctggccttgtctctcagagctgaagatgacataaatcataaaagaaataaatggtaccgcctgggctctctgatcttataaggtcccacctaatttaagctctggtggatagcctatttcccattagttgtctcaattcacagaggatggagaaagaaagcactgaatgagatgtgcagctcaactcaatgggcacttgttagccccaattatttggctaggacaactttattcaagttaatggaatacaaaactcagcagttcttatggagacttcaatgtgctgtagaacaaaccacagataaatgaactgtctgaaagaataatatgaggcacggctaaacaagtgttgtggaagagaaagatcactgtaatctagagttagttagagttagggctttctggaaaagtgagaccaacattacaccttcgaaaactagtgtggtggtggtgcaagtggaggaaaatgggaaagaggcaacagtgtccataaagacacagaggcagaaagggcagaggccctgggatagttaaaagagaagtctagctgagggacttcttgacttgactagcagcaattagccatgactaataaggctttccacactccaaagacttagatggagggataaaaaaccatctaatggcagactgtggtagcctccctagagacacagagctgggccggatgagtccaggcactgacgtgatccattatctttcaccttaaagagtaaaagggaaactaaagttaattacctccacgaaacaaaaaggtgccttcttgtgcttcaattacatggatatattctactagtctaaaagtatcttctcacttctttctgtcactgtgaggacttgagtcagaagaaagtttaaatacagtcattgagctggaaagagtggaaagagaagcaaagagggggaagctgtaggaaggacgaagtcacccccaagatacatggttactgcttacaccaagcaagctgccttgggaacgcttcccccgagcagccagaatgctcagcagtggaagacacctctattcctgtaggcgagtcctgggaagctggtcaatctgcaaatgccaattcccagcagtgagctcggtccacgtgtaaatcaagatttggggaaagagtagggtgggtggcatggttgacaatgtcatcagctccctcctctgactcctgtggtcgtgcccccatctactctcactcagctacaccccaccttcggatttgtgatggacgctgggtccctagtaaccacagcaagtgtctcccccgcacttcccccttccccacccccacccccacccccaaccaccaccccagcgatggagcctactctgctccaagccgccgctaagacccggagaagcggaatttcactttgaaattcccttgcctcgtgagggccggcgctgggcatgctcagtagccgcggcgctgctgctgggctgctgggctggcgcggagtccaccctgccgtctccgccttggcttctgggcgtccagaaggccaggcatttgccgcctctgagcgcttctgttccccttacccgcaacctcctactgctcttcctctctccctctcttagggaggttgaagctggtgctggtttctgtcggcgccacagactgactgctctgcaaaccccagccgaggacctgaatcccggagactagaagacccttggcggtggctctttctaatagcactttacctgaagtggggtcgtggtggagtttctcctccacctctcaatgcaaacactatgcggagagcagtctgcttccctgcgctgtgcctgctccttaatcttcacgctgcaggtaaggggttgccaggcttagagccggagctgtgcatgagatgggaaactgcacatgcttaaggactctaggaaaagcttgccttgcgaagaaagcctttctaaaaaggtaaaacaggacagtacctgacagggaaggggtgagggagtcgtgcacctgttggaaaactgaggccgaaaacttaacctaaaattagctcttgatttttctttactttatacgaaaatagtgaacattttcaatatgaatacaggtttgctccccccttcgcctcccctccgtctagattccctgctcttgtttctaggctatgcacttaactgtcaatttttcaggagagggataagacatcctgctagatgtaaccttttctactgcagcggctactacattcataaggtctcttggtctagcgagcgctcataggaaggcattggctgtaacctgatggaccacatctccgcccaaaagatcgaaatacatggttcacattagtgatgctgcaccaggctcctttggcccctgctcttgtcactcgaattttctaagccaataagaggaagaaaaggtttcaaatagaatcctcttgtctctttcagcaccgtggctagcgtccgctggcatattaaaaaaaaaaaaaaaaaaaaaaaaaaaaaaaacaattacagttccaaagctgacaaccctgggttaggcactgtccctcggacagatttgataaggtgtaaccaagagtaacagtgagactgctcccaaatataaatagatttgaggcaccagaatcaatatcaa

SEQ ID NO: 5780 - DNA, 6000 bp, Homo sapiens
ggaaattgacattctggctcctgtgagagcttttaaggtgaatctttcccaagaagcagatcacccctggaaaagctggcaaagtggagcttcagggctgccaagccaaggacctgaccctggttcccacccagcagctggtctcttaacctgctgtaaaaggagtataaatgccatagtgaggcttaataagaatccacagcatctctaatctgccatggttataaactgcatttttaatcactgcaccattttgcctcaattttccttatacacacatattttggtgagctaaagtctgtttctttcatacacatttccatatttttccttatgtgtcctatatggtaaatttatgtccaggtgcaagtcattaatattttagaataaagtatctatagaagaggaagaatgttgaatactgggtatccattttctgtaaacactgtattgctacttcacaatgacaattctaacccctactttagttctgagctggaattaatactctcaagtagagacagttgctttaaaatgtcctgcaaagagaggagaggcatctttcccataccggatgcttcctatctggtgcatttccagtgggaatacatgaaaggtttttatgagccaggctccataagcacagagggtaggaaacagagcattgggatcacatgaaagcagaagaagaatattggtctcaggaaggctagaatgggactagaacacaagagccaaggctctgctcctgtaaaagagaccataaaacccctaagtgagaactccaactttccaaaaataaaaaaggtttttcaaaatgagacatgctaaaagcaccagaatctcttcactcaaattgttcagagtgtatgatctcatgtccttacatacacacccctcagtacagtcataaggaagagaaatctcaacattatgtttttattgctgctgttagcctttgagaacatgaattgattattaacaacgtcatgaaaaacaaatagtatagagggacagtgataatgggagagtataaaagacaagagaaaaaaataatcttttctctaccacacatgaattgcttttttactgtctattccatggacaaatatatcgggtaacgagatgttggaaacaaaaaggcaaagaagttaccttttcaccatggtgtaaggcctaggaaggcagggatttttatcttgtttcataaattactatgtttccagcacttagtctcattcctggaatatggtaaggattcaatacatcagttgaataaatttttgaatattatcttatggaggagaagatgatatcatgatgaaaatatgaactatctatgcttaatttctggtccaagtcccaaacgtaggcctggtttgcctgatgacttagagaaaatgccatattttctgtggggtatttgatggtactactcatgcactttcctctgccctgagcataaggaatctctctctctctttctttcccctgcatgggttcccatactgctatcaaaatctagttcactgatgactgcctcatggagacttttcacaattaatcaaattggaatcattatcctgccttactctgtgcatttgctgcaatgaatagtaattggcatgatggcaacattagaaaaactttatctaaatttacttagactttccctctgttctttccctcgattgtcatttcttcttataatatttcactctccatttctttccttactggcccggtctttcacagggtctaagatttattactgacaatctccaacccctgcaacctcccaccactgttaaaatatctgttatatgaaaatttctcaatatctaagacacgttaaatgagtaatgagtaaatgactcattctcatactacagaactcaagagattgttgacgccagtagacagaatactgatctgataatcctgtgaccttgtttctagaaggagatctaaccagttttgtgaacttgggctactcaatctgcctatgctgctcttttctcaggtgtaagagtgagagtttgtctagaacagtgcttctgtaagtgcgtatgtgtgttctgtaacaccagtcctgaatatgtcattcaaaaatatgttctgagattatattcatttcagaattgctatatatcacctccttgaatattagaaagttgaaggctctgacaagtcctgaaattaataaactgtttttcttgacctaatagattttttaaaggcagaggtagcatattggtagttccctagagaacctaatgaggaaatcactagttgaactttctgaggagcttggctgccattgcaaatctctgtagctctaatgccagctactgtaggtacagaggtgaatagggtaagatttctgcttttcaggcatatagaatcaaatgtgggggagagacacaaataaatgtgatatagtggcaattgtagatttaaggtctgttcaaataataatggacttgaggactgagaagcaagtaaatctgcccagagtgggggcagaggatgaggaagggaaggctccacagggatgttgcaatagagaaggtgggaaaggatattccaggcagaaggaacaaggcataaaatccaaaggtgtgttctaggcctgggaaataattctgtggttatggagcctagaagtggaggctgcctaggaagaaaggggagggacaaaattctggaaagtgggtggaggacttgtttgctgtgtgctgtaaatgctactttaaggaatctgaactttatcttgtaggtaaaaggaaaatatccttagattgggttttcatcattatcattacctaatcaataagtatttctcaaaaagaattttaaagtgctaaggcagagaggaactgggagaaactgccagggaaattaattctcattctattgacacagctcaagtaagaaatgataaaggactgaataatgaaatgcaaaaggatgagatggaagaaatagttttgacagtaatttaggagctacacagaccagtaagagtgattggatggaaagaaagagaaatacaaaatatctgtacaaattcagcctgggagagtgttgtgtgattataacattaataggaataggaatttccaggagtgaactgtttcatataggttttgaattagactaggggttctattacacagtcattctcctgtacaaacacatccattgatttttgtgttacagagttcaagagtgattcaactaaagactacacagtattctttttaaggatgttcagcatccaccaaaatatctatttcaaactaaaatttggtagtattcaatacattcttttcaacaaagcagcatttaaatctgtaatttttttttaattttagcctctgataaataatcatttctgggactatgaatcaattttggttttcattcaatctgaaattattctttcagccttggattattctatatacaaaatatctcaatagaaggttgtgaaactatccattttctagtaggaaagagaacacaaacaattttagtgatgatttatatattaagccattatttttggaattaatcctaaatttggcctttaacgctatatattattgttgataatgcattaaaatatattgtatttgtagtcagggagtagaattgtttcaaaaacattgtatgccagtgaaaattagaaataatatttttcttttgtaaggagttcatgcttgcttatcgtgtaaaacttagcaaagattctaaagaataattttctcaacaaccttttaaagtagagggttcttttatttagggggagaagaactccctttgagaggcaggatgtggaaactaacatgacccaggctgtttacacaaagcagtccacacctccctgatgatgtcggagcattttgcctttacctgagacagctgccttctattagcactagaaacaaatagtaaaatctatggtcactgatccatgaccaccttcccattttgaatttttttgtccgggaggacctggaatccagaaactgagttggtggagaacagctgttgctagatacaatttatcagaggaaggaaattacagtgtccaccttaaaaacaaaccaagctatcagaatgactacgcattataaaatgaaaacaatgttgcagtcagtgccactttatgatttctttccctttgtatcataaagaaataaagataaaaagcaaatggtcttatcatgataggcaaggctgcctctccctctgcaatttctgtggtgtatttacggcagctctggaattcttttgaaataaatttagatgttttggagggcagatacatgtaatggttattttactattctaggtttaatgataacaggttgctatgtctaagctttgatattttgcagatttctaaatgcattttattgcatttagaaggaattttgtagtattgagaaaatgcaatgcaaaaatgagtagagatacaatgtccatttaactcagaacaaaacaaccttatttccccatagttgaaatggagggcggggaagtcaggcagtggtttctgaaagccaagaacttagtagcactgtgccattctcttgcctgatccagtgccattcccttcacttgatatctgtttactttagaggaggcagtttttgagaaaggatcataaatatcctggcccagtgccccaggagctatgacaagcaaaggaacatacttgcctggagatagcctttgcgatatttaaatgtgtgagttaatagcctttgagatatttaaatgtgtgggttaatagcctttgcgatatttaaatgtgtgggttaatttttttatccagtttaataactttttattcctccctctacttctttgctttctctttctgctctgaagccgtggatacagaaatctctgcaggcaagttgctccagagcatattgcaggacaagcctgtaacgaatagttaaattcacggcatctggattcctaatccttttccgaaatggcaggtgtgagtgcctgtataaaatattctatgtttaccttcaacttcttgttctgggtaagtgttttccttttaattatcaattttatgcaagaaaggggatcttgatataaatatcataaacaagaacagactgtacactagagaaataagagaagggggaaaatgtattttccatgtacttgtttggatttgtttgttctttctttggttatttcagtaattgaaaatgagccaaggactcaaaaaagtgcacttcagaatgtgaggataaacatttcataaatgttttcatattgctgcaaaaaaaaatcacagaggaacacaaatgccccttaattaaaggacaattttccttagttgtatatcaagcaggcctccctaatttaaggactctgtggtaaaaacatggtctgattccatccggagcccgggtcctgattcccgcccttcacttctgggtttgaacaggtgaatcgcagggtgtgggacaataaagatcattttcagagcctcaaagacaaaaaaaatgggtcatgaaaaacttgagggggaaatgataaaattcctaaatcataagaaaatcaaactaagaccgtggatatatatatgtattggcattttaaagtcagtattttgatgtgtcatcaccctaccttttaattgacaggatttgtattttagcaatttgttatgtttctcttgaaagtccattgacatagacataaccaacaaattgataactgatatctatcaatagataatggaaaaacaaggtatgaaaagagcaggctgggatgttgggacattgaccttatcatttttagcatatatggtacaattaaagattgtttaaatgtcaatcagtggaaatagcacaaagtatttaaatgaaaaaagtattttgtatactggattaaaagctaccttatccactccaaggatgaaagaactctggttttgtttttgtacctgatctttagtaa

SEQ ID NO: 5781 - DNA, 6000 bp, Homo sapiens
gctgttataaaaaatttcaggaggaggttctctctctcttctgcaatgtgaagacaaagaatttgtccttctcttgtcctgctgccttccaccatctgaggatgcaataagaagacccgtaccaggtgttggcactttgatctttgtctttctagcttccagagctgtgagggagtacatttctgtttttataaattacccagtcttaattattttgttatagtagcacaaaatggactaagacaatgtagtagctcatttaaagatggttagtacataaatatatacacattaatatatatacataaatatatactatatattataatatctaatactgtatatgtatatgtatatatatatttgagatggagtcttgacctgtcacccaggctggagtgcaatggcgtgatctcggctcactgcaacctccatctcccaggttaaaacgattctcctgcctcagcctcccaagtaactgggattacaggtgcccgccaccacgcccagctattttttgtatttttagtagagacggggtttcaccatgttggccaggatggtctcagattcctgacctcatgatctgcccacctaggcctcccaaagtgctaggattacaagtgtgaggcaccatgcccagcccatatatttttaagtaaaaataatttgagaagaatggagatttattacaaggattaaaacattgcactttcactacatttatgaggaatattaagtatttgagctagttttgacctctatgcaaggcaatatggtatgacagaagttaggatggttatcagaggatatggaacatggtcctgtttctgccaattattaactacttgagttgaggctgagacttttttctcatttgacaataaaaactaccaattagtagatgcctaaaatgtgtcagaaatatttctaaggccttacaggccttttgtcatttaatactcatagctagtatagtgtcatcaaaaactaaggctgaaggagttgtgcagctttctccaggtgagacatctagtgaatgacacccagaagataaattctattttatttgtctccaaggcctgtgtaattaaccactgtaaagaatgcttagcaagaacgtatgaaattgagaaaaatatatatcagatactgtttttctttttgaattcacagtacataatacaaatgttagttattgtaaagagggcagatatgtaggttcatattattactttttgagcaaaagaaatttagagtattaatcagtaataccaaaccattcccaaatttcatagcttaactatagtcttttatttagctcgtgattctgtagggcagtgcatttgggctggacagctctagacagatgaataagaggaaggaagacagttttctacttttggaaaccagctggctatcatatgggggcagaaatgagaagtttagctgttttgagatacaacttattaattttatggataatcctctattatgtcctctgagttggctcctaataccatttcttattgtacggaaagtgtgtgtgtgtgtgtgtgtgtgtgtgtgtgtgtgcatgactgtcatatatgtctttcatcatgaggtcaactagttaagacttattttcatagtatcaggatacagttccaagaaagagagaggaaggtagagagagagagagagcaagaatgtagaagcatactagaccatttgaagcctgggtttggaactggtacataatcacttccattccattctattggccaaagtaggttacaaagtcagcacagattcaagagctggagaaacagacttgaagggagaagttgcaaagtcacattataaagggccaaatctgtagggagcaatgaaaaattgtggccattctttaatctactgcagaaaaattttgtttgtggatatattactttttgagagtgaacaatatattttttttaattatactttaagttttagggtacatgtgcacattgtgcaggttagttacatatgtatacatgagccatgctggtgcgctgcacccactaactcgtcatctagcattaggtatatctcccgatgctatccctcccccctccccccaccccacaacagtccccagagtgtgatattccccttcctgtgtccatgtgatctcgttcaattcccacctatgggtgagaatatgcggtgtttggttttttgttcttgcgatagtttactgagaatgatgagagtgaacaatattttaaaaatcctcacattagactttagaagaattaagttgttcaaatgctagacttttgcaagtatgtcattctgacagtcacagtgtggcttcatgagatcaatccacgtttctgatggtgacgtagtgcttagtttctgtagcctttctgtgatgctgactcaagaattataaagcaagcagcatttcagttgcttccctgcaaggggtaatgtccgtacagttttctaaatccttgctccacacagaccacaaaggaaaccacaaatgtttttccccctcagttttccattgccatatttcaaagctttgctttcttttcacttttatctgacttttacagcaggttcagtaaagttcattggctggaggggttttctgttctctcctgtcttatataatggagcctggatatttgttttaggttcttcccctgttctattgaccagcaaaaaataaaagagactgtattttattccttgctttgtgtatcaattctgcattgacatgcacatctcatccttttatctttccacattcttattttcaaacttttctgacatgttctctatataattctttttgaatcacaagaaaagtctgagttcttctgaacgatgatcctcttgtcaatgtgattatttctagatagcttatataatataaccttacacccaaactgattcattagatctttgtctttccattttcctccccatgagtactttgcattatcttttcctttctttttgttttctctgtagttgtcttataatgcaactaatattatgagactaaaggttttcattactgattcctatcatctgtatgagttatctttttacagtcttgcaatttaatgtgaacattctctctatttaaattaaaagggggtaatttatgtgaagcatttttaacatagtaggatctcagtaaatacctattattataaatgcttctgttgctattacagttgttaatttattctaaagcaaaccacattcccccttttacctactgaatttacattaagcaatatatgataccatctagacaatggaagaatgactgttagaaggtgaatatactttttctttgtaatttttctggcaattgaaatttattatcattattatttttggaaatacctcagtgattgataattgtacaaaattaaaataattttcttcacattaaagccttatacatttttgtgtgtgttagtaactcacatgctgggtacacattgtctttacacatttactgtaaaattgtcagtaatttaaaaaataaatgtatatattacatcttttgcatttattttctagacatcaatgaccttccaaagaccttttggttctctactttgttaacctatttaatgtgtcataacagatagacgtttatttggtgaattcacattttactacctgtcttatcactctctatattgctaaaattttcttattaataactcacaaatcttgctttttctaagccatagtatcatatcaatacctgtttatcaaagaaatcttcttccacagaggacctggtgttttccttactgggtggacttcaattctaacaaactatgcctgtagaatagtgtctgccttccttctttttctttctttctttctttctttctttctttctttctttctttctttctttcttctttctttctttctttcatggaatatgcacacagatacacacatgtgcacgcacacacacacacacacacacgatctgtttggtgatgaggcctgttataggttgaatagtgccccttcccctcataaaaattgtattggagtcctaactttcagtacttcagaatgtaaccttgtatggagatagaatctttatagagatagtgaagttgaaatggggtcatttatggcgggccccaatctaatataactgatatccttataaaaagaggatgtttggacacagagacagatatgcatggagagaaaatagtcagaagaggcacagggagaagatgcccatctacaagccaaggagagaggactggaacatattcttcctccacaaccctcagaagaagccaaccctaacaacaccttaattttgtatttgaaactggcagaaccatgagacaatacatttctgctgttaagccacccagtttgtcatactttcttatggcagccctagcaaactaatacaaggggcaatgaaaacttgagaaagggtgaaattggcttattaaaaaattacttggatacttgggtatctgtggattttctcttcagcttcagacaaaaagaaaccctggagcttgtactttgtaaagcactatcttcctgggataaacttctaaaacttgttttgctttagataaccgtggtgtggtggctggagactgacatttgatttgaaaaagcaagccagagctatgcataagacataaaaaacaatatttactgtcacctgttagtagacctctctctccggccaactgtcattgagaaaaaaaaaatgcaattggttttagattctctcacttgttgggaggggtggggcatagcgaggggtggggggagagagagggtgtggagagtggggtgtaaataaggcaggcagaagctccagagagggtggagacagagcttcacggaagaaaaatatgtgaacctggttggtacacatagcttctccagacccacccacccactctttcctgagccctgtgcttcggatggcggcgggaggttgatggcgagtggtgctgaagggacagctccagcagtggctgatttgggggagaaacaaaatctgcagatggaatccgagcagggcgacttcaccttcaagtggtgagctctcctgacctgcggccagtctccactccattcacggccagccgatctgcccgctcccggaggggtcgggcagtgccggctggacccgccccgagctccatggtttgcccaaccctgcgcgatggtgactctgggcgcggaggttggcgactggcaaatccgcagatcacagaatgaaggcggggagcgcggccggcggccggcgggggctttctcccccaccccagcgcccagggaagcggctcaaccacctgaatccggaaaacgccaacaagtagtttctcgtcggagaagggcggctcacctgggcgccaagactcagtcccgctgcccagagaacctcgtccactcggaaaccaaagcagaaccacttttctctcggtctcgttaaggtatctggaaatgggggcgggggtggtgaaaggggcgatttcctggaaagggcatgttgaccctgcaggccagcatccccccgctccgcctttccgcaataggaatgtagagatgaagccctggggagaggtggctgggaggctggaaacagggacactgtcagcgagactttcagctcagggacccagggggtgtgcctccaagcagcttttccccgagcctcgcccctcctagaaagcaaatcccccaccctccacccactaagggatttgtttttcttgggaagggggatgggtgggatgcattgatcacttctattcttaaagatggatcttagttagttgtttcctttcccaagtaataataatatcaacaacaataataataataacgtgaaaaggaaatcgaatgaggaaataagtcagaggtctcctaggtgaaaagcaacagcagagattttttttttctctgacttctgtgttgtctttttgcttggtc

SEQ ID NO: 5782 - DNA, 6000 bp, Homo sapiens
accatgcctggctaattttgtatttttagtagagacggggtttctccatgttggttaggctggtctcgaactcccgacctcaggtgatccacccgccttggcctccccaagtgctggggttacaggcatgagccaccgcgcccactcttagaatttacttttaatattttaatttcatccgaaatattttaacatctaactctgaattagtaactcttcattctgaagttagtaatttttaatgcagatgctatgatacaaatatttttcttagcatagattgtattcatacattttattgtatggttggcacaaagaaattaatgaaaggttcattgtatttctgttcattaattatattaccttccaccacctaactctcaatagctctatttaggcttgttttttttttaattatactccaaaatgaactgccgattttacccaaatacacactgtgcctgcttcctcatccctggcttttctctcctgctccctataaggccattctccctatccctgtcttttgtaattctgacattattctagatctagtttagtcatcaatttattcattctttgcacaatacttagtcactaattgctctctttcttgtttgtttattgactttctcttccttagagaatacaagccaagtgagaacaggaaatttttcttcttcactgcaataccccaatgcctagtacagtgcttggcatatagtcagtatattaagtgtttgttgaatgaacagacaaataagtagttatcaaaaaaaaaagataaactaaatatagtaagatattctatgatggttttaaaaaataaacatttaaatttcaaagtattggttggcacttcatcttaatctagtgctgttttgacaaagctgtatgaattaagaaagataacatgttatcttgaatcagtcaaaaacaatttctaacacccaggctgaaagaactccagtttgaaggtgctattttctcatatgaaactgtgctcattatacttcatttataatctaactaaacacatttccttggtatgctaatgctctatgcaaaccttctctagattttgtcatataatttttaaaaattcaattaagtgaaaccgaccttaacatagctttgaatgattttgttaagaacagattttatatatcaaataggcagttgtttaaatattaacctatatgtatatataatggaaccagtatcatagttcttttgtcctttgacctaacttcccttcatccattcctctctctatgtctcaagccaacacacacacaaaataaaagagagagagaaaagacatgtgtgtgtgtatatatacatataatatatcatatatatgtattaaatatatttcacatgtattaaatacattaatattatattaaaatatatttataatatatatttatatctcttaaaaatatatatcttaatagatatatatttatatatctcttaaaagattttataaccatatatatacttatctggaattctgaaataaaaggctgaaatcactaaatcttcaacaacatagaataaagtgtgatgaggcccagcgtggtggttcatgcctgtaatcccagcactttgggaggctgaggagacggatcacttgaggtcaggagttcgaggccagcctgaccataatggtgaagccccgcctccataaaaaacacaaaaattagctaggcatggtggcgggcgcctgtaggcccaactatttgggaggctgagtcaggagaatcgcttgaaccccgcgggcgaaggttgcagtgagcagaaatcgcgccactgcactgcagcctgtgcgacagagtgagactccatctcaaaaaaaaaaaaaaaaaaaaaaaaagaacaaagtgtgatgtttcttagtggaaagcacaggagattgtgaagccaggtgctactattcttaagcaagttgtgtaacctctgtgagcttcagtttacttatcttcaaaacggcataaaaatacctacttctctgggctggaaagaaagggaaagagagaccaacttagcaccaagtctggcacatataagtgctcaataagtatttattgaattagttaactccatgaaaatatagttaccattaaactaaatttctacatatcatttaatgaaagagtgtagtgattttgtaaccaaatagctaagataaaagcataattacaaatattttaacaattctcaggtaaatacacagcaaagcaactggcatgtgactagatcaagtatatccctgcatgtctcaaaacgaaattcacaaatattattggagagatagtatttattcataaaaacaaattctaatggataatgaatttttattaattttctacacctgtgtagacataagctaaagggaatgaactttccactactaaaaataataacagatgaatttatggtgatttatgcttccttttaatttctcttttaatcttgatttaaaaacaacaacaaccctacagagtcaacacagagaaagaatgacagagcaaatttcaaataggaagctcaaggcagaagtccagaaatatgctatgaaatgtttagtcctgaggatgcattaggaaacaaaaagacaaagaaaactctaccttcactgacaccacaatcagggatttgtgttggaatgggtacaatttatgacttttgggctgatgaatcaagctgcttaaatacatattccctaataaaggatgttgtaaaataactacattagaagtcaagggatttgtatgttcttttatcctcagttaccgagtgaggtttaataactttgtgcaaaagcttgtaacacactctggtatcattgcgctcatctcaacttctttctgttgcttaattcagggcatgtgaataacggtaaaaaaccaaagttgtttttgcaacctctggccaccgagggcacttccttttaatagtgcttagagtactgcacagaagcttatggtttgctcactgtctcccaagcaagactgggcagaaagggggccatctcattaatctttgcatggttagcacctagcacagagcttaccacacggttccaggggatgtatgcttgtataaataaatttgtatattctttactgttttcaaagcacagtcacatgtatgactccattagaccctcataaaactctgtgagattgcaaggtagaattagtttcctcatatgacagatctctgtgacattgaatgatattatttccattgtatgacagaggaggaaacaggatcagtgagagattgtgtgacttccgaagagtacatgactaagactcaaatgtcaagatcagcattctttcttaaatactaaataaaaataaacatatcgaactactattttaggtttgttcttagggtctgttaagtctatatatggccaatcatctttggctttcccacattggtgaaatgttgttttttaaaattcaattgtagactataaaatgaaaaagaccttcagaaatcctatctgtaatcagaagaaaatggcatcaattatatgcaaatattttgctataaaacagtatctgccttttagagtttattgttagcccaaacaattcagctctgtcacaggaaacaagatggaggcagctttgtcatttccaatcctgcacccacagtcacccctattcagcttatagaaggtttctttatgtttcttgatttcgtagtcaggaaatgaatccctactatgacaagatagtgaaagtagcctttttattggggcgaagaggtcacagccagtatttgaaggctctcgtaatttaatcctgatcaactgactctaaagtcaggtttttaataacaccatctcccactagattacaggctacaggaagtcggagactaaattgaactcctaaatcaaggcgtggcacaaggcaatgtaactcttctatctcaattcctggcatatatgttaatcaatcgataagtggcatctctgaaccactggttagaaatcaacatgaaaagtgctaggtacatatttttcaaacgtagtcatagacaaccaaaatcagtttggacattaagagcaaagtttttgttgctgggtgggtgagggggagtggggcatgtttacaggatgtggtatgtaaaaaattcggagaaaatctgaacactgtacttgtttctaagctacatttactgaattggtaatgtattaacagtggcttgaaaaagaaaaacttagcgatagaaacttacctacacgttttttattttgaagcacttttaagaggtttgcctttttttttttttttctccaggcaatatactcaggtcctaaatgaacatctactgatggaacgctggcctttagtcagttatctttatatgccgttataggtcaacattccgaaaaacttcaacagaaattaactgcaaatgtaattacatcccaaacatttctgataatggaagcattttctctctaaaggggatgggattattggattggcaatttctcttaatctgagaaaactcatctcccactcccttccccatatcccctttccatcctctctcttccccttatacacacacgcacccgcatgcacacacgtatattctgaccattttattagagtggaaagttgaaaggaagcaacccgccagctacacccacccagcgctcctgggggtggaatagcaaagttctagggcagagccttccctcccagagcccggcgatgcagtcgctctcggatacctgctcagctccgcaccgcaactgaagatctgccgccgcggaacagttgcgtctccatctggctaccaacccacccaagctttcttctccaccaccaccaccttccttccttccccctcctccccctcctttccgtcttccctctccacccccgcccccaatctcctcctttttttctcactacgagcggttgctgatgctgaagccgagcgtcacttcggctcccacggcagacatggcgacattgacagtggtccagccgctcaccctggacagaggtaagggagcggctcgctcgccaggccaccgcgtcccctctcccctcctcccttccccgcctgccaattcccaacgggacatgggacgcgctcaggcaggaggagaaggggaacgaggacgagccaggaaggcgttcgcgccgagaacagaacactttcttcccctttctctccccgctacgttcccgctgccccttcccactgtactcgccccgccgaggggacgcctccttctggctctggggtccccgctgccactcccagcccctcgccgggtcgtctccggtcctctggctttgttggagccgctgcgcggggacggctataggcgccaggggctcggggttggagaggggcagagagcaagctcgcccggccagagcccagaggagaccggcgagggagccgcctgtcagcttgcttggcgcaggggcccgggaggaaggaagtttgtccaggcgccggagggcgagggtcggtccaactgctggagtcccggcggccactcggggggcgggctgggcgcacccctgggctgccgggcgcacagtggcggggctgcagcaggcagggagctgccctctgccgaaagggcaaggcagagcgcggggagccgagccccagcagccgagatcggctctccgcggcttcgagatcgaaagcggcgagggtcgcgtctgctcccgccgccggcagctcccggtcgatagcaactctcggcttctcccgcgccagcctctcgtgtcctctcccagctcggtgccaccgcggcgcccaggctgcggaaggcgcggggacaaagcgcaggtcgggttaaaattcaacttctgacctgccacccagtgagtcctgctctctgacttgaacggggaaagtgttcgcttcctccccaggacgccctcacaagctcagggatggagtcctccgctgcgatcggggcctcactggtgc

SEQ ID NO: 5783 - DNA, 6000 bp, Homo sapiens
gaccaacctgggcaacatggtgagaccctgtctctagaaaaataaatattaggccgggtgcggtggctcacacctgtaatcccagcactttgggaggccgaggcaggcagatcatgaggtcaggagtttgagaccagtctgggcaatatagtgaaaccccgtctctactgaaaatacaaaaaaattagtcaggcatggtgatgtgtaatcccagctactcgggaggctgaggcaggagaactgcatgaacccgggaggcgaaggttacagtgagccgagatcgcgtcactgcactctagcctgggtgacagaacgagactctgtctcaaaaaataataataataaataataataaataaacatgaaaaaattaactgggcatggtggcatgcacctgtagtctcggctacctgggaagctggggtgggaggttcacttgagcctgagaggttgaggctgcagtgagctgtgactccaacactgcattccagtctggatgacagagccaggccctgtctcaaaagaaaaaaaaaaaagcataaataagaaatctttatcttaccactttcctactttccttgatttctcaggtgagtaagaaacaatgtctatatcataaaagggtatttgagagactagaagtgtaagctttggatctcattttacagtgctagaataaccttataaggagaatataaatcacttatcaaatacatttatgtgtatagatgaaaaactctataaaaatatgaaaaaattgggtccatcaatttatataaagaagaatagtatctcataatcaagtaggatttattccagggatgcaagcatggttcaataacagaaaatctatgaatatgaattttataaaataaattaaattgtaaaaaccataagcttgtctctacggagtaagacatatttgcaatatctgggtcttctttctcttcctcaaacatatcagttaaattctttttttagggtctattcactgatcctacaatctttttaaactgactgaaaagacccttttcactgacctctacctggaacttactcctatctccttatatctacaaggctaactcctgcaaatccttcgtgtccttgcaccagtaaaatctcaatgagacctaccctgaccactctatttaaaatctaactctaccctctttcctgggaccctcctcaaagtcaggggaacataaacacaggggtcttttcaccatgtacaagttcatagattgaaatgtattcaatgagcaagtatcacttttgtattcaaattatattttagaagtacgtataaaaatcatggagcctatagaatctgtatataccaatgagattgtgcagcaaataaaaggcacctcatatactttatacaaaacaaataccattaaatattttggtttcggatatttaagtagctatatagactaatgctgagcatagtacctgacacacataaaatgttttagagacatagtttgctattatattaaacattataataaaagggcaacttaaaaacttagtggttataatcagtttacagaggtagggggtgcatttctctgtcaaaaaaatgacagcttgtgttggtatttttactcgccagggccatttaggctttatcttcaaagtgcagaaacagtaaaattcaatcatttcctacattgtcttgattgctttactatcttagtcaattagttaaaaaattgatttgattactttgacatttgccaattcagttaacccatcctctacccactgagaaatcagagaacctactttccttgcatctacctctcagttcttcatcagtagtatgaatagaacagaatattcagtggatattttgggcttgtgcagactttgttttcataaaaatttggagaccatatatcaaatgacatttggcatggaggacgttagaataaaaagttttattaaaatgcaaaaaaaaaatcctcacaatatactctactgcccatatagcaatataagcaaatgaattaatgtaatcttaggatgtgaattgatttcaatgtttttctttagtattgtagttttaaaatcatcttttagtaaatgtttgaattatttttctgaactctagtgctacatctttggaagtttttacataatattgttattctaaaggatttggtttaagaaataaggtagaaaggcttggtgagtcagattccttctctcctctagtcaaagagaatactcttttccttcatgtgatcttttatcaaattttaaaaataataagtgtaacattaattgcttaaaagtaggtatcaatttcagaaagtgatttagatagggcaggtttttatttttacaatatctaacagatgccttttgacggtatgaccttggacaatcaaagcttcagtttcttttctggcaatgttttgtaaaaactagacctacatcacaggcttggtgtaagaattaagaagtatatattcataaaatatagaaattattctgtacattgcaaagacacatagttaacattaatcaatccttgttaatattattaaatacagtgtggctggaagcactagtctcccttaacttgtagttaattcttccaagttctgtttttttcctttctgtgtgctgcctcttcctcccacaccaatcccatgttggccattttgccctatggtgacagagaaagaactctgtaatcattaccctaaaatatattagcaattgaattttaaatctttgaagactcattgttgttaaattttaaaaatgaatacattttacctttggctagggttcccagactctccttttgaggtctctccattcttcatctatttattgttttcaaagttgcctaccacttgtgttgagattccaccctttcctcctgttaaaatagataatttgttaaagggttacaggatagtataaaagcacatgaagtttgaggccagcatatctgaatttatttctccattctgtcattgaacaagttttctgactttttgcaattttttttgagtatcacctctctctaatctctaaattaggaaaaatcacctcattaattagttgagaggattaaataagatattattaagccccaggtacttagtgggaagcttaaaacaatagttgctttctcctacttctcttcattggcattgagacataaattagtatcagtcattatggagggcatcgctctacaaatattttgtgacctatgcatatgtattggaattaggtatcagacactagtgaaaaagcgtgggagagaaataattttcgtacttcttggtactaccgtaaacgatttctgccagcatatggataactttgtttcccacagataatcctaatcctgatcatggtggacacagctctccttattttcctaaaattttctcagttgttattgataatgttggtactgtatttcagtttctttatatatcaacattaaatatttgcctgtcaccaaaatgtgaagtaaaaagcaaaaaaagtcctataaaaggtttattttgactgtttttattttttcacgtggcgcatctatcaaagagcatttatttactcatggcaggggaggcgtatcagggaatcaaatctaatttaatttcttaacttttaatttttcaaagttgggattggaagagaggctgagaaaaaactctcttggctgttttaaaagctaaggattagtagcaatgttctgacctgaaatttaggtcttgtgatttctttccaagagatttttcactgcatgaaaaacctgtttgcaatggcctttttaatttaattcaatcttaattggatacgaaccgtaaaaatctaagggattgttaaaaggcctaaaagtgcacaaaagtagtttttaagagtaatattaataatctggaagtgaaaaattaactttgctaaattactgaacctttctacctagcttctaggttcattttgtatttctttcaaattttgaacgtttcaaggacggaaaatttcatccttagagcatacgcactgtttaggggacggttcagccattttcaaaaggaggctaagctttgtgttcagaggtgtatattttaggaattctccacgtggcttaattacgagcatgccttgattgttagcagaggtaagtcaggcttcatcttgtaatgagaccccttggaaaaaagtctgctgctgaggcaccaacacagggtgggtgagggccagctttctaaaacggcctttcataacctggcgagaatcactgagcgctatgaggccaccgcctgacggagaagccaatgcccagaggctttttctttcgcaagagatgtaaatggccggcttgggggaataggtagggaaaagggttctttgggtcacccattttttctagtcccattactgactcttggagaatattcagatggtgccaggtagcaccatgcctattattattctcactgagacaaaagtcagcggctggtaactggtgtccattctttcgcttgagtgggttggagaaagacggcatggctggaggaatttgttttgttttgctttggagcgggcttcctcagttgcatcctgcatcgggcgggcacagccccgggctctgggaagacgccgctcggcagccgcagtggccgctgcatcaatgggttttggggcagggaggtgcggagcccagcctgcgctcctggctacccctccgcgccccgccgccgcccacagcctacccttctcctctgcagccggtaggcggccgtaacacgggcgggccgagcacgtgggcgcctccgtcacaccctcacacatacacacacgcgcgcgcgcacacacacatacgcatgtacacgcgcacccgcacccgcgcgcctgtatcccgtgctgtttccctggcagacacacaggcgctcacgagtctctccttgccagcctgcagggcggcgacccccaaaacccagctccgggtcccaacctaggcaagaagctgcttctctgccaacagctcctcttcggcctccgtcacagccacctggaccctaccctttcgcgactgctgctgctgctgcccggacgtggaagcagcaagaggcgcttggtcaagacacactgacggtaatggcaagcgcctacgctaagggcacaactgggggtgaggtggggctcgccattagccacccaggagcctgggcaccagcaccgggaacgaattgatggatggatgccgggaaggactcgctgcgtcctggggtgggaggagggagggcagctcaaaagccctgggagggagaagctgggctgggcgggcaaccgtctaactctgcatctctgtacaatcagggtggggggcgacaggctgcacatgtaaggggaagcacatgggttgaaacgtgccgccatcctttcttcccgtcgtggaaattgcccacagcatccccagagacctactcgtttccaagccaagtcggggttggttgaagggtggggtccaacacgggaaagtccaagaggaaagttgggagggttggggcagagagagacgcgaggtgaattggaagctaaacctcgtgcaggtgggcgatggggcggggagagcagagagctttattcctcattcgcttccgttcgctttagcaaaggcagaaggcgactaccgaggacagagtgttttcacgtgaccacagttcccctttgcttgaggtatcctgtgataaatggcccgaaagggggcctttcgccgtacgaaaggcacgtggctgctggagaaatcacggctcctgtgtttctgcgcatcctggaatttgagagtgtggcggtgagggtggtgctgctgggactgtaagaagatgggaagcagttagaaacccagatcgtttctacctttctttcactaggctggtctgtgtgtgactgggaagaagacggtattgagtacagggaaatccttgcactctaacgtagcgcaccaactggatacat

SEQ ID NO: 5784 - DNA, 6000 bp, Homo sapiens
tcacattcttgtagtttggaaactccataggaaggagatactgttccccattagctcaagcacaaaagtcccacagtggattctgattggcccatctcatgtgatgtacccattcctccaccaatcaggactggacagatcagggtactaagcctatctccgatagtggaaggaggtgggaaaacagaaccatgtgaatgacagtctctcttgaaagataaggaatagtctgaattctctaagtgaaagtgagtgctaataatggaagaagagtgacaggaaagtgtgctaagcaaataaaaaaaaaaaaaatctaagccgggcatggtggctcacgcatgtaattccagcactttgggaggccaaggcgggcagatcacctgaggtcagcagttcgagaccagcctgagcaacatggagaaaccccgtctctactgaaaatacaaaacttagtcaggcatggtggtgcatgtctgtaatcccagctactcaggaggctgaggcaggagaatcgcttgaacctgggaggcagaggttgcgtgagccaagatcatgccattgcactccagattgggcaacaagagtgaagctctgtccccccccgacaaaaaaaaattcctaaccacagtccatatgtctaggttagatcatggttttcccatttatcaattgagggatcttgagcaaatcaccatacttctttgatcctcagtttccttatttatcaagtagaaaagttaaaaattacctctcttacatgattgtcataagaagttattgacagaatataaactaagggcttagaccaattcctggcttatatgggcaacagcaacctaattgaccaatatttaagggattcgctctgttctttcccctgtgacagatattgacaataaaataatgagcaagggcagtcataattactttaaccaaatagtcaaacaaacaaatacaaaactgcagttgttttataaaaaataggtaattcatgctcgactttatagtaagaggagaattgaacaaagcaaagagatcagggaaaacctccctgaggaagaaaatatagggaatactgagttgagatctacatgataaatgcatacttactgggcacaatgatagggtgaaacaaagtggtccaaacagaggcagaaaggagggtatttgcaaatggcctgaggtgagaattatgaggacagaagggccttggccctggaaaaaagggagcacataatgaattgaccttggagaaggagggagaggcgagatcctggaggccttgaaggctttgctaaggtgctaatttctttattccaagagcaatggcaagccaccaaagagctttcagcagaggaaatttcatgatcaaagaggcattcttctccttttccccctcctctagtcactcaaagacagatatagacagtctgtctccggtctggcttggtcaggcaataagtttcagtttgtgagagacattttttaaaagaaaaatattgaaaacaatatgtgtgtctaaaagaagatatccacaaaatagtgaatgaacaagagatatttcacatgcacaaagcaagataagacttatttggtaaattacacctgcctcttaacaacaaaaacgataaagctcaggaaaaaagcttttcaaaattggattaatcaataatagcatgagtgacgaatagtattgaaagtattcaagtaaaaattagataatcatgaaataactttctacccagtgtgttaaatgttgaattccctgagttgtataatggtagcctgctatttccataagaaaacatcccccatccctcctgtccacctgggacatagccctgcctcttgttcagtttaaaggaactccttggtttttcttctgcgaatcaactgaatgctggcctgcatcccctatcaaaagccagtcttaaggagagatctcagtcattctgacccatttgtgacttccatataagcctacccaaaatctttcatttgcatattagctctttctaatcccttggatatttgcttcgacattctcttgattcaagtaacattattacacaacaaaactgtaatgcagcagtatgagggaaacaaaagatacagttacgtatgagaaagtcagtgatattaagaaagctagaaccagggaatggtggaggtgggaggaggagacagaactgagagggaaaaaaaatggaaagagggagaaagagagaggagaatgagaatgcattgtaggagatgaacgtagcatgtattattgagttgaatgaaaagaaattgaactgaatttctgttaggaacactgccttgtttctttaaacctggtacaacaaattaggccattcctttctattggtctcataaaatccgtatggttagatttatgattcccaggcttcagtaactctcataccattttgattatttttgtcgtatctgtcctcctttagtactacttgttatttacttaatgttatacatgaaagtgagtttatattgacactaaatatttcttttcttggggggaaaatggtggtaaaggggtacaaagttttagttagacaggatgaataagttctggagatttattgtacagcatgataactacagttaatgtactgtatacagttaacccttgaacaacacaggtttgaactgtatgggtctacttatatgcaatttttttttcaaactcagatggaaaatacagtgttctagagatgtaaaacccatgtataagcagggctgacttttgtgtctgcacgttctgcagggttgactgtgggacttgaatatatgtagattttggtatacctgaaaggtctaggaatcaatcccctgaatatactgaggtactccaaaactacaaagagtagatgttaaatactctcagctcccaaaaatgatgagtatgtgaggtgatggatatactatttagcctgatttaataatttcacaatgtatacataagcagaacatcacattgtacgtggtaaatagatactatttttgtcaaatataacttaataaagctggagaaaaaaaataaaattctccacttcaaaaaagccttaaaggggccgggtgcagtggctcacgcctgtaatcccagcactttggaaggctgaggcaggcggatcacctgaggtcaggagttcgagaccagcctggccaaaatggtgaaaccccgtctctactaaaacaacaacaacaacaacaaaaatacctgggcgtggtggtgggcacctgtaatcccagctacttgtgagactgaggcgggataatcgcttaaacctgggaggcggaggctgcattgagccgagattgcgtcattgcacttcagcctgggagacagagcgagattccatctaaaaaataaaaaataaaaataaatcttgaagaaaaaaaaaacaatcatttgctatgcctccagtatccaaattaagctcattttgatatttgatgttcgatatatttgtactaagagtacctaatgtataaaaatctttctaagcaactatcaacttggaatcatgattgatgtgctgtctatacatattttttctaacatgagaaagtgagaacgcagtcccccactaaattatgcagtcgagtttcccacatttggggaaatcacagaagtcagcacatctggagtgaaataaacaagcttcgccctgattacaggtttggcatattcatgtttaacaaacgcaccggaactaattaaagcaaatttggactcctactctattattaaaataactaattcctaaactcatacattattctttcttttaaagatcactgatgttaatgttcagctaatattttcttttaaaaaattaatgaaatgctttggaatgttctccagttatacaaacaaaaacagacacattctggagaatcaataaaatatttgaagtattttttaagactgtacagctggagctccaggtttaaattagagctctgccatttactagatatggttggtcaagaaaattaaccttgtatttcatcgtccataaaatgggaataaaataataagatctacactaatagatttgatgaaagaatttaatgagataatctatgcgaagttcttagtctggcacctggcacatgaataagtgcatcacataatgatgttagctattattattgtggttgcattatctttccgttcaaaaaagtacaactttcaaagccttgctgtgttggcgacctgtagtttaataatctatcgcttctctttcaatcttaatttctaaagacacagtaacaaaccattccaaatgaagcgtctccccttgcaatacttaaccttgagtcaacaattcttgtaattattaaatattcattcactaaagtaattgttttttttaaaaaatagaggtgataggacaatggcctaactacagatcgcaattaaactttatttctctaaggcaggcagggtgaattctttgctccgaacctcccggactcctctccctctccgactttgtataacagagggagctccgagccctctctggcgcgcgaggtatttcgtctgtccccgggggtgccaggtgagccccagcggatccgggagggtaagctgggactcctcgcgagcagtagctgcagggtaccaagcttcgccctctgcgtccccgcgccttcgcggtctcccgccagtgcaggtccggggcccccaggcgagcggacaaggttggcctaatctgccaaacttctggggcatttaccgtgctctggccgccctcccgattcttccctccgcgcccttgcctgcttctcgcctaccccgggctccggaagggaaggaggcgtgtccggagcaggcgggcgggaactgtataaaagcgccggcggctcagcagccgggcttcgctcgccgcctcgcgccgagactagaagcgctgcgggaagcagggacagtggagagggcgctgcgctcgggctacccaatgcgtggactatctgccgccgctgttcgtgcaatatgctggagctccagaacagctaaacggagtcgccacaccactgtttgtgctggatcgcagcgctgcctttccttatgaagaagacacaagtgagtagggcgcgcccgggagctcccaggctctccaggaaaaatcgcgcccggtgccccggggaagccggcgctccctgggacttgcagctggggcgtgcagggctgtgcctgccgggtgagacaagaggatgcgggggaggccggcgtggtgtgtgatcccgagccgagccgggtgagccagggagaaaaggagtgggagtgctgagagggagccagtgtcaagtttggagcctcagcagttaagttttgagctgtcagtcggaaaccgtaattcccgtctggtggaaagattggcttttgggccatggaatgttaagttatcacgggaaggcatgtctttgcataggagacggttttcccgtggattccaggagattatgaaacagcaccccacgcgccaccctcactagctctctcactcagatttatttgtgtagccccgaggtgggcgccgggcaccaggagcggcgcgaacgcgggtgcagccgcgggagcgaagccaacgcggaactcctaagcggcagctctcggcggggcgggaacctgcccgcctgcccgggaaacttggctctcggcggtgtctgcctagtttgcagctctgtgtgggctctaaagagctctagtacctccacaatgcacgcacctttttccatttcaaaagggataaaggctttttataaaataggcacctctgaatgatagtgattgagataattcccagtgctgctaaattctgcattatacataaagcactgtgggtaaagcgctgcctggggggacaattagatttttttttcccttgaagaaaatacctggttcttcgtttagaaagggccgccacggtgcccctatccacagttctcttcaccattgttgattgt

SEQ ID NO: 5785 - DNA, 6000 bp, Homo sapiens
ataccatcaggacccaaaggaaaaataatgttttatttttataaggaggaataggttcagagaaagatgattttacatgaacatatcttcccaagtcctgaggtatgtttctttgtgtagaagttggagcaagagagtagcacaggcattcatgagtacagaaaccgctctagcaaaggctccaaagggtgggtgtgtgtggttaactgcaatggcttaaggattggcccaggggagatgagtggttagatataaaataggacttggtttgaggcatttaaaagtgaacttaaagtgcattttaaagatctatggcatgatatgccagtggttcccaaatgttgatgcatattataatcacctagaaagcttgtttgaaaacagatttctagtattcacactagaccttctaaatcaaaacctctggggtgaggcctaaaaacatttacttttagcaagataccctggtgaatcttatgttatttgttggtaaatgcagggtggacaggtggaggggagaagttttgaagtcagaaagcaagttggtggttactaaaatattctaggaggcagaaggcagggtctgtggagtgacaggagccattagacagaaagataggaagataaaatatatgatgaggagcatgcttgtaatcccagctacctgggaggctgctgcaggtggatcacttgaactcaggagttcaaggccagcctgggcagcccatcatatatattatatatatatatatggtgaggaggtagttgataggacttggagactgaatgttaacttaaatgaatcatgcagttttcaaaaatgtaattcattattgattcaaacccatcttgtacttttccatgtgctctcctatactttggaggaagtgtatcaacaagggagttccattgcctgtaaacaggctcaaaatatgttcactccaagtgctatatagtaaggtgaacagtagatggcacttttgtactatgctgaatttccaaatttgaaggccaaggaagaaccagtgctaaaataaaaataactctttataatgctcaagtaagtacattcaatttctgttttagggggaactgtataagaagggctaattagaggtcagtttgtcctagctagtacccggcctccagtaaaaccttgtaggtttttaaatactgatcctgcttgtggctcccacccacataaatgattaggttgcagtccagagaggtctaaataatcattgtagcaagtggaattaggcttgaggttagaaaaaacttccccaactttgaccacatttccaattgtctacctctgagcttttgctatttgcaaaggtgaagaaaagccgaaaagaacaaaatcaaatactatggaaaagaacaatgggaagggcagtttagagtaataaatgaggacagtggaatgaaaataaaggagatattactttcattttgtaaaacttattattataaaccttggcaagaatgcaatgttttatacatttacataacacttgcaatcacacaaaagtcatgacagtgattaagagagtggattctgggccaggtgaggtggctcacacctgtaatcccagcactttgggaggccgagacaggcggatcacgaggttaggatattgagaccatcctggctaacacggtgaaaaccagtctctattaaaaaaaaaatacaaaaaaaattagccgggcttggtggcgggcgcctgtagtcccagctgctcgggaggctgaggcaggggaatggcgtgaacctgggaggcggagcagcttgcagtgagccgagatcgcgccactgcattccagtctgggcgacagagtgagactccgtctcaaaaaaaaaaaaaaaaaagagagagtggattctggaggcagactgcgagtgtctaaaaatctcaactctgccacttcctagttagcagtgtgccttgggcaagtaacttaatgtctttgcatatcaatttactcatctataaaacggaaatggtaataatagcacatctctaataagatcgttatgatcactaaatgtcaaaatttgtaaggtacttagaaaagtcctggcatgtagtgaaaacataggtaggtatattagtccgttctcacattgctatgaagaactacctgcgactgggtaatttacaaaaaaagcgggtttaattggctcatggttctgcaggctgtacaggaagtatggctggggaggccacaggaaacttacaaacatggtggaaggcaaaggggaagagagcatggctgctccatggctggagcaggaggaagagagcaaagggggaagtgctacacacttttaaacaaccagatctcgtgataactcactcagaacagcaagggagaaatccacccccatgatccaatcacctcccaccagccccctcctccaacactggggattacaattctacatgacagttgggtggggacacaaatccaaaccatatcagtaggtgacaaattttttaagatcaactttaggtaataggattaatatgtagtttccctcccatcttttaaatttaaaacatgtgtttcttgataattgagaaaaaaagtaaaagctaaacttttactaaaacacttaaataaaaatctatattttttcttcttgtgagctagtttctaaatctccaacttcttcccttttctgcttctcctgtgcccaatattagacgtaacatacctatgagtaatcctgaggtcctgattactcttcagcttctggcattattattttattattggggtgaaatacctgtaatgaaatttaccattttacccattttttaggtgtacaattcactggcattaagtacattcacaatgttgtgcaaacatcaccactatctatttccagaacttcatcatcccaaacagaaactctgcacccattaaacagtaactccccagtctcccttacccccagccctagtaacctctattctactttctgtccttatgaattcacctattctaggtacctcatatgaatggaatcatacaatatatgctcatttgtgtttggcttattcacttagcaaaatgttttcaaggttcatccatgttatagcttgtatcacaatttcatttctttttatggcaggataatatttccttatatgtatatatcacatacattttgtttatccattcatctgttggatactaggattgtatccactttttggctattgtaaataatgcttgctttgaacactggcatctgttggagtctctgctttcaatacttatgggatatacctagcagtgaaattgctggattataaggtaattgtatgtttaactttttaggaactgacaaactttttcacagagctacatcattttacattcccaccagtatccagcattagttttaaacatggcaggcttttaaaataaatcaagcctaaactggtaatatgtagcaaaactaagagtcctgcaacagtttgctgacaagttgctgatatcaacactcttaacatatcatctcctagactaatgcagtgtttctcaacatagacagctgagactcccatagtaatcatctatggagcttgttacatcagaagggccctggatcccaccttgtatatgttgattcagcatctctggaaatggagcccccaaatcaacattacaaatgctaaagcatgagactcaccaaccctagattgctgagttcttgaaggtaggggaaatatcttagtcatcattgtgtccctcaaggccaaacatacaacagatatttaacaagtgtatacttaaattaactaatactgtaatctaaagcctacctgtttagttgttaagtaccatattcaataaaattaaactcaatcactagacaactagggaatctgtaattaaggtgtgtagcatacctttcatttgcataaaacacatgtcttaccagctgtgttctatcatgccctttgatgttgctaaggatctttacactatatgtaattttcagctcagaacatcacgctttgaggcagggttaaaaaaaaaaaaaggatatggacttggaattagaagaactgtctctgtgtgacctctaagaccaatatctaggaatcaagtttataacttggaaacattgaaaacattttgtaattctaccaacttcattgtttggctgaagcacaaatgatactatgtgtaacaaagcctgctgtagaaacgtggtctcacaaaaaacaaacaaaaaaaaccatgtttccaagtcttcctaaagactttaagtatccagctgtgtaagtttagtgctctaaggtatacgcaaataagcagatgagaatggaaacatatcgcagaaaattattaagtgcatgcacaacatttattcattcattcactcattcattcatcacgcacatccagcaactatatcaatatcctgcagggcactgtgtggaaaacagtggttaaataaattcaaatctgccctcaggggatttagttccttttagtatattaataactagcaagctgcccctcttcatgtcaaagctttacgtcaacaaaataagcggtaggggatcaccttaaacgtcacgggtgctgtctctttaaaacgtaatagaactctgatcgcatcgatcacaggctcacaacgcccttccattcatcgctcttattccagtcctggttactaccccacttcctgacatcaaaccagggagaacgcgagtgttagttaacatggcttggtgtgtggccacagctgacccggcgcatacctcccgtcctctctttacagggctggcggtgtctcggggctcggctggccatgcctggagcgcggggtttgactgggccgccgttgttgtagtgaccgggaggcgctgccgctctgggcagacggttccgggagccgcacggtcccctctccttccccatcctctcccctcccctctccgggttcccccacccacaggagccttgggccgaccactcccccgatggcctcagccacggtaaggacgggttggaggtggggggggtccctccctggagcctgtcccgcgggctgcggggccaggtccgggccgaagccgcacctggagggagatggaggcaggtgtccgtagccgggtcctgagcccctcgtcccggggcgtccgtatctcactctctgccatcggggcggacggagtgcggaacccagacccggctcccggacgctcttccccgagttccggagctccggactgagctgggcggccccacggcccccagaattctcggagggtttccgtggagcgcctgcgtcagaatcacctaggaagtattaaaaaaaaaaaaagtaccaaagccgaggcgcatcctcgcacctgcctgccttgggccagcgggcggggcccgggaacgtgcatttcaaaggggccgcggttcctgcgatgcgctggactctgggaagcgcgaacagagcgttttgcgggctctgcggggagagctggcgccggcgtctccctgtagcaggactgggcgccgcgcccgtgggtgggctgctgcccggccccgccgcccagccaagccgccgcctgggtggccattcccaagccggactccggggaagtggcagcgtggatcccagccgccagaattcgaggtctgcggcggctttcaaaacttgacaactttcctttccaggaggaccccgttctggagcgttatttcaaaggccacaaagctgcgatcacctccttggacctcagccccaacggcaagcaacttggtaagtcttattcttgttttgcttttgtaatgagactaaactccatgggccggaaacctttcctcctgtccgggcagggtccctaggagaacggctaagggcctgtatgagggttgagagcacccggagacgagggcccagcgcggcggggcgcagctagggccccctctgccatcccggcccccagcccccggcccggccaagagcctcctatc

SEQ ID NO: 5786 - DNA, 6000 bp, Homo sapiens
ggccatgtgatgtgcttgctcctgcttcaccttccaccatgagtaaaagctccctgaggcctccccagaagctgagcatattccagtgccatgcttgtacacgctgcagaactgtcagccaattaaatctcttttctttttaaattatccagcctcagaaacttccttatagcaacacaagaatggcttaatacatcaaacaagtaaaaatgagtaacatttgctgctgttggtatatcttcttggtaatagagaatgtttatgaatgataattatgacatttattgaacatatactatacatcaagcactatgttaagaactttatatacatatctcacccaaacctcatcaccctgtgtcataactcaccattattgatgattatgaaacatcataactcaccattattagtgagaaaattacgagttccacttcgggaagtgagggatatcaaaggtagtgaacacgtttcttgaatattaaaggatagaaaaataaatgtggtaaacttattagttcccaggtacgtttcctggcattactactgcggatcttttccattaatttaaatcctatatctctttcagcacaaatcaagtccaaatcctccttagaaaaacttcctcaacatttaggtatgagctacgtctttttcgcttctctggaatttagatttaggaccatattatgtgggttagaacatttggggttaaaaaaaatgtgttatacctagaagagcacattgtatgtaggcactaataattcctgtcaaatgacatctaacgattttgcatttttcacctataaaaattttccattatgtgacttgaaaattcttattttaggcttacatataattatactccatttaattcagcaaatgtaatttgttactaatagataacagttctctgtgggtttcagctaagtaatctttctcttgacacttctctctggtgattcaggttaatagaaatttgagaacatatacagctattttaaattaagaatttaatatcctccttctctgcctccctgtacttatcagtcctctttaggattctgtaatgatcaggactgatgcattcacatatgtaaaatgtgtttacggggaaagaatatgttttttaaaatacactgcagttgatatgtctttattttgtcctattgctagatgcatgtgacagaataaagttctttgtttctctttacacttaattacattgaggattttagaaaactgtcttcatgtgttatatctcttgaatcgatcaacttttcagcaaatatctcagttgtttagatttactctatgaaaaagagcataccttaaaaataccaaatatattattttgaatctgcagccactcttcaatgttaacatctcatatggtaacttgtcatggggtttaaatacttttttgttttgttttgtttcgttttgtttttgagactgagactcactctgtcgccaggctggagtgcagtggtgcgatctcggctccctgcaaccttggactccctggttcaagcgattctcctgcctcagcctcctgagtagctgggattacaggcatgagccaccacgcccagctaatttttgtatttttagtagagacggggtttcaccatgttggccaggatggtctcaatctccggacctcgtgatctgcccgcctcagtctcccgaagtgctgggattacagacgtgagccaccgcacctgactggatttaaatacttttataagttttgcattgtagctaaaatgcatattaaaagaactttaaaatattatttccccagtaaattgtattattatattgttccttatgcaaagatacatctctagatcagttaaacacatgggataagttaggtctaagattaagagaatactgttacatacagtggcatctttgatttcagatagttcaattttttttcaaggaaacagtaagcaatgcaatattttcttgatttttacattgaaaaatatgtgtgagggatgctttagtactaagcctgtgggagaaaaaaattgaatttcttaatgtaatgtgaacagttatttctatattgctttcaccctttatttcctatttgaagaataaaaatataaaaaccaaactacagtacaattttcttgactatgacagtaaaagtttgtcattgcatatgactcacatttcattaaaatgcatacaaatatgttccgggatacacacacacacacgttttcatttatggatatacatgaatatatatattccgtatgtttcatttatagatttatcgatataaatgaaaacttaattgaatcgtgttcttaaataaagatgctcaataattgtttcatgaccacaacactttaagagcattcattttataatctggaactggaacaaacccacaaagtgaacagattctagtttattacccattttgctagtgtactatagcaatgattcacatattactttaatgtcaaattcttgattaaagtagaatacataattcaacattgtattgtaacttccttggaggaaaagttggaaaaaagccagtgattcttaaatgtctctgagtcgttttgaaagatattttagggggaaataatattgaaatttattaggtgaaatttaggttattcttctgttaaaaagatttgaaatagtgtcaggaagggctatttattgtaccacattaaccaattctccatcagtgactgaagagaggaaaaatgctatcattctgttcaatgttcgtttatcttacacatcaagggcacagctcagaaggctggtaatgtcaagcctagtgagatacataaactgataaaaaaattatttgcaacagcattgatttatatttattcacttttaaacgtcttttacacattttgtgtctaatcttttaaaatattttaaaacaaatgctatcatcagatcgtgaacataataccatacttcctattgcctgtatgcttttgaggaggctatataaatattaattttccagttctggaattaagagaaagaagattgcagaacttatctttttgttctgattaactgatactgaaaataacactgacaaggtctctgggccagtggcgacggtgagttcaaataaagattagatgaagatgaagcgcggtatcttaggtaagatacacatctttactgtgtatatgcgtgtacaagaaggaaaacttgcttttttttttttaagtagatgttacgaaggatggtttttttttttttttcaacttgcaaaatctcttgaaggttggagcagagccgccggttacctttgagcatcgaaataccgcaagttatcccgtttccttttcccctcaggaaagatgggtgcagggttgagatgttacaagagaattaaaagagagccaccagcttggcatagtagaagaaacaaacccaaaatgaaaacacccggattttaagcgcggatcctgcgaggccggtttgcactggccgaacgcctgcgttaaccctttgggcgccgcagctgggatccccggtgtttgcggacccgaccggcaggaacagagatggagtgtcccgcgcccgcatggggagtgagctctcttccccaaagagggagcgagccgagaagcactttttcctccggtgcgtgcgtcacggcccgggacaggcgtcgagtccggtttggagtgggggcagagacgcggcgaggagccgctcaaatgtccgctgactgggggttcgccttaatctgtcctcgccaggagcgctcgccctcgccctcccgctggctcgctcctgggccctggaggggcatgggcccgggggcggttcgggaggggccccaggtgaagggcgcccgcacttctcctgcggcaatcatcgctctcctgcctccacacgtcgcggcagcggcccggccccgcgccgaaacagcagctgtgactgacggagtcacctccccgcgcgcctggccaccccctcctcccccgccgctccctcctgcaccaacacgtcatggaaacacggacgtcagagcctctcagccaatcgcaggctgcggcaggagggaaggggcgcgctggagggggcgggggcagcggcaagccaaggcgctcaggggaaggaagaaagggaggggcgtgcggaggcgcaagtccccacctccgcccctcactccggccaccctttcccgaccgcgcggcaagttctaatcgccaggcgcgcgctcgccagccgagggcgcgctcgccgggtcctccccttaaacgccctcccagtgccgctcagctcccagtcccggtccgagccgcggttcctccgcgcgcgcgcgcgcgcactcgcccgcccccaggctccccgcggatcgcgtcacgtgaccgcgctcagccaaggcggcagcggcggcggcgcgagcttcggcggcggtggcggctgtggcagcgggagcagctgcgccgccagcgtggagcgggaggcgtgtgggtgtggagaaaagggagcgccagaccggaacgggtgagcgttctcctccccctgcctaccccggcaatcttgcaggccacccggtgcagacggggtccctgcccggagctgcgcgcagccccctcgtgctcggccgtccgctctccggtgcccgcgggccccgccccgagtggggcgggctgcggcgctcacggaggtggctgcaccccgcccgcggctgctgttgcggacggcggcgtgaggccggctgagctgcccgtgccgagcgagcgcggcgcgccctgtgtgccgctctgcggagccgaggaggcgggtcctgcggggacgcgggcggccactcggtggctgccgggctctgggcggggacggccgggcgccgcctcctcctccttcgctgccgccgccgcctcctcgcagtgcagcgtgagtagggagccccggctggtggacgccgagcctctcggctccttggccgccccatccccgaggtgcagctgcacctccgcgtggcgccccgagccctgcgagccggctgcggacgcgctgaggacggagcccccatcctctgcgtttcccgctgccccttaacgccccgcgaccctcccgcagcctgcctttccttccccctcggaaaatggttcccactgccgggcgaggtgagtggcggccgccgcccgcccgcggccgggggcggcggggcaggtcacctgcgggggaggccaggcggagcacggaggtcgggcgtcgcggcggggatcctgatagctgggtgcgcagcgggttgcgccggattcgggagaagctgacgggggcggtcggggcccctcgcaggttgcctcttgccgggagattgtgaaggtgagcgggcttctcgccgtgcacctcagcgccgggtcagtctgggagtcgctgctccgggcccgagggatggggcttgttggggcttctggtctacacccgcaggtcttcggcttcacgaagccgcctcggccgcgccacagcccatcccgccaccggtcgcccccgccacggcgcgtggtgaccttgagggcaccgtgcccggcactccctctccccgcgccccgggagggtcacccctctaatccttggcctcggccccccagacgcactgcgggaggggagcgggggcccctggtcggcccctggccctggtggttgattgttggcgtgtcaggacggtgattcctcgggagttggagagccgcctggtctttctcctcacgccttccgtctggccccccaggatgttcacagttgtttccgattcgtgtttattcacttagtttaagagaaaaaagcctgcgcccccacctccctttttgaggaaggagtctgtaggaggaccgcgttccagtggcaggggtgtggggtgggggctgtgctctctttatcccatcctgcgggagaatcctgtggctaagctggttagcgacccctggttctgcgccgcggtcaccagccaggttggtctctgtgcgcatttca

SEQ ID NO: 5787 - DNA, 6000 bp, Homo sapiens
cactccaaactttaaactattacagctcaaatgacctggtctcttctttggtgcttttagcatctgctgtcttgttgtgctccttccttatagtttgcaagtaaattcttatttcacaccttaggtatgaacctttgtatttcttattgttctgactgcatttgttattttaacagtgcgatattttccatactttctgcagagagaggctcttggaggtatcaaaagcacagaattcttacattgacaggaggaatttgcacctgcgctctccctctctctctctctccagggctgacaaaaccctaggcattggcattgcgtccaaaggaggggatgtggtctattttccccttgggttctgcctcccaaaaggagacccagatggtgatcagcactgcttgttttctttctgttctggggagcttgctcttctgctatttaatttgtatatttttaaaaaataattttgtatgagtgcccagcagagcagcttttgggcaactagcttatgaaataaatttaaatgatctaaaaaagaacatcctttgttaattgacatttaaatgagcctaataaagttttaatttatccttctcattgagggtcagcattccaggatggaattctaagaaacatcaagacagtaatagaaatggaaagtagatgcctgttggtacccccaagcaaagcccaaccctggtttgtcagggcctctctgagtttattcacacgtaaagtgctattatgtttatttatttgagaaggtacccctaactggtgatttgaattccagaattaaggatatcaccatatctgttcctttgagactctgttacctttaaaattttaaattattcttcactattgtgtgtatgtatgaatgaatgtacatccagtgtaccaacagtcatttgttaaagagcattatatatttataattgtgtaccccttttctattgaagccttcttcatctccccaccagagatactgtcctgaaatttgtgtttattatcctcttgcttttcttaaactttacaggaaggctgggcgtggtggctcacgcctgcaatccagcactttgggagggtgaggcgggtggatcacttgaacttgaggcaaggagttcaagaccagcctggccaacatggtgaaaccccatgtctactaaaaacacaaaaattagccgggcatggtggtgcacacctgcaatccagatactcaggaggccgaggcatgagaatcactttaacttgggagccagaggttgtagtgagctgtgatcgtgccactgcactccagcctgggcgacagagtgagactctgtctcaaaaccaaaaacaaacaaacaaaaaaaccaaccaaacaaaaactttacatgaatctttttttttttttttttgtggagacaaggtctcactatattgcccaggctggtctcgaactcctgggctcaagtgatcctcccacctcagcctcctaaagtgctgggattatagacatgagctaccacacagcctacatgaatcttactgcaagtaattttttgtggcttgctttttttgtttctcagtattgtttgtgaaatttgtccatattgatttttttttttagctggagtttggtctgtggcttatttttttactttattgtttattttcataagcagaagtttaatttttttaatgtcaaacctttgtggtttatgctttttgtgtcttgtttttttttttacttgagatgataataatgatattctttcattttcttctgacaattttaagttgtgttttttccactttaagtctttaatctgttttttttttttaatttttaatttttttagagacaggtcttgctctgttgcccaggctgaattcctggcctcaagtgaacctcttgcttcagcctcctgaacagctgggattacaggtgcaagccaccatgtccagctaattttttttctttatttttcctttatctggtattggtttttgtttatgctgtgaggtagagatcaattttattttcatccaagtgaaaaggtagatcatgccactcctttgctcaaaaatttccaaatcttcccatattccccaaaattaaagttctttcttttcttttttttttttctttgagtcagagttttgcttttgttgcccaggctggagtgcaatggcatgatcttggctcactacaacctctgcctcctgagttcaagcgattctcctgtctcagactcctgagtagctgggattacaggcatgcgccaccatgtccggctaattttgtatttttggtagaaacagattttctccatgttggtcaggctgatcttgaactgctgacctcaggtgatcggcccacctcagcctcctgaagtgctgggattacaggcgtgagccaccacgccctgcctaaaattaaagttcttaaaatagaatgaaagtccatatatgatctggccctctgaaatgtctctgacctcatctctttccagtgaacactggcctccttgctcttccttgaacactcccgaaatgttcagggcccttgactttctgtttgtctgctggaaattttcaatgtctatacttctggcttcctcatttcccaagtctctgctcaaggtcaccttatcatggaggacttctctagccaccctagctaaaatctccctccaacacacacacacacacacacacacacacacacacaccccagcgtttggtatttctcttctttcaaagaacttacctgaaaaactctctgggtctagtatagttgtgtgttggggtagtggtagatgggtatttttaaaagtgttgatttaattttttgaatggcttaaggactacatgggactttcaatttcttcttaagttagttttaaccctttctctacaaaaaaatatatttttaaaattagccagaaatggtggcacacacctgtagttctagctacttgggaaactgaagtgggaggatcccttgagaccaagaatttgaggctgcagtgagctatgattgtgccactgcaccccagcctgggcaacagataccctatctctaaaaaacattttttaaaaaattttactttctgaatagttaatatatgcccacagtataaacattcaagtttcaaaagtatacacagtgaaaattagatctctctccatctctgccttctagctacctggttcccctctcttggcatcaatttcttgtctgtttccctagtttcttatttatcctcccagatatatgtcgtgcatgtagaagcacataacatatattgtttttacataaatggtggaatgccatatatattatcctgcacattgctttttttccactgaaccatgtatgttagatttgcttccaaagctattcatagagggctgcctcatttctattccagttacctaatattctattggatgatgtaccatcatttatttacttagtctccttctgaaggataattaggctattctgtctttacagtggccttctaagaagccagtgtgttttgcccatcttcaatcgctgcttcaccctgatgtcagatataccttctccttaaacttccattcccatgctatcatttccctgttcaagaatttccaacagctacccagttcccacagaataaggctgaacttcttacccttgaacgaagattctgcatggtctctgccttcttttccatcatgtcttcctgttcctgaggacactccccaaaactgatgacttgaggttttcccaaatgtacctctgattttaggggctccaaagttttcttcagcctgctctaccgtcccctttgaaccctatgagggaaatccttccctccccctggactggtcacactgggctccaggtcctctctggaacagctgcactttaaatatttcagcccagtctcccactgtacaccctacagagccagaacaggtgttttgaattttgtttggggttactgatatttaaattgttcaccaatggtccttcctcttctaaactccaaattccttgtgggcagggactgatgactgggaatggggaatactaaaatgaaaagatatcctgacttccaagtagcttaaaacataaaggtaagctgggcacagtggctcacgcctgtaatcccagcactttgggaggctagggcaggtggatcacgaggtcgggagatcgagaccatcctggctaacatggtgaaatcccgtctctactaaaaatacaaaaaaatttagctgggtgtggtggcaggcgcctgtagtcccagctacttgggaggctgaggcaggagaatggcgtgaacccgggaggcggagcttgcagtgagccgagattgcgccactgcactccagcctgggtgacagagcgagactcagtctcaaaaaaaaaaaaaaaagaaagaaacataaaggtgagccagatatgcaaaattaaaatacacaacacagtaggatcttagtttaagtggaagtatgctctatgctcagggcaatcatggtcggggggagtttttattttatttcatttttttactttaaatctctggtctctagtccagcgtctggtacatggcagctgcccagtaagtgcctgttgaatggagaataacataaaaagaggcatttaaggcaagtgtcaacttcttgcagtaacagtcaccttttatatataaaataagtcaacagatagtgtagtgtggatgtcgcttatcttttggggagaaagagggctgtgtgggaggggatggaatcaactttcagccagggagggaggcgaagacattgcctcccgggtcgggggtgggtggggggtccaggcggctgcggggcgcgggagaggcggggagaagggaagggggaggagactctcgcctcctgccccgcctcccccaccccgcggcggcggcggcgcagggcggccgcgcgggtgttggcaccagaggcaacagctgcagcagccgcgccgccccctcgcccgcggctcccagggtgatcccgagcacagccggtggctcgcggcgcggcagccccagaagacgggaaagttcgcggccggagcgcggagatgccgggcagcgacacggcgctcaccgtggaccggacctactcgtaccccggccggcaccaccgctgcaagagccgggtgagcgcagcgggctggggggcggcgggtgcgcgcgggcccgggggcgaggcgggctggggcggcggctcagtgctaacccacgcgcccccggcgtttcgccgccgccctccgctgccgccggaggtccgtgcctccccgatcctccgagctaaaagggtgggcgtcgggggcgtcggagcccaggctgcggttctgggatcccaggtccgcctgcccctcacggcgcccaggtccccgcgcgctatgcgggacgcccggttccccgacggcccgcgctctgctgtcctccccgccagggagcgcccgccgctccgcgagggaatcccgccacccggccacccgcggccccgcgtctccaggtctccggggtctcgccctgggtgtgacggtgccctccccgccgaacgtcccggcggccgccctgtctccctgtcctcggggcgtgtggccggaacccgagcgcggtgcgcagccggagcgcggggaggcggcggacgggctctgcccaagtgaaaagtcagaatctttgcgctgcctctccggagtttcgagccgagccgagcaggcgccctcgccattgtttgcagtgtaatttgctgttgctgattttggctgtgggcgaaaatagctcattctgagcctgctgcagagacgagccctgtagggcttcaaaataaagacggaggccgcagcccaagcgcgggtctgtcctgggagaggaagccttcgccctccccggtgaatacctttgccctcccgggctgttgaatcgtcgaggctggatgtgaggctctgtaacccgttctccccagggctgattgaagtgccat

SEQ ID NO: 5788 - DNA, 6000 bp, Homo sapiens
ggctggttttaaactcctggactcaagtgatctgcccgcctcagcctcctaaagtgttagaattagaggtgtgagccaccacgcccagcctaaactcattttatgaggccagcaataccctgataccaaaaccacaacagatactacaagaaaactatagatatccttgatggatattcatgtaaaaatcctgaacaaaaatactcacaaactgaattcaacagcacattaaaaggattatacagccgggtatggtagctcactcctgtaatcccagcactttgggaggctgagacgggtggatcacctgaggtcaggagttcaagaccagcctggccaacatggcaaaaccctgtctctactaaaaatacaaaaattagccaatcatagtggcaagcgcctgtaatcccagctacctgggaggctgaggcaggagaatcgcttgaatccaggaggcggaggttgcaataagctgagatcgcaccactacactccagcctgggcaacagagtgagactctgtctcaaaaaaaaaaaaaaaaatggattatacaccatggccaagtgggacttgacttattcctggaatgcaaggatggttcaacatacaaatatcaatcagtgtaatggactacaaatggtttgcaactgatcatgacctgacttacaatttttttgttttatgatgggtttattggtgtttacaatgcattttttttgtggtgttttgttttgttttgtttttgagacagggtcttactctgtcacccaggctggaatgcagtggcatgaccttggctcactgaaacctttgctccccaggttcaagcaattctccagcctcagcttcacaggtgcatgctaccatgcccagccatttttttttttttaattttttgtagagatggggtttcactatgttgcccaggctggtcttgaacttctaagctcaaagcgatctgcctgactcagcctcccaaagtgctgggattacaggtgtgagccaccccacacctggcctcggtacattttttatttagatattttttatttacaatgggcatgtcagaatgtaatgccattttaagttgagaggcacattaacagaatgaagaacagaaaccatattatcatctcaattgatatagaaaaagcacttggcaaaaacactcaacaaactacgaatgaaaggaaattatctcaacctaataaaggccatgtttgaaaagcccacagctaacatcatattcaatagtgaaaaactgaaagcttttcttctaagatcaggaacaaggcaagtacgtacattcttgctacttctattcaacatattactaaaagcccttgccagagcacttaggcaaaaaataaataaataaaagctgaaaattggaaaagaagggccaggcacggtggctcatcctgtaatcccaacactttgggaggctgagacgggaagattgcttgcttgaggccagaatttcaagattagtctgggcaacacagcaagaccctatctctacaaaaaactttttaaaaattagccaggcatgatgttgcatgcttgtagtcccagctgtgcatgaggctaaggcagggggatcacttgagccccagctttggtgataagggtgaaaccttgccttaaaaaaaaaaaaggaaaagaagtaaaattatcttcattaacaaatgatgtggtattatatgtggaaaaccctaaggattccaccaaaaaatggttagaactaataaataaattcaacaaagttgcaaggtacaaaatcaacacacaaaaatcagttgccttctaaacactaacaatgaacaactcaaaaaggaaattaagaaaacaatcacatttaaaatagcatcaaaaagaataaaatatttaggaataacttaatcaagtaggcaaaagacttatatactgaaaactacaaaacagtgctgaaagaaattagatgcaaataaatggaaagacattcgtgtttgtggattggaagacttaatattgttaaaatcccatactacccaaagtaagctacagattcattgcaatacctatcaaaatcccagggccatttttctttgcagatttttaaaaagtcctaaaattcatacggaatctcaaaagaccctgaatagacaaaataatcttcagaaaaataaagccggaggccttccacttcctgacttcaaacattgtacaaagatgcagtaatcaaaacagagtggtactggcataagaacagacatatagaccaacggagtagaatagagaacccacttcctgacttcaaaacattgtgcaaagatgcagtaatcaaaacagagtggtattggcataagaacagacatatagaccaacggaacagaatagagaacctagagttaaactctcaagtatctggtcaagtgatctttgacaagggtaccaaagctacatagtggggagagaatagtgttgggaaaaccggatatccgcaagcaaaagaatgacgttcaacctttaccctacaccatataccaaaattaactcaaaatggactaaagacctaaatgtaagacctgaaactataaaactcctagaagacaacgggggaagcttcatgacattggatttagcagtgatttctcagatatgataccaaaagcacagacaaagtaaaaatagacaattggggctacatcaaacataaacttctgcatagcaaaggacacaatcaacggaatgaaaagatgacctagggaacgggagaaaatatccacgatacataaagaatgcctacaactcaacaacaacaacaaaaaacccgattcaaaaatgggcaaaggacttgaataaacatttctccaaagaagatatacaaatggccaacaagcatatgaaaacatggttaacatcagtaatcaggtaaatgcaaatcaaaaccacaatgaggtatcacctcatcatccattaggatgcccactgtaaaaaacaaatgaacacaggttgggcgtggtggttcacgcctgtaatcccagcactttgggaggccaaggcgggtggatcacctgaggtcaggagttcaagaccagcttggccaacatggtgaaacctcgtctctactaaaaatacaaaaattagccgggggtggtggtgggcgcctgtaatcccagctactcgggaagctgaggcaggagaatcgcttgaacttgggaaggggaggttgcagtgagccgagatcgcaccgctgcacgccagcctgggcaacagagttagactccgtctcagaacaaacaaacaaacatacaaacaaacacagaaaatatgtagtgttggtgaggaggtggagaaattggaacctttgtgcattgttgttagtaatgtaaaatggtgatgctgccatggaaaacagtatggggattcctataaaaataaaaaataaaatttccatatgatctagcaatccacttctgggtatatatccaaaagaactgaaaacaggatcttagagatatctgcacacccgtgttcactgcagcattattcacaatagccaagaggcggaatcagcagaaatgtttatggacaggtaactgggtggcatatacatacagtggaatattattcaacatttataaaaagaagaaaatcctgtcatatactacactatggatgagccttgtggatatcatgctaagtgaaataagccaggtcctaaaagacaaacacctcatgattctacttatatgaagtatctaaagtagttaaactcttagaaacagaagtagaatggtggttggcaggggatggagaaagaggaaaaagttgttccatggatataaagtttctgttttgcaagaagaataagttctagagatctgttgcgcaacaatgtgcatgtggttaacactactgtacacttaaaaatggttaaaatggtaaattttatattttgtgtttttaaccaccactaccaaaaaaaaaaaaaaaaagctagggaactaaattgttattttgaaaacacacataagggaaagaatcggctgggtgtggtggcttacacctgtaatcccagcattttgagaggctgaggcaggaggatcacttgaggccagagttcaaaaccaacctgggcaacataacaagatgcccatctctaaaaaaaaaaaaattagccaggggtggtggcacttacttaaatgggaggactgcttgagcacaggagtttgaggctgcagtgagctatgatcacaccactgtatttcagcctgggtgacagagagcctgtctctaaaattaaaaaacaaaaaaaaagtaagagaatcaagcacccatactgcctttcctacattaattgtatctcaggagccaaatagttgaagggaggtttctctttgtagaagaattgtggttaacaaatgaagtaatattgaaattttttaggctcaagcgatgctcccatctaagcctcagcctaccgagtagctgggactacgggcacgcgccaccacatccagctaatttttaattttttttttttttttgtagagacagaattctcgctgtgttggcgaggctggtctcgaactcctgggctcaaacgatcctccctacccggcctcccaaagtgctgggattacaacagtgagccaccgcgcccaccagagccaattatttttagatgaggaaactgaaattcccaaagggggaatccccgtgtgagaaagcctcgtgtaggtgagctttccagcatatgcccgccttctagatttaacctctgaaaactaaattttaaggtacctttgcttccaggggaaaccaattctgcctacttgggaagccagaacatgaccgcgtaggcaagacctagctctgcgcacgcgcagagccaccacgtctggcgttcgcgtgagaaccttctgggcgtgggcttcctgcggctgagtggcagcttccatccggtgggttttgctcggcgcacccgggaggcggggccagcgaggcaagatggagttagtgcaggtcctgaaacgcgggctgcagcagatcaccggccacggcggtctccgaggctatctacgggtttttttcaggtaggcggccagagccatgctcttggcctctggggctggactttcgctggctgatttcttggaaggggtcccaggctcgggtcaccttggagaatccacagctcttgtcaaggacaaccgccccaatctctgccttgccacccccaggctggtctctgtcccatatatccccgatacaagaccgaagctatctgtagagtcagagctgtgactcggaggcaagggcatctgggctcccctcttttcccacgccctggagagtaatgaggattacaagacattaactcagtgaccctggtaaagtttttttccctgcactgccgtacagttccttgtctgtaaggcgttgaaggtaataatgatggtcccttctcttcctgacattcactgatcccacgagcagcatagtttcgcagaaacctaaatggagacccagagtggaatgaaagagcctggagaccttcgtatcattgtaagaagatgaaatactttggctttttgatttcctaaaggttttgctaattccagtgcctcctggctgagggatagtagatacaagtagtcctgtaatctgaagagactacatttatatttttagtgtaatttgagcacatcagttgtcaattcatcttttcccatccccagcacttcttcattttgctagttgatgcagcagcccttgtgtctgaaagttgttactctcactttatttccgtttatgttttgaactaagaatcattctaaaatgtctgttttcttttgggtattcacaggacaaatgatgcgaaggttggtacattagtgggggaagacaaatatggaaacaaatactatgaagacaacaagcaattttttggtgagtgcagtattttttagtatgaataattggattgggattgggatttgatttgagtctatt

SEQ ID NO: 5789 - DNA, 6000 bp, Homo sapiens
tagcaataggtacagaaagttttagctaagagccatttagaaatgtgtgtcaatataatgctgtcaatggtagctatatctgtaataacaacacaactgttcttggtttttgtttttgtttttttaaaaaaatttcttgccctcatataattaatttcaacatgagagagcatgcgtgcttttttttttttttttttagaaaagtatggttaccttcctggaagagcatgtgtattttcaaagcctctcactccctcccttcctaggaatgagcagctgaagccaggaagcacatgaaataagaaagagcgcccatggcaggaggcttaagttaaagcttaaggaaattcccaagatgatgtttttaaagggcattcaaagggcacagtccaggtagaaaacaaaatctaggattattttaatgaaaacaattctccattttatcttctcccagtagtcttctagttcaaagagagagaagattgtattcatggaaaattgatggataagcaatgatttttttttttttatctgaaaacccaggtcctatcttcagtgtgtatttattgtatgatctaagtttggcacttacatctttcatctcactttctctttgtataaatgggcacaactattcctgttccctcccacacattgatgctgtgaggataaataagatcatgtttatacttccatggagaaaaaacactaggtatactaaaaatatcactattttcagagtctttctttttcttggaaatgtataataatgccagttgcaaatggtattgttgaagagtcaaattttccataaaagtgatcaccttttcagaaaataggtaattagttctttgaaaactaaaagtttcttttaaaatttgtaaccatttttcaaacttagcagcttaaatttgttgatttattcttcaaattcatgtttattgaatgcttactacatgcaatgtattttaatggaaatatttccctctggtaaaacaaaatatattttaccttttattgatgactctgtaagataccaatatatgaaaaaaggattttagctgacttcaaatataccagccaacatcacattaggttacagaaatataagccatagagctaagttaaggaaaatgttagttctattctatgttgatcagacaaacctggagttgagttctacatgcacagtgtaagacaagctggggtatatctgaaaagaggtgattaagatggtgaaaagtgtgggaatcctgtcatatgggtgtttaaactaaaaggatagttaagatgaaaattattaaaactttactttaaatcattgaatacctaccagaagagaaattggacttattctgtatggttgcagatgactaacctataaacacagaattttaagaagagaaacatcccacttaaatagaacaacagtgccaaaaatgagcagaattgcctttgaggctcttgtttatggagatttttagaacagaaactggatgacctttggacagaggctttgtggaaaggggttttgatggagtgagaagttgggctcaagggtccctcctgattctgaatgtcttacgctccactaggaacctcacttactctactaagttaccggagagtgatgcctttatagctttttcgtcctttgtttctgcactagaaggcctcagactgctgtggatgttttggttttgtttttgtacttatggctgctttttagagttttcccatccttctcattactggattgcctcagtttatcccctgtctttaataacatcctgctccattctaatctgttacttctaataggctgtgatctagaaagatgtcataaccaaacttaataaaaatacatgaatgatttaagtgaggtcctgaagggctctcctgtgagtaaagtctttggtgcaaagagttttgccatttattttattttatttattttgagacaaggtctcactctgttgcccaggctggagtacagtggtgccaacacagctcactgcagcctcgacctcccaggctcaagctatcctcccacctcagcctcccaagtagctgggaccagaggcatatgccaccacgcctggctatgccatttattttactttttaaagacccttttaacttcctttcaagttctcaggaatattctagatttaacttatcaattttgtggtttctgggaattgttattgaaattctgtaagtttgctaagcttcctactaattcataaaattacaaaatattctgaatccatgactgatgttttcaaaaacaaaatcataggcaataatatacttatccaagatttttcttatgtaggtaaccttttcttggatagcttcttcaaaatgaaaatatcctttgtaactaaactggactatataagcaaatgatgtttattagaatgctgactatttttctctcctgagcttttcatatagatagtattggtgtcgaatgtgcagattccttttgaatatgggaaatcattgtgatataactggttttctccttagtccttagtctccttagccccttagtatataacaatagttttaacacaactcagtcaaaaacatgtaatgaacacttattgtaggtgttcttggctaagaataaggaaaaatatcagaaaaacatagtaatgttttgtataaactgaatattaaagactgttctaccattagagagctttctgtcttgttaaaggaaataagagccagttattcagcaaagaaatatattatcaatgcaggattcgtgcagacagtaaatggctttgaaatttgtaatgagatatggagtagttctgtgattgctttggcagcacatatgctaaaattggaacaatacagagaagattagcatggcctctgcatgagaatggcatacaaatttgtgaagcattctatatttttagcaatatattgtactcttgaaaaatgctaagacagtgagtgtattcttaaatgcatgttaatatgcaaaaatgcatatgttcattggctagatttagtcattccacgctgtatacatatttcaaaacatcatgttgtacatgataaatacatacaagtttatttgttaattaaaaaacagaaatggattagttctgcctaaatatactagactcagaagttaataataaatgtgcatccacccctttgtttaatttgccttggctattaagttaacatttatgctaagaacctttggctgttatagtttcctatcatttatttggtaaaaagattaattggagaggtgtttcaatggctccattaggagatatgaagaaagccccaccattgccagtatttgggaactcaaagcgtttattttctaaagcaggtgatgctacatgaattgctgtccacaccttctgctactttcctctgttggccagaagaataattttaatgtcgcccaaatggattatgctgacctcaacccagatccccctgggagatataaacttcttatatgttcctggctgggtcattgtaaataatatctacatgtatcccaaagctctgaattatcctcatctgtaacagacacaacgactaaatggtatctggaacgtagttaattttctggaaaatattcaaaggaacaaaatgagcactgcaatacaaaattgctgtcgacttaacttttgccagtttccctggatgtgtaagtagaattatattttcacagaacttgcaaaaatctcagactcggctgctatttaatctctttccagaagcaccagccctgagcaatcctatctgcaattagctgcgtgtggttgctactaaattgctccccataagttagttcctaacactgtttcacagcacggcatactctataaagggagaacgcttggaaggaccgaagagttccctttgtcgtgcccttgccctgcctctggacaacgatgttcttacactgccgactagctaatcctgtgacccttttctttcagcaccttgagtttgagttaggcaatacctcttacaccaaagtgggcacaccttcggatcatgtaggcagcgattgtttagccgagacatccccctacccccgcaaaaggcagcagagaagcggcgaacgccgcttagcagttggcgcgctctcagtgcgggtgacgcggggctgggttggggtgttccgtccccgggtcgtgggactccccgagagggggtggctggaggaggagggagggcttgtttcgctgggggatgtgggaagtaggcgctagcctgtttcgcggttttttaagccccttggcatgccctgacctgatctagagggagtctactgctcttaggaatgttccgggagaaggtgggagattgcttcccaggggaggcctgtgggtgctgcagggcaccaggggggtcactagggagatgcagggcgcgggccaggaggggcgccagggcagccgggggccaggctgaggcgaccgggaccagcgggcagccgggcgtcgggggcgtcggtcggggcgcgggggaccccccccccgggcggcagcggcagcggcgatccgatcccgcgggctgcgccgcccgggctgtcaagcgcggggggcgggcgggaggaaggggtggaggtgcgaggggaggagggctggcaccggagcgccgcggcgtcggtgcaataaaaatgcatcgcatggaactgcccgtggagaaggacgggacggagccggggcagccagaagaggtgggaaaagcggaggaggacgcccaggaggaggcggcggcggcggccgggaagtgaaaggtctcgcaaagttcagcggcggctgcgggcgccgagccccgggctagcggcagacgagcccgcagggccgctccgcggggcagcgcagccaggccggctatggtcccggggctcccgccgccccccaggtgcccgggacccgccaggccggtgcgcgagggtcaccccacctccccgcgcggtcccggcccctggctcccagctgccggcgaccgctgaccgagcccggcgccccaggaggaggaagaaaccagggccccgttccctcccgaggacggcggcgcttcatcccgcagcccagaggtctcggctccctccggcacccgcccggcccggctgctcccggctcctcccggccatggggagctgcgcgcggctgctgctgctctggggctgcacggtggtggccgcaggtgggtggtgacgcggcggggcccccaccccttccctcgctgcttctctaacccatctcgggactcgggggtgcaggggagccagggctgcgagcgcagagcgctgctcccgagggtgaaatgagtggccatgttccgcctcctttccccggggctccgcagtttcaaatactattgatttatttttacaactgggatacacatgcgcttggataaccagctatcctgggtgcgccctgccggggatactgcgaccggggtttctttcttggtttggcttgttaaaaaactgcttttccacttggtgagggaacaaaggacccagctcgccatcccccggcacttcatggcctaaggaatgatgaggaggggtggcccagcgaccctgggcgcgcgtgggctggggccggtctctggtagaagcccatcgctggtgtccctgacctggtgctgggtactagagaaccaggtaaggacacctggggcagggctgagcgccctctccccggagcagtgactggaacgcagtgggactcctggcttggacgataggtggtgatcaccccgggcttgcattgagctggctggccgcccctggggaattggtaccctggcagagactctgcgggaggtcggaggcgggtctgctccctggctcggtaactggacaaccggcgtcggcgtcggcagatgccctctccctcccactcccatcctggctttcttgggctgccctaggccaccggctcctggctcgtggtttctgtattcgggagccccttctgctcc

SEQ ID NO: 5790 - DNA, 6000 bp, Homo sapiens
tatacacaaaatatgtgtaggcctgggacaagaggtccctgattgagcaagattgttttctttggatgttcagttttcaccctggctaagcaaagggagactcaaagatggtaaatgttttagggtccaatacataaaaacattctcattgtctcctgagttttgaaccaattgagaagatcatgcaagatacaggcagatgaggatcagctttaatattaatgaaattaactgcagaatgttgttttacatctatggacaaggggatatataggctaatacttcatccctgactcagatacactttctaggcactggcttgggccaagggacaggaattcccatgcctggtcaagagtggctcagaacatctgcagcaaataaaaatacaggacacagctgggcacggtggctcacgtctgtaatcccaacactttaggaggctgaggcgggtggatcacctgaggtcaggagttcaagaccagcctggccaacatggtgaaaccctgtctctactaaaaatacaaaaaattagctgagtgtggtggtgggcacctgtaatacgagctactcaggaggctgaggcatgagaatcacttgaacccaaaaggcagaggttacagtgagccaagatcacgtcattgcaatctggcctgggcagtaagagcgaaactccatctcaaaaaaataaaataaaataaaaaatacaggacacacagttatatgtgaatttcaagtaaataaagctttttaagtattgcatgggatttgcttatgctaaatgtatgtggctgcttatctgaaattcacatttaactgggtattttatctggcaactctactatcactggtctcatttcaactcctcaggccccctccaatacattttccacgccacagttatgataactcttgaaattcattatctgattgtgtcatttgttagactttattaaaattcttcattgtctttaggataaggtctttcattcttgctatggcctttaagatcctgccagactctctagttccatttcattgcatctccagcccttcttgccttagattaggccttccatgtggccagccttgcctggaacatagttcccttcccaccccacatcttgagtcctccagctcaatctttagtatcacctcctccaggaagccatccctgacctcccaggctaggttagtgcccctcacaatactaatccaatatatatatgcccctccagagtgtaaatcccacaaaagcagggaccatgtctttcttggtacccaagtattggggtacctaagtcattacgagatagactcaatgtccaataaaatgcccagcacaaagcattcattcacaaatgctgaataaacactaaccattacttaaacttttctcatagattgagctcaccactatatgccatattagcctactgactgtacttggaggtactgttgccttcactctatctctctgctcttacagatatctacatcattgatgtgaagatgattacatttttggaattcatttgacttttttaaaaaatattttctacatcatttttttctctagttacttcatgtttgggagaaaggcaggaaagggacctctttatttatttatttatctgctatagactgagaacccagatgacagtttctcggaattatatttatcagattttgagagggactgtggggttcttctaaaagcaaaactcaggggtttcactgggttcctgggaatcctttttgatcttttggcttttctggctcttttaggttgccagataaaatatttccagataaatgggatgctactgcatattttttccactgttcagatgtggagagtttaaaatcatttccaggccaggtgaggtggctcccagcatgttgggaggccaaagtgggaggattgcttgagcccagaagttcaacaccagcctgggcaacatagtgagaccctgtctctacaaaaaatttaaaaaaataatttccacaacttatgcatttacatactactaatgttcttgaagtgcatatttaatcagttaattctcctgctgaaaacctcattgctttcagaacaaggctaaatgttaattttcttaaatttttccaacactaaaaatgtcgcaggcacttgagcattttcatgtgttattttacataaccctcctaactgtataaggtagctactacaggtatatcatattgcacccacatttattttatttaagttcaaccatactgcctgaggagggggaaaagggagtgaacaagagcaagttctctagaagaaaggacttagacaatgctcctgacctcccttgaggctgtctagttggagcctaaagataaaggaaaaatttaagggtaattcatactacaacaaagcatactttttaagaaggacaggttctaggcaaggctaggactaaagtgaggacagtgaagcacttgtcttgggtggaaaatccgagggaactccaaaaaactcactaatcaagaggaataatattttaatgctatatatatatatttttttttttttttttattagatggagtttcactcttgttgcccaggctggagtgcaatggcacgatctcggctgaccgcaacctctgcctcccgggttcaagtgattctcctgcctcagcttcctgagtagctgggattacaggcatgtgccaccatgccctgctaattttgtatttttagtagagatggggtttctccatgttggtcaggctggtctcagactcctgacctcaggtgatccactcgcctcagcctcccaaagtgctgggattataggcgtgagccaccgtgcccagcctaatgcaatatttttaaaaaatcaaaattaatggttgggcgcagtggctcatgcttgtaatcctagcactttgggaggtcaaggcaggtgaatcacttgaggtcaggagttcaagaccagcctgaccaagatgctgaaaccccatctctactaaaaatgcaaaaattagccgggggtggtggcatgtgcctgtaatcccagctactcaggaggctgagtcaggagaattgcttgaagccaggaggcggatgttgcagtgagctgagatcacgccactgcaacccagcctgggcaacagagcaagactctgtctcaaaaaaaaaaaaaaaacccaaaaaacaaaaaaaacaaaaaacattactgaagaatatccatgaaaagcaaaacacccaaactttatgttttattttacgttttaaattttttttttattttaataggaacagggtctgttacccaggctggtctcaaacttctgggctcccagactcctgggctcaagctatcctcccacattgacctcccaaagtattgggattacatgcatgagccaccacacccagccccgatatcaaaactataaacaaagacagaatctcactccaaacttgcatgactcatttcacagtaccttcccctaatcttggccctgttctacagcctaagtacctggttcaaatctcaattctgtcatttactatttgtgtgatgttagatagttactttttttcatcacagtttcttgatctgtagaatggggataataatggtatctccattataagattattgtgaggattagatgagctgggcacatggcagatgctacataaatgttggccattatcctgagagtcctgttgagtggcagatgtttttatatctgttaccatgcttttttaccccttctgattaagtcctcagatctgttatcatgcttgaaaagacctcagaactatatgtgtcttgtacaactgcaataatcttttgccatgtacatatagcatatatcaatcatcttttttaaaagaaggattaaaagaagtgactgcaaagtgtaaaaaatcttgccttggattggagtgaagctaaccccttttgcaagtctgttaattccacctgaccatcaaactgagggtgcgaatttgagtatttcctgaagctggttcccaagatatttttaaaaatgctttgaatgatggcaacattagataagtgtattgtttcccagggtgactaggaaaaaaatcttattgactagggtgcattgggattaagaaaaagatctccctttcgtaaatcagaggcaccaaggaaaggatctcgtgggaaaaacctgctgtcaaagtcggattacctggccacccctgagctggttcccctccagttcatcgcatgatttctatcataacaactcttgtatttagtggtttacatgtttatctcccccactagactctctgagaacagtagccaggtctagttcatttttgaatacctgacaccaagcactatgccacctaacaggcacaaattacatatttaacgactaaatgaatgaacgaaattcggttttggcagatttaacccaaaggtttcctctttcaaacaatatagttgggggttggaggaaaggagccacatacagcatctccttttagcactctgcagagaatgctaagtgcagagaaggttttatgcacaaaaatattcatggcattatagtaccgtctatggcacagtctcgacgcagggggcagttttctcttggtcgcctgcccaaccgggtaagtggatcccagctcagctccgcccctcccagcccagccctcagggcccgctgcgcaagcgcaggtggggagggcgcgcaccttccctatgcccctccgtcctccaggtggcgctggagaccccgccgccgccgcagccgcctctcgcccggccagacccgggcggcgccggccgcctcgccggccgcaggtccgcctccgccgcgccgagggcgtgggctcccggctcccggaagcggcggccgcggcgcggagccgagcgggcgtccgtcgccggagctgcaatgagcggcgcccggaggctgtgacctgcgcgcggcggcccgaccggggcccctgaatggcggctcgctgaggcggcggcggcggcggcggcggctcaggctcctcggggcgtggcgtggcggtgaaggggtgatgctgttcaagctcctgcagagacagacctatacctgcctgtcccacaggtatgggctctacgtgtgcttcttgggcgtcgttgtcaccatcgtctccgccttccagttcggagaggtgagtagcggcgccgcagcctggaccgggcgcctcgaccctgcactgccctcgccgtgccccgcgatgccccgatacagtatgtattttttcattattagagacggggttttgccatgttgcccaggctggtctcgaactcctgagctcaggcgatcgccctgtctcggcgtccccgagtgctgggattacaggcgtgagccaccgctcccggccaaatacagtattctttatcataaacgtgtgcagagactatgagcaagtcagaactggaaaaaggcatgtatgtgattttagatattgctccctcgcccaccgttttttaaaaatagagacggaggtctccctatgttgcccaggttggtctggaagtcctgggctcaagtgatcctcccttcttggctttctaaagtgctggggttacaggcatgagctaccgcacctggcccaagaaagccacttttagcaacggggaggaaagctgtatttttaagtggtttgaaatctgttccttagttttagtttttttctttttcttttttttttttttttttggtaggaggttacaaaaggttttaaaatttaacagagtagtttttagaaatgccacagtatacatttgcttgaagtctttacccatgctggattgtaagctccgtaagagaaggtgctgtctgtaaatactgtaaccctggcccaagcacagtgccaggtactgccagagaatgcagtgcaagtgtttgtttaatggctaaattatatggcatgaattctgagcatgtacttttttagtagttcttggttctagaggctgggaaaaaatgt

SEQ ID NO: 5791 - DNA, 6000 bp, Homo sapiens
tcatcaccatcaccatttctatcataatcaccaccatcatcctcctcctcctcatcatgtccagtgtaagctggagtgtagtggcgtgatctcggcttactgcaacctccgcctcctggattcaagcgattctcctgcttctgcctcccgagtagctggaattacaggtgtgtgccaccacacccagctaatgttttgtatttttagtagaggcggggtttctccatgttggccaggctgatctcgaactcctgacctcaggtgatccacctctctcagcgtcccgaagtgctggaattacaggtgtgagccactgtgcttggtctatttttaaagtagtatcaaaatgtgcccacatgaaaatgtcacatactcattcctcaaccaagaggtgccccagctgggcccttcctcttctgcatggacttacaatatctggaggtaggcagctcctgaggatgtgcacccctgaggctgggaaaggtggtcctagctctccagagtcaaactataaagaatggcccccatccctaacacgtactcaatttgcagggcatccaggctcatgccttggccactgggggccttgccaacctggaacagacaagaggcaatcaacattaacagaggctttctatttaggcattctaaccaacatgcaaaaagccaagagggctgcaggcttacaaagcttgaccttataatttatggtgcatgtggtatgagggagttctgaggcatttttacacaagctggatgaaaggatgagatgtctccagctccccctcttctccgcccacattcctgaccatccaacacactttagcaaggaaaagggatagaggaaacaaaactaggaggaaaagcagaagagaaactcctctagattcatgctgtgctcagaaactggggtaggagaatggaagtctccaggaagagctgttgatcccttcctgctctggaagatgcacttctatgactgcccaccagcctcctcctctgggtgtaaccgaacaccatggtggagccacacttcagagaaacacactgcttgcttttaacgttaaacacatcctagcctgtggtttgtgagccacatatggtcctgggagccccacgaaataatgatgaaagaaaatcgttgaaatctggacacagaagctctctgaagctatacttttcctcagtgactctgcaaattgtattagctgtccaatattcactgagcattgccatatgcccagtatcatatggtgtctcttgtctaatccgcataacagcaaggttgttctttttttttgggtggagtgcaatggtgaacagggctcactgcagccttgactttccaggcccaagtgatcctctcacctcagctccccaagtagctgggactacagtcacactccaccatgcctggataatttttttttgtattttttgtagggacagggttttgccttgttgcccaggcttgttttgaactcttgggctcaagcagtccatctgcctcggcctccccaagtactgggattataggtgtgagccaccacacctggcctagtgaggtagcaattactcctgtcttatagctgaagatactgaggttcagagaggtcacactccaaagtcagtcatggagctgaatttgaacccaagtcagtctattctatagcctgtgtcttaaccattgtatgtactatctcccagaggaaaagaatgagagggaaatgctgaaaatattaacagtcccatcgtcctactctctattcattcattcagtgctcagtagaggtaaaaattgagaaaccgtccattctcatatctggcctacagtctgcttttttttttttcctgagacagggtcttgctctgttgcccaggctggagtacagtggtgccatcatagctcactataaccttgaactcccaggctcaagcgatcctcctgtctcagcctcctgagtgccaccacatccagctaaattttttttggtggagtcagggtcttgctgttatctaggctggtcttgaactcctggcctcaagtgatcttcctgccttggcctcccatagcgttgggattacaggtgtgaggcactgtacttggcctggatcaatttttaaaaatttaaatatcatttaattatttttgataaggatcagatgactatttctctaagaaacggattaataataagacaggtccttaaagatgcaccttacagaaagggtgaccctgaaatctagaggagtttagggatacttctcaaggtcacacactttggtagcactaaaggagtagggctcttgctttcaaggccagatcttggcagcaagctgctttaccagttatcactgcctctgcccctaacatggagaactgcttgaagggggataacctctttttgcgcgctagagattttaacaacacaacccgaactcagctgaatagtttttaaacaaggttcctgtgatgagtgtcttctgatttcttctgctgtctccccgcgccacaggtcagagacctgtgccctgttgaacctagaggctcctacaatagctcctggtatttagctgaagtagggtgttcctctctgtctggggcagatggttgtatttctagtccagaacctgctataatttactctgtcctcccacactaatagcgattcttctatctgccagcttggcttctatagccttctgcaatctggacccgctccacccagttcatctctttcttctctacatgtagaacacaccctcatggccaacaggtgtcctgggctcaccccatttccgccacagaaatatcctccctgctctcctcatatgcaaatcattcttcaaggcactgctcaaggtctttctgcccccaaagcctgcccatgtacaggccaatggtttgctttccaaatctctttacatttatgttcccaatttacctaagttagccctcaacaggtttctgtatatatctccaagtgtagtgcaggctccttgagggcaggcacacaagtgttcattcattcactggaggcttttagcaacaccttataaagcgagaaagaaggagaaatataaactatggttgcttccagtcctcagggaggggagacatacctggcacacagtgggccctcaacaaaggtttgctatattgaactaacatatatgcctctcgttgcaattacttgctaagtcccatgagaggtatcaaatggtgttatagggaaagcatcatcaaagaggtggcatttgaaccctataggctttaagggcagggcatggttttgtctttgtttacagaactgggaggaggttacagacagaagaaacagcattcctactacacacagtgccaggtgcacacagtgccaggcacacatcactcaccagaaactggggaaagcagtggaattgagtgagttctgtccctgccccggcaccaattagactgagtgagtgggcaagttgcttaacttccctgggcccccgtttccttcccattctgaagtgattaagctgcacagacttcagaaagaagcagactgagtgaggttcgaatgatgactatatgtgaccttgagccaatccgaagccggctcgctcagtctcaatttccttcctataaaatgggtaaaataatttctacctcacagggcttttgtgagatttcgagaacatatgtgagtcgctaaccacacagcctggcaataccagatttccttttacaaaagtaggggtgacaacgctgatctgcctctttctgtgtggctgctgctgcctccgcagcacccatcccagaggctgtcaggagtaggggccgtggacaaacttcatgaccccgaaagagaaaacagagctgaaggggcttcggggggaaaaagtaaagagctggccacagcaggctaacttggctaacggggacacttggtgaatgcgtccccttgaacagacttaccacagtcgagaatctttgctaactcgcatcaaccatgcctcccaagctggctggattttggacagccttttttgtctccgccttcaaacccaaggcaaaggacaaggcccaaccccatggcgggctgggagagtgaaagcagggggagtcccccaattcccagcggaaaggaagggcgatctgttcccacccgctgactcccactcccggggccagggctccttgggcgccccccttcatttctctcctctccgcacaggtcgggaagggagggggtcgcgcttggcccgcggcgcaggttcaccccggctttcgtccctccgaccccgcctggccgcccatccccgacccccgtggaccctgctcggccgccccggctggggtcgatctggccctccgcccccagcctgcgtggaacccgccgggccgccagccccacctcggccgcgtcccctcccctccgctccgctcttctcccctcccctcgcggccacctcggtgcccaccccggcctccgcagaccccgccgggaccccgccccgcgcccagccacccccgcgccggcttcccggcccccgtagaccccgcccggccctccctctccggggtcgtggcggcggggaggaggggccgccgggccggcgtgcgtggcaagctctcccggctcggctcgctcggcctcccttaccgggaggcggggtcggcgccgcggcggcggaggcaggccccctcctcccgcctcctcggcccggcctccttccccggccgcgcgtcctctcgccgctccgacgccagcagcgcccgcgtgccgctcgcccagtcccgggggagcccctgcaagtttcccgggccgcgcgccgcgctcgctcgcctcccagcccgcggcccgagccgccgccgcgcccgccatgccctcggccaaacaaaggggctccaagggcggccacggcgccgcgagcccctcggagaagggtgcccacccgtcgggcggcgcggatgacgtggcgaagaagccgccgccggcgccgcagcagccgccgccgccgcccgcgccgcacccgcagcagcacccgcagcagcacccgcagaaccaggcgcacggcaagggcggccaccgcggcggcggcggcggcggcggcaagtcctcctcctcctcctccgcctccgccgccgctgccgccgccgccgcctcgtcctcggcgtcctgctcgcgcaggctcggcagggcgctcaactttctcttctacctcgccctggtggcggcggccgctttctcgggctggtgcgtccaccacgtcctggaggaggtccagcaggtccggcgcagccaccaggacttctcccggcagagggaggagctgggccagggcttgcagggcgtcgagcagaaggtgggtacccccggccccgcaactgtccccatcgactgcggcctccggacccacggccgggctccttcgtgcttcccgaccggcccctagcgctgcctgcccaggcccggaggcgggagccggccgctcctccttggcgggccctggcctagacatcccactccacgcggccccctagttccgaggcagtccccagaccccctttgttaatggctgcggaggaatcggccccgagggatgggccgccgcgaggatgcccaggcccgcctggcagggtgggccaagggcctgtcacagggcattagcggtgacctgtaaggaagccggcaggctccggggagcccattctttctgcattaggaaccgctgaatgggcagagctgtctgaaaaggaggttggaagggaagccagcgcatccctggaagcctcaggcaaggccccacctcagctctgcctgtgggagacatccgagcggggtttttaatagacccggagctggcattcttactcatttgcaggtccaaatgaaataccatctatctttaggtcccttgtcctgtattggaccagcctgcccaggtgggcctttgacgtagtcctacttcagcttttttgggttttcttttgagagggagtctggctct

SEQ ID NO: 5792 - DNA, 6000 bp, Homo sapiens
cccagtgagctggggagcccctgttttcttccactctggaggaatggcttcatgctgcagtctccagcccagaaactggttcctagtgccgcccagattggcagcgaaaatctggggccgaaagtgaactccccagagctctgttcccatttgagaaagggaattgaatcctggctggagcaggcccacagtggaccatttcccctttggatgattcaaatcagcaagctgtagcccgtgagcccccctagcagcaggggaacgggggagggcaggcagctgggcgtgacttcccctcctcccttctgggccttgcttgcgagcagctctgttcttattctatttcatgagaccgttgctttcattcgaacaaaaggtcccattgtgagtaaactgaaaagaccactgccctgagaaacaagcggcacaaccagcaagactcttgctttcctcggaggaaggaacaggcttttaatgggctttgcagtctggctgggctccggtccgcctgtgccctcctgcgccaccagggagcctcagtttccttggagggacagtgaccactggcaagggaggtgggattctataagcgacgtcacccctgttttccccatttttagggaagcggacacaggtttgcataggaagccagcacctggtcggggagggataacagttcctgacaagttacacatagattataaaatctcaggctatacctggcctgtcagttatagtccttgcctagccacatatgttcaggattccacaaatgtttaatttttcattttctttaataactgtactgttgaccaacctaagcttggtaaataccaggctgaagctaagttgcgctggcttttggcacccaagcctccaagccttcctctctttgtctctataatatgaggctttattacagctgtgcttgtcactggtgggaacagttccccaccccgaaacaacaaagaagcaaaacgcaattaaatagaccactgcacacatgcagctgtacaggctgtggtgttgcctctggggactggggaccaccatgaggctgcaggcattttcatccatcagcgaatggaaggaagactgaatttagtgcacggatgatcatttaagtataaagaggttataggttgtttgtttgaataccaaatctctagttgctcaggatccacttgtaagagagctccaagtaggggcccaatgagccatgtttttgctttaacatggggctgttccaacagtagcaggcagttagttacaaccaggagcacatttttctcagaagacccataaacagctcttgcttcctaggctagcccactactgggctccagtgtagagaggaacctaacacccactggctttgctgattgcaattcctgctccacaccccaagcaggctcacacggtgttgcgaggaggtggggagaactgggtcctcttagaccaatcacagcaggcaaggtctgcaaggaggagctggaatcacttatatattgaaccaatatttattgtgattgaatgcaggctctttcataggacaccctaggttcagactctggctttgccacttactagctctgtgaccttaggcgagtttcttaacctctctggaacattttttttaatctacaaaatggggatactaatagtacctacctcatgaggcagttgtaacaattaaacaaagtagtagaccaggcatgatggctcatgcctgtaatcccagcaccttgggaggtggaggccggtggatcacttgaggccaggagcttgagactagcctggccaacatggcaaaaccccgtctctactaaaaatacaaaaactagcaggccatggtagtgagcacctgtaatctcagctactaggaaggccgaggcaggagaatcacttgaacccaggaggcagaggtttcagtgagctgagatcgtgccactgcactccagcctgggcgacagagtgagactctgtctcaaaaaaaaaaaaaaaaaaaaaaaaaaaaagaaaaaaaagtaaaatagacatcattatatacattttttctatatacaaatatagaaaagaaaatatatttaaaaggaaaggggcattaataattatgccacccagagataggcaccgtcagcatttctttcagtctgtcctctcagcatgcaagcacacttgaattatgctgtttatatacttctgtgccctctcttttctacctaacaggtcttgagtgctttataagcattcagtataaatataactttcatgcctgcgtcacattccatcaagggacaggtttctgtagtaggggagtctgtgttttttcccaatatttctctcacctcagatatcattgcttcaatcttggaaggcaacttggagtatttttcttgggcttcattcctagaagcagaaacatattcactttgagtctttgactctcacagatgtcaggtgcggtgaagtgtggttttatggtcttcacacagacgacatacaccagatttatcttagcaatatttgctcctctgagaaggaaatttcactgctcaagtctcaccttgaaatagattacttggagctgggcgtggtggtgtgctcctgtaacagctactggggaggctgaggcaggaggattgcttgcttgagaccaggagtttgaggctgcagtgagctatgaccacgccactgcactccagattaggccacagagcaagaccctattacacacacacagaagaaatagcttacctgctgctaagctactcctttttccttacatatagtaattgctgatgtgctggagctcaccgttcagcctgcaccatcccaggctaggggttaagatcaagaacattatttcatgtgcctggacttgagtcctggctctgccattactctgtgtgcccttgagcaaggcacattctccctctcagcttcagtttcctcatttctaaaggcagcttcgaggattatatgagctgatgtatgcaaagcacctaccacagggtctggcattgaccacaggctcaggaaacgttaagcgtttgtgttgtgaggctttgcaggtgatgaaactattcaactctgccgctgcaacgtgaaagcagccagagacaatatgtttacaccaattagtgtggctgtgtcccaagaaaactttatgaaaacggaatctcgaatttcgcacagtttttatgcatcacaaaacattttccaaccacttaaaaatgtaaccaccattcttagctcacaagctgcacaaaaccacgtggcaggctggatgtgacagacagcttgcaaccactcacctccgctaatcagagagtgacctgcaggcagtcttgggtgtgtttagagtttctcagtcccctgtccctgaaggatggctatttccaaacctgctggggaagggtgaggggcctgggttctaggggtctcacttcccctcttgtggcttcagtttccctgtccgtgccggcagggtgagcttttggctgtttccagctgcagcttcttaaggtggctgagactgtgtcatggcgaacacctgctgggtctctggttttcattttaaaacaacctgtgtgcggctgggcacggtggctcacgcctgtaatcccagcactttgggaggccgaggcaggtggatcacctgaggtcgagagttcaagaccaaccagcctgacaaacgtggagaaaccccatctctactataaatacaaaattagccggggtggtggcacatgcctgtaatcccagatactcgggaggctgaggcagaagaatagcttgaacccgggaggcggaggttgcggtgagccgagattgtgccattgcactccagcctgggcaaaaagagtgaaactccatctcaaaaaaaaaaaaaaaaaacaactttgtgcaaggcaagatatgagtatctttctgtgcatgtcctgagcccttgcctggtgcaaagccgcagggcagatcctgggagacccccctattccctcccttctggaagtgtctgggtattcttaggcctcccagcctttgcctctgctgtgctctctgcctgggatgcccacctggcttgtcatctcaagtgccacttcttggaagctcctcctgttaacctccctcccccacccaggatggaaggagaggcccctcccttgctcaccgcaggatggcactcactgcgctgtgtcattgtggcatgatgttccaccgaattgtttactcgctggcctccccattggatggagggctaccagagggccacagcccagaattgctggcctttagacctcagggcatgcagtctggagtgccagagttggtcaaatgaacaaatttaggatgaagaaataagataagcaggacttgcccttgtggtatctgtagtccagctccctagagaggctcttggttgcagctgaaagggcctgtgctgtgcatctacagagagtgttttgagtcctgcgagaagaaatacaccatatttgcaaaccctttgaaggttcatattttgtgttttttgctccctgaccacctcccacccctccccacgccccaccaatcttgggcaagaagcgagaccattctcctttttctctggtcactcctgtccttcagggggctccctctggccccgactgtccattgctgctgaagtaatgctgtggcctttctcagtttgggccccacccaaaaccgaagaacttctccccagaaagcttctacttggttctcagtgttttcacagttatgggaacccaagaacagtgtcagacctaggaggtgccccactaccaccctgtctttatcaatgttgtcaccaaagctgtcacaaacaatggggtgtgggctgtcacatggccctgcctaagtaaccacattctcgcttcctccttccacacacagccattgggggttgctcggatccgggactgccgcagggggtgccacagcagtgcctggcagcgtgggctgggaccttgtcactaaagcagagaagccacttcttctgggcccacgaggcagctgtcccatgctctgctgagcacggtggtaagtgctggcttgcaaaaccacagggagtggctggaggtccccatgggccaagggcctgccttatagctgctggcaggcccgggtaggaccgccaggcccttcttgagctgcagcacctggggagggcaaactgaggctcctccgactcaagactaaagtcttcctggagtctgtggccttattctgtgactcttctgaatcctgctcctgccaactttttttttccttctttttttgagacagggtcttactctgtcacccaggctggagtgcagtggcacaatcatggctcactgcagccttaaactcctgggcacaagtgatcctcccacctcagcctcctgagtagctgggactacaggcgcacatcgccgcatgcagctaatatttttacctttcctagagatggggtctcactttgatgccgaggctggtctcaaactcctggcctcaagcctcttgcgttggcctcccaaagtgctgaaattacaggtgtgacccaccagccccagcctcccattaacttacttccctccctggccagtttgcctgcagcgtctggcttggcggcattctgattttgaaaatcagagaaaccatgagtgtttccctagaaatgatcttatcctctcctttcctggatgggaaactgaggtcgggagaggtgaagggatttgtttaggggcagagctgagattaggtctggaagactccagaaagtagggggagtgcaggatttctcttgaagctgcatgttatggacgcataaaaaagttcttttcagagaaagatgcattcttcccactttttataagactgaggaaatgacacttgtctgtggcaaactattaaaatattagaattaagatactattgttagcaaaagggaaaacaataataataataataattagaatatttggctgggtgcag

SEQ ID NO: 5793 - DNA, 6000 bp, Homo sapiens
gcccgccaccctacccagctaatttttgtatttttagtagagatggagtttcatcatgttggccaggctggtcttgaacttctgacctcaggtgattcaccctccttggcctcccaaagtgctaggattacaggtgtgagccaccacgcctggcctccctgagttgttttaaggccaagcaatcctcctgccctggcctcctgacttcccaaattcttgacccatggaaaccctgacagataatgaaatgctattgtattaggcctctaaattttggcatgttttgttatgcagcaataggtaactgatacaagcacaaaatccttctcaatttttttttttttttttttttttttttgagagggagtcttgctctatcacccaggctggagtgaaagggcacaatcgtagttcattgcagcctcgaccttccgggctcaagtggtaaatcgacatttaatctactctctgccagacattgtgtcaggtccttttaccttcagtaataataataaataataataatagcagcttggccaggcatggtgactcatgcctgtaatcacagcactttgggaggccgaggcaggcggatcacgaggtcaggagatcaagaccatcctggctaacacagtgaaaccccgtctctactaaaaatacaaaaaattagccgggcgtggtggcgggcgcctgtagtcccagctacttgggaggctgaggcaggagaatggcgtgaactcaggaggcggagctggcagtgagccgagattgtgccactgcactccagcctgggcgacagagcaagactctgtctcaaaaaaaaaaaaaaagtaataataataataatagcagcttcaatttattcaactttaacaagtgccaggcactatgctatgggttttattatataatctccttgttctttaaaattataatagtagagacagggtcttgctatgttgcccaggctggtctcgaactcctggcctcaagcaatcctcccacttcagcctcccaaagtgctgaattacaggtgtgaaccactgtgcccagccgacatataaaatctcaatcctcactatagcctgatgagtgggccctataggtgctgttttcatccccattttccaggtaaggaactgagactcaaaaagacaaaataactggtccagggccaaatagccagtaaatggcagagctgggatttgagctcggatctggatgacttctaagtctgctcctaacatgtcaaaatggcctttctcagcctggggaataggccctaaccctaaccactgtctaccagagcaggggtgaaccaggggctatcccaggccccatctatctttcttctctgtccccaggggttcctctccccgcctggatctttccaggagtctctcaacagatactcatactctcccccaacaccccttgcttcctgctctaccccagtcctgggagacagggaggtagtaacccacctgctctgctgacctagaatggtgatatctaagcctcaccctagctaccagggtcaggccccttggggaaggaggacttcaaactcagcaattctggagttacttctcaagcagcagatgacctggggaaaagctgaccccggagtaggatgaccccggagcaggcttggagattgtgacacacagacactactgtgaacgcccctgtgctggcagcctggacatggggatgaacctggcctggtgctgcttcgaggtgctcccagcctgtgggggacatggaaaggtaagttaatgcattgttgtaacaatggaataatttttattttttatttttctttgagatggagtctcactgtcacccaggctggagtgcagtggcatgatctgggctcactgcagcctccaccttccaggttcaaacaattctcgtgcctcagcctcccaagtaactgagattgtgggcttgtgccacatgcctggctaatttttgtatttttagtagagacgggtttttgccatgttggccaggctggtgttgaactcctgacttcgggtgatctgcccacctcagcctcccaaagtgctgggattacaggtgcgaaccaccacgcccagccaacaatggaataattaatggggacaacaaacccttccactgagggagtgttgactcagcatccagcatggggtttggggctcttcacagtgtcctatttcagctaggcatggtggctcatgcctgtaatcacagcaatttgggaggccaaggtggggggattgcatgagcccaggagttcaggaccagcctgggcaacatagtgacaccctgtctctacaaaaaatgaacaaaacgagccaggcatggtggcacacgactgtagtcacagctacttgggaagctgaggcgggaggatcgcttgagcccaggaggtcaaggatgcagtgagccaagatcacaccactgcattctagcctgggtgacagaaggagaccctgtctcaaaaaagataaggaaaaacatctggaaggacctcaggaggttggtactagtatcactcccatttcaccaagggggaaactgaggctcaaagagaggctctaagtgtttatagaaggtcctacagaaacctgatgttctgcgattccaaacacatcatgctccagatcacaatgtcacctgcccagaggtgggaattagaggtgtgctctgaaggtggggagccctgtggccatgtggaggggttggggggagggtggaagaccccctagtggcggtgacctctgagctgagcctgacaacatgagtaagagtttgtcaggtggaaaagagatagggtgtcatcagggcagggggctcggaaggagcagaggcaggtggctgtgagcaagaggccgatacgttcagggaacagggagcactactgggcaggaggtggaggtaggggtgaaagacgatttcagaaaggtgtgctagggctggatgctgaagggccttgaatgccaggcttggcgttgggcctgggtcctgcccatgacgaggaagcaggtcctaccgtaaggataagagatggggtgactagatgcatgctaatggcagaagtggggctgcaggcaggagtggcctgggaggacacactccagccttaaggaccccaggtccaggccccatgcctgcctcctcccattcccccatccccccaacagaagaaaaggcaggatgaacagagcttccccaggaggctgggaaactggaaatagggggagatactggtacatccatcagcagatcactaactcctcggtcttgatttgtttgccaccttcttttaaaaacgatgctatgtgcccccttcggcagcacatatactaaaattggaacaatacagagattagcaaaaagaaaagggaaaaaattaaatacaaattttaaatattagataaaaaggtgggcatggtggctcacacctgtaatccaagcacttttgttacaggaaaggggtcctgatccagaccctaagatagggttcttggatctcgcgcaagaacgaattcagggtgattccatagagtaaagtgaaagcaagtttattgagaaagtaaaggaataaaagaatggctactccataggcagaacagccctgagggctgctggttgcccatttttatggttatttcttgatgatatgctaaacaaggggtggattatctatgtttcccctttttagaccatatagggtaacttcctgacgttgccatggcatttgtaaactgccatggcgctgatgggagtgcagcagtgaggacaaccagaggtcattcttgtcaccatcttggttttggtgggtttgggctggctcctttactgcaacctgttttatcagcaaggtctttatgataacctgtatcttgtgcccaccttctatctcaacctgtgacttagaatgccttaaccgtctgggaatgcagcccagtaggtctcagcctcattttacccagccccactcgagatggagttgctctggtttacacagctctgacactttgggaggcagaggcagaaggatcgcttgagaccaggagtttgagaccaacttgggcaacatatagagacctcgtctctataaaaaattttaaaaactagcctggtttggtggcacacacctgtggtctcagctacgtgggaggctgaggcgggaggattatataagcccaggagttcgtgaccagtttgaccaacatagtaagaacattttacaaaaaatgaacaaaattagccgggcatgatggcacttgcctgcagtcccagctacttgggaggccgaggtgggaggattgcttgagcctcggaggtcgaggctttagtgagccgtgacagctgctactgcattccagcctgggcgatagagtgagaccctggcttaaaaaattaaaatttaaattaaaaaaaaaaagctatgctactagaggggaatgttgaacccaattaggatctcagaaggatttcagtgaaaccgcgagaactttcctgggcagggtggggctttctccacctgggattttcccaaacctctttgtcaccattcattaccaggagcagcttgacaccctctggttcctctaccctcgggaaatgaacctcctagtttcaccctctaaatgtccctctccggcttcctgcagtccttacccatcggcttgtatctcagtttcaaagcggagggagaggacggtggagagtgggaagaccctacgaagctccccgggagctgtacctttaagggcaggggcggggcgagccccgagggggcgtgtcctgagggcgtggccgagaccggggcggggcgagccggggcgggcccggacgggaagagtaggggcccggacgctgcagcaggcggggcacccggactggcggcttcgctggcgcaaggtcggtccggcggccagggacctggaaggctgcgaggccctgcgaggtcgaggttcggagtttgctggtcccaggcccggcccgaggtaagaaagagccgcctccccgcacggccggaggacccgggcgccccgagttcgacttctcagcctccgtccggacgggaaacggagcacggagatgttcctgaggtctctttcctgggaagcgcagccccgatttcccgcccctgtcccttagcaggtcggcgaccatccgagcgctgggcatcggcccacgcgtacagaaggcgctcaataaatgctcactagtgaatcagtaaaataaatcggcagcaaagagagacgagacgcatgctgatcttcaggtgttggggacatcagggacgcgaacatttattgagctcttattgtataccgcgtcggccagcatttgtgtccatttcacacatgaggaataagaggcccagagaggtgaagtgacttccttaaggccacacagatagtaagtggccgagacgaatttgaaaccaggggtgtcctgtttgaacttggtgccaaatagagtaactcggactccagttggaggggttcgggagaaccatagaagaggaagggccgtgtcttccgtggacaggtaaggaacctggctgggacaggcgcctttctgacctctcttcccctccctacctcctctccctcccctcaggctgccagtacattgagaaacacctgcgcagacttaaagaaaaaaacgtttttatggggtttggtttcctgattgcaaaaataagacatactcatcgtagaacacatgaaaaagccaaaacaggaaatttagtttgctgaggacttttgtttttccagtttaattcctttgaaatatattgaagccattttggccctggtcttgagggaagaggcacatggtggtgaccagcccggccccactgctaacccgcggtctttgagcaactcaacttccttcttgcccttaagttccctgtcggaggggctgtgggctctgtgaccctcttgctgtgtgaccttgggcaggttctggaattcctctgctgggtgtggt

SEQ ID NO: 5794 - DNA, 6000 bp, Homo sapiens
ataattactgtggtgataattagaggcacctgcatggcctctttctttctttttttttttttgagacggcgtttcggagtttcgctcttgttgctcaggctggagtgcagtggcacgatctcggctcaccgcaacctccgcctcccgggttcaagcgattctcctgcctcagcctcccgagtagctgggattgcaggcatgtgccactaccacccggctaatttttgtatttttagtagggatggggtttctccatgttggccaggctggtcttgaactcccgacctcaggtgatctgcccgcctaggcctcccagtgtgctgggattacaggcatgagccaccgcacccagcctccatggcttctttcagcaaatattgcacaagctgtagcgctctcacctgcagtggggtgcagagagacaaagcacccctcctgggggagcctaatgcctgagtctcttgtgaagcacacctgactccctggctgaggcccaaaggtgtcacagatacacctggggctgctatagcttggagctgagtgctgctggcagggagactaaaagtcactcccagtcgggtgcggtggctgacgcctataatcctagcactttgggagaccaaggtgggcagattgcctgagctcaggagttcgagaccatcctggccaacatggtgaaaccccgtctctactaaaaatacgaaaaatagctgggcatggtggtgggtgcctgtaatccgagctgcttgggaggctgagtcagtagaatggcttgaacccaggaggtggaggtttcagtgagctgagattgcgccactgcactccagccgtgtgacagagcaagactctgtctcaaaataaaattaaaattaaaaagtcactccccagatgccacagtctgggcagctcccaggcaagccacaggcttcagatttattccaaccttgccctctggggagacttcaagcctgtagagatgttgactaggatctagaggtgctgtctacttctcggcaaccttagcctgagatgctcaagccattagtctctgggcccacacttcatcttcctgggaccaggtacacggtgtttccatggcctggacatcatcccagccctggcaagtgctgtgtagcttcttctagggtctgcagccacatttcctcaagaaacacttcggaggtctctggttcagatagagagaagaaaacctctcctcattcaccataccttcaccaaaccccttctccctcctttcttccaccagatttttcccactgaaaagaatggtccctttgcttctgggaaggccttgactttcctactctagcagctcccgtttcattcatccaacaccaactttccacttggctttgacttctatgactcactgggaaccaaagcccaagtgaatcgcccagaggctcagtgtggcattttcgtttcaaaagtgacatgtctggtctgttttgttcttagctctccaaagaaaaagcttctgcatcacccaaagccacttccaacggcttctggcctttcccatgggacctaaagcctcactctgtgcccctttgaaactcagaatgactgcgtcacgttcaaggacacagttggctttatgtaaaagcacttggcaaggttgtgagagctaaatgaatgtcaagaatttagcccctggccggacgcggtggctcatgcctgtaatcccagcactttgggaggccgaggtgggcagatcatttgaagccaggggtttgaggagtttagccaacatggtgaaaccccatctctactaaaaataaaaaattagctggatgtggtagcgcacgcctgtaatccccgctacttgggaggctgaggcagaattgcttgaacctgggaggcagaggttgcagtgagctgagatcacgccactgcactccagcctgagtgacagagcaagactctgtctcaaaaacaaacaaaaaaagtaattaaattaaaaaaattttttaaaaaagaatttagcccctttgccttctcatctccccttaatatccctgcatctggtgggtttatggctggacagatctttgcaggccagtgtcttcttgtgaatagtgagactaagggtccctggtgatttgatattttcttgttgccctgcctcaaaccctcccctggacctcgatcttttttttttttttttttttttgagacggagtctcactctgtcgccaggctggagtgcagtggcgtgatctaggtccactgcaacctccactccccggttcaagcgattctactgcctcaggcctcccaagtagctgggactataggcatgggtcaccacgtccagcgaatgtttgtatttttagtagagatggggtttcaccatgttggccaggatagtcacgacctcttgacctcatgatccacctgccttggcctcccaaagtgctgggattacaggcgtgagccatcgcgcccggcctggacctcaatctcatcagtgagccttttcccagggctctctgatagagctttggaggaaacacttggaacctaactggtcctggcacctggcagtgggggaataaggaaggagagctttgcttctgaagggaaagtgtacttggctttctctttaaagggtttcccttggggaacaggcaagcggcagatgtatgggcaatggccaactgatccatttggagatagattcagggtgtggtgttccctgtaagcctgggcaggccctgggaaactggagcagagctaaattctggcctaaagttgggcaagctgcagagaagcttgagtacgttggtttcaggtgtgtgagttttgccttctgcagagaaacaggggggtgaagggtgggggtggaggggtgtccaggagggttagtgtatctgttgcccaggcatgtttctaaattctgaagctgcactggttaatcatttttattcatgaacacagtaactggcaaggaggcttagctgggccctcaaagtctggcctcagtgcaccttctcagtatattttctcaacactccagcacaaatcacccatcccactctcggattcaagctcaccaggaattgggccttacttcatgccattctttctttctagaatgccttttcttttttttttttctttttctttttctttttctttttttttttttgagacagagtctcgctgttgcccaggctggagtgcagtggcgcaatctcggctcactgcaagctctgcctccggggttcacgccattctcctgcctcaacctcctgagtagctgggattacaggcgtccaccaccacgcccggctaattttttgtatttttagtagagacagggtttcaccgtgttaaccaggatggtcccgatctcctgacctcatgatccacccacctcggcctcccaaagtgctgggactacaggcgtgagccaccgcgcccggccaaaagaatgacttttctttgataagcctctcaccctttcagacggcctcatccactcctggggaagcattccgcagtacctggggcctcaattaatctctctcttctctctccatctaagctccagattcactttgttggtctctggtctagctctaccgtgtttatttctgtgccggtttccagacctccaaatggacggtttcctgagccttctgcccttgctgttccctctgccaggaactcttttcctgtggatctttgcaaggccagctctctgtcatcattcaatatcagctcaaatgtcacctcctaagcgaggccttccttgaccaccctatctaaagtaacccacacctctgctcactctctgtcccctcaccttgtgttacaaaatgtgtttttgtaaaacttagcagcatctgaaattatcttatttgtgggcttggactatgtctcttcctttagaatgtaagctctaggaaggcagagtgagttgacacatggttggcacccaacaaatatctgttgattgattctgtgaaggcaagcgtggggtattcgacttggtgccgggcctgggcgcaataaaggttggctgcctggaatatttgctacctgaatgaatgaaccaaggaacatacgaacgaaggaatgcagccctctgcctgttgactgacaggttgactgacagttggggggcccgtggccagcagactgttgactgacggttgacagctgagtggcagccaacagacgcgcatcggggttcccgattggctggtgcagcagcccctcggagaggggcggaagagggtacccgaggcgacatctccgcgtggggaggggggcggcaccaggcagcgggaggcggcccaactgctctggctgtgcgagcagcagccgcctagaacccaggagccgacgtctctgcgcatgggcccggctcgaggggcggggcgcgcatcacgtgagcgtgttttgggcacgtgacccgcgcggggccaaggctcgcccccgcccccgcccctcctcccctcggcgggtgtgatcgagtggcctcgcctcatcgcctagcgcccccctcagtcgccgccgcctccgcccgccggccatgtcccccggccgccgccgccgccgcccgagcgcggcgctcccgcggccccgcgcgcagtgagcgcgggcccgtcttgccgttcgcccgccccagggcccccttgttctccgcgccgccgccgccgccatgttgggtttggagctgcagcggagccgccgccgccgccgcgggtgagggaggccgagagcggagcccgccccgccccggggcccagggagcggggccgcttcggagcccggcctctccccgccagccgccttcccggcccgccgtgcagccagcgagccagcgagcgagcaagcaagcaagcaccggaccccggccgcgccttcagctacggcccgagcgagcccgccgccgccgggcccggccacagcctgcagcggagcccacgagaggcagcgccatggcggagcagacctactcgtggtgagtgcggggctccgggaggccgggaggcggcaagggtgggggtcggggcgccggcgcggcccgccgaggggaagaggaggaagaacaggtgcgtgtcgtggggggggggcgcgggttggggtgcacgcccccctcttccccaccggagggggcggctggcgcgcacggagggcggtgagtggccggggacctggcgtccgagaaggggaatggaggaggaggcagcggcggatgtcatctggctatgggcggagcaggtgatggagaaggggagcatgaccccgggggtgggaatcccacggatgggaagttgaatccgacaggcaccccggaactgactcgtgggggtgtttcctgggcaggaggactcgaaggggtggagagaggcaggccagggcaaaggtgggccgctgggctgagaggaagctctagtgagaacaggtgatagaggcagaacttctaagttgggagagtggagcggccgccgcttggctctgggacagggagcgcagggagagttggtgaggtgggcagaggcccgggagtgaggggaggaaaactgcgggggtagagtccacgaaccttggaggggagtcactggtgaagaggttggaagaggagcctgaagaacctgtttccttttccttctggaaaaggaattcgttggtgacagtggggcatgggcagagtctttgtaagggttggtactattattttcagaggaatggcgcccagggccaagtgtggaggtggaggacctgcaagttaagttcatttctgtggggcttttaaagttagtaagtagctcgttaagggccgagaagcgagaagctactgtgtagtttatggggtgacaacctacatatccggagaagggagtgccagggtttgggggaaggaacatgaggggtctccctttagcatgtagaggtgggatatttgcaggacgggttgaaggaatgatggcagtatccatgaagagtggaaatcgggtagtgaga

SEQ ID NO: 5795 - DNA, 6000 bp, Homo sapiens
gatggagtctcactctgtcgcccaggctggactgcagtggcatgatctcagctcactgcatcttccacctcctgggttcaagcgattttcctgcctcagcctcctgagtagctgggattacaggggtgtgccaccacacttggctaatttttttttatatttttggtagagacagggtttcaccatattggccaggctggtctcgaactcctgacctcaggtgatccacccgccttggcctcccaaagtgctgggattacaggcctatagtttttgacaaatgtatgtggcatgcatctaccattacagtatcatatggagtagtttcactgccctaaaaatcctctgtgccctgcctactcaccccttccttctcactaacccttggcaaacactgatctttgtactgtctccaccgttttgccttttccagaatgtcatatggtaggaatcatacagtagggagctttttcagattgcttccttctcttaggaatgtgcattgaaggttcctccgtgccttttcatggcttgatagctcatttcattttagcactgaataatattctgttgtctgggtgtaccacagtgcatccattcacctgctgaacgacatcatagttgcttccaagtttaggcaattacgaataaagctttattttattttatttttgtttatgttttagtcgataaatcattttacatgctcatggggtatgtagtgatgtttcaatacatataatgcatagtgatcagatcagggtcatgagcatatatatcatctcaaacatctatcatttcttcgtgttggaaacattcaatagaataaagcttccaggctgggtgtggtggctcacacctgtaatcccagcactttgggaggccgaggcaggtggatcacctgaggtcaggagttctagaccagcctggccaatatggtgaaacttcatctctaccaaaaatacaaaaattagccaggcgtggtggcatgcgcctgtaatcccagctacttgggaggctgaggcaggagagtcactggagcctaggaggtgggggttgcagtgagccgagatcacaccactgccctgcagcctgggtgacagagcaagagttcatctcaaataaataaataaataaattagccgggcatggtggcaggcttctgtaatcccagctgatcgggaggctgaggcaggagaatcacttgaccccgggaggcggaggttgcagtgagctgagttcatgccattgcactccagcctgggagacagagtgagactccatctcgaaagtaataatgataaagcttctataaacatctgtggacaggtgtttctgtagacgtaaatttttacttcctctgggtaaatatcacagagtgtgattgcctgatcatgtagtaagagcatagttagttttataaaaaaacctgccgaactgccttcctccctagctggactgttttgcattcccagcagcaatgaatgagagtccctgttgttcctcatcgctgacagcatttggtgttgtcagtgttccagatctcagctattctagtgtgtgtgtattgatatcacattgctgttttaatttgcatttcctttatggcatatggcatggagtgttttttctttctctttttttttttttttgagacagggtctctgtcgcccaggctggagttcagtggtatggacacagctcattgcagcctcaacatcccaggttcaagcaatcctcccacctcagcctcctgagtagctgggactacaggcatgtgccaccacacccagctaattttttaaattgtttgtagcaactgggtcccactgtgttgcccgggctgggttcaagtgatcctgccaccttggcctcccaaagtgctgggattacaggcataagccacattgcctggacttccttttgtaataatagctttattgagatacactgtacataccatacaattcaccaaattaaagtttacaattcaagagtttttagtatattcacagagttgtgcaaccatcactacaatcaacttttagaacattcctcacccaaaaagacaccgtatccattagcagtcactcacacaatggttcttagtccaagtttaccagagccagtctctgtgactaggctggggatgcaaatgggaccactcaagccagttggctgccacatggcagccggggggggggggggggtggaaaggatgctgggaaggcagtgactggtggcccactcacctgtgcctcacctgtttcaccctccccttgtcacaaggctgacagcctcctgcagtgcacctgacattgcagcttaccttccccgcctcaccaagctctcattctaagattgtttcaagtgcaaggagagtgggccagatatgtgaaagggacgcagtggccaggatttgagaagcccatccttggcagaggtgacaagctatgcaaaggtacagagaggccgggtgcggtggctgatgcttgtaatcccagcaccgtgggaggccaaggtgggtggatcacctgaagtcaggagtttgagaccagcctggccaacatggcaaaaccccatctctactaaaagtacaaaagtcagccgggcgtgttggtacatgcttgcaatcccaactactcgggaggctgtggtgggaagaatgcttgaacccaggaggtggaggctgcagtgagcctgggtgtcagagcaagactccatctcaaaaaaaaaaaaaaaaaaaaaggtacagaggaatgagagactggagagcttgcaaacttgatcgctggaaagcaacatccatgtgaagaaatagcatgtgatgaggccgaattgtttctgtccgtttcacatttctgacagctcctgttgatttttgctatactatgctagtagttacataaaggttcagtcatcccatctctcctaaaaataatccttgttctcctttactgaaagtttatcacatgccaggggctgccctcactggccttgtcacattttacctttacctgatgcagtcgatatctttattaccccatttctctgatgagaaaacaggctcagataggcaaagtcacctctttaaggtcacacagcataaatgacagagcccagctctgagtgactcctgctttttggacagtccatccaagatatcgtcttcaagtacaattagatatttgcctttgtttttgcaccaatagtaacatggttcaactttattctctccttggtttttactcaatacatttaggaggtcattccatacctttatataactctatgtcttctatttttttttttctggctacagagtattctgttgaacaggtgttctctaattatttggccagttccctatggaagggtatttaggttatttccagacttttgctactgtagtaactacctttaagctagtaccttagctcccttgcacaagtctatctgtagaggaaattccttctgggttaaaaaaaaacatagtgttgtaagttctgaacaaattcccctctaaagaagctgtcccaccaagtagcagaggacatttccaattcagagagtgctccaaaaagcctctgttcagggctgggcacacatggctcacgactctaatcccagcagtttggaaggccaaggagggcagatcacttgaggtcaggagtttgagaccagcctggccaacatggctaaaccccatctctactaaaaatacaaaaattagccaggcgtggtagcggacacctgtaatcccatctacctgggaagctgaggcaggagaatcacttgaagctgggaagcagaggctgcagtgagctgagaactcgccactgcactccatcctggagtctctgtctcaggaaaaaacaaagcctctgatcagaggatccagggatgtgggcagttctagccccacctgctgcccctctgggccgtaagtccactcccccacccacttcccacggttcaggccacatggacccttttctggtcctcaagtggccaagttggttcccacctcagagcctttgaacttgcaggccttagcgtaggatgttcctccctccccgtggctcacgccttctcacctttcacttacacaattttatttattttactgcatccagtacctgaatggccttatgcacttacttgctgatgttctgtccccttcacgccatgaaggctgggagttttctgtcttttcacacacagctgtgttcccagcacctggcagtcactgaggacatatcgctgcctcccctctccaatgccccgaatccctgatcttgcaccaattttctccgtaaaatgtattcccttccaatatatctcatttgcttatatgtgttgtctgacaccctcactagaatgtcagctccagaagggcaaggatcttgttttgttaattgtttaatttcaaatgcttaaaagggcatatggcacgccgtaggcactggataaatatctgttgggtgaacgaatgaaagaataagtgaatgaatgaggaccataacccaccctcctggactggctggctgtccctccagggaaaaaggccagttaaaaagctggcctccttcaggtgaaaccatttccgtcccctcaggatgggcccgtggctccaggtggaggccagcacgcagtgtggagggcctggttggccagatgtgggaggagtttgccacaggtgagcaggtggccagctgtggccccgcccccaggaggcccgtccccacccggaggcttcgccagccccctcctcgggggccccgccccgtccaggaaagcccgcccactcctcctgaggccccgcccctcccgggaggctccgccggtccctgccccaggatccccgccccctccgtcactgaggccccgccccgtccatcagcctgtctcaacgcacgccagtctcagctccgaccttgcagcggcgcagcgcgggtgggaggcggggaggagcagcgggaagagcggagcgaggaccgcgtccggcgcagtcttcaatgagcagcgcggaaactgcaccccagacccgagcctgctgcgcgccccctcccagagctcacctggtgccaggtaacaggtaagggcaaggcaccctagacccctggttttgggacctttccaggccagggtgccaggccaggcacgcgttggggggcgtctgggcacccctgcctcggtgggaataggcatctcggttgaaggtgggagcctccctggagccctcccggagcccgcagccgcagctcccagcccccatccctgcagcatcctttccgcgcccgtagggcgaatgttgccattttttttaacccccaaggcgccgctgcctcttggaaaatgtgggaggtgttggaggatcctgggatggctgtcgttcccccaggacggggctggcgcgccttctgagggctcccactgtccatgtcagggcttcccagggatcctgagcaccagggctttggcagaagcctgggggatctggcctgttcctgctgacctgggcaaagcccttttctcagtctcctcagcaggccagtgggctgccgctgctccccgccatccacgctggcagtgaggcctgtaggttcccaggggagcctcttttatttctgggcctctggaaaaaaaaaaaaagcctcctcccccggcctgacattaactgagacagctttaagctgggctgacaggatccccgcctctgcccattccccttttccggatagtgcagggccgggtgacaagaggaggcttggagggagggcacctcgcgcctctctgcctctcctagagctgagagcacctgagacagcttctcaagtcccagagtgaggctgggccccacgtgggctgccagaggctcagcagggatgaaatcaggatggacccacgcagacccagcccgctcctgccccagagccagggacccccacagtcaggccctcccacccagcaggcctctgtcagtcagtgctttgctgc

SEQ ID NO: 5796 - DNA, 6000 bp, Homo sapiens; identical to SEQ ID NO: 1761

SEQ ID NO: 5797 - DNA, 6000 bp, Homo sapiens; identical to SEQ ID NO: 673

SEQ ID NO: 5798 - DNA, 6000 bp, Homo sapiens
catatatgtatatattgtgtatatacatatatgtatatattctgtatatacatatatagtatatattgtatatgtactatatacagtagtatatacacaacatataccatatatacagtagtatatacacaatatatactatatatacgtagcatatataagatatatacgtagcatatatacgatatatactatatatacatagtatatatatgatatatacgatatatactatatatacatagtatatatatgatatatacgacatatactatatatacgtagtatacatacaatatatactatatatacgtagtatacatacaatatatactatatatacgtagtatacatacaatatatactatatatacgtagtatatatacaatatatactatatatacatatatacatacatacatatgtgtatatatactacatgtatatactatatacatatgtgtgtatatactatatactatgtagcatatacatactatatagtatatactatatatgtgtatatgtagcacgtactatatgagtatatatagcatgtatatcctatatgtgtgtgtataccacttgtatgtactatatgggtgtatatagcttatatgtactatatgtgtgtatatagcatgtatatactatatgtgtgcatatagtatgtatatactatatatttacagtggatgtgtgtgtatatatatattatatatattatatatataatgtatatataatatataatatatatatataaattatatatattatatatataatgtatatataatatatataatatatatataaattatatatatatgtaatatatattatatatatatttagacagggtctcattctgttgcccaggctggagtgcagtggcacaatcacagctcacttcagccttgacctcctgggctcaagcaatcctcctgcgtcagcctcctgagtaacctacaggcacatgccaccatgcccagctaatttttaaaaattttttgcagagacagtgttttgctatgttgcccaggctccagtcagattttctcgggaatgtaacttagccctttgtttctcttttctttctttctttctttctttctttctttctttctttctttctttctttctttctttctttcttccttccttccttccttccttcttctttctttctttcttccatatttcctttctccttccttccttcctttctttttccttttttctccttccttccttttttctttcttccttcttttttccttcttcctctcttttttccttcttcctcttcctctgcctctttcgcgttttcttctttaagttttttaaacatttatttatttatttatttattttttagaaacagggtcttgctctgtggacccggctggagagcagttgcatgatcacagcttactgcagcctccaactcctgggctcaagcaatcctcccacctcagcctccatgtagatttcattcaattttagtgtttggctgttatgatggtgttttgaacgcactgttgtgatctggttgatgttttgaccccaaaaacaccttgactgcatatgtatgtatgtaatatgaacaaaaatgataaattacacattattatttatcaggggaaattcagccagatattgggcaaaattcatccccaatatttcacgtaggttattttctatttcccctaagtgttggccggtctgagaaataaagggacagagtacaaaagagagaaattttaaagctgggtgtctgggggagacatcacatgtcggcaggttccgtgatgccccctgagccataaaactagcaagtttttataagcgattttcaaaaggggagggagtgtacaaatagggtgtgggtcacagagatcacatgcttcacaaggtaatagaatatcacaaggtaaatggaggcagggcgagatcacaggaccacaggaccggggagaaattagaattgctaatgaagtttcgggcaggcactgtcattgataacatcttatcaggaaacagggtttgagagcagacaactggtctgaccaaaatttattaggcgggaatttcctcgtcctaataagcctgggagggctacaggagactggggcttatttcatccctacagctgcgatctgtatatacatatagcttgtatgtactatatgtgtgtatatagcatgtatacactatatgtgtgtgtatagtatgtatatactatatatttatagtgcatgtgtgtatgtgtatatatatatttttttagacagggtctcactctgttgcccaggctggagtgcagtggcacagtcacagctcacttcagccttaacctcctgggctcaagcaatcctcctgcctcagcctcctgagtagtctacaggcacatgccaccatgcccagccacccccaaagcggccatttcagaggcctaccctcagggatgctttctctttctcagggatgttccttgctgagaaaaagaattcagcaatatttctcccatttgcttttgaaagaagagaaatacggctctgttccgcctggctcaccggcagtcagagtttaaggttatctctcttgttccctgaacattgctgttatcctgttcttttttctaggtgcccagatttcatattgttcaaacacacatgctctacaaacaatttgtgcagttaacaaaatcatcacagggtcctgaggcgacatacatcctcctcagcttacgaagatgatgggattaagagattaaagtaaagacaggcctaggaaatcacaagggtattgactggggaagtgataagtgtccatgaaatcttcacaatttatgttcagagattacagtaaagacaggcataagaaattataaaagtattaatttggggaactaataaatgtccatgaaatcttcataatttatgttcttcttccatggcttcagccggtccctccattcagggtccctgaattcccacaacgattattcacaacttcattttttttctctggcaggataaggaaagttttgaggttgggcatggtgggctcatgtctgtggtccctgtgcttttggaggctgaggtgggaggattacttgagcccaggagttcaaggcggcagtggactatgaccatgccactgcactccagtctgggagacagaataagactctgtctcaaacaaacaaacaaacaaacaaaaagttttggttgccaattcaacaccatccagctgctgccaatattatcatatgtttttgaaaaatccactgggagagagggagaaacgagggagggcccagtatttaccagagagggagaattaaaatggtggtggcagaggcaagaaggccgaaagaaaagcacttgcctgttgcggggtccaggaggcattctggtggggaagttcaggatatggagagaaaaaacatatcttttttttttttttggagacggagtctcgctttactgtccaggctggagtgcagtggtgcgatcttggctcactgcaagctccacctcccgggttcaagcaattctcatgcatcagcctcctgagtagctgggattacaggtgcccgccaccacactcacctggacaactggctgtcaagaccttccatcgggtaacagaaccacatcacacctagaaccaagtccaaaacgtcctgttttttaatgtgtagcctgttgctctcaagcagatttcttagcgctgccttctggtcagaccaaagccacctcctccaggaggcagtaaagactttaaccttgtttaaaaacaaatctggccttgccttctcctcctggaaggcaatctttgtttgcctgggagtcttcggctagccagagagtaacagtgtgatttatggtgggggcttagggttacatggatatcacttaaccaagaggctgagatcaagcatgaaagcaatcaaacaatcaatcaatcatgcacatgcaatggagcccagtaaacgttctgcacactgtggctcaagtgagcttccctggctggcagtacttcgtgtgtaaggccacacatcagtgcagggcaagtaatgaggcctgactacacagggagaggaccacgggaggaccttgaagctgcacgccgtaatccccagactccccctctgcccttcttccttggctgatgttaatccgtatcattttcctgctaagaaaccatagttgtgagtacagtagtttttagtgtattctgtgattccttctagcaaattatggaacttgaaggtggttttggaaaccgccagaatttgccgttggtgtcagaggtgataatggtcttggggactgttcccccaacctgggtagttcacctaagctcctgcaccttcatgacgacctctctgccagttccgtgcccatgcccttactttcttttctcatctatcatttatttgtctgtgtctgtattgcctgtttctcctgccagaatggtatcccagggctgggcctgcggacgctcttcccgttaccgccccctgccgtgttatgctccgtaagcatcatgtgtggtacacgatctcttctccttcattcacacccgaggctgcgcgtggacccttaaagagaaggttcggcatatgtattacccaaagctgcacccagcacattccgggagctttgctcttttgtcactattcgttgaatgctctatattttgataaataaaacaatgagtgtgaaagcataaaagcagatcaagggacaaacagcacgtgtagcggaactgccagcctggggctcggccggaccccgcccctccccgcctaggccccgcccccaggccccgcccctccgggctcccgctggaaagcgctgccgccgtgtgggtgggtgcggggcgcggcgcgggccgggcatgcgcagagcgcgcggggcgcggttgccgtggcagcgccggctccagggagggctgctggcgccgggccgggaccgcggggcctgaggcggagaccggagagcccgaggcccggccggaggcagctcgggacaggcttgagcggcggggcgcgctgcccggccggcggggatgcgggaccggctgccagacctgacggcggtgagcggcagccgcgggtagcggttcaggcccggccggggcggcgtctggagggcgggcgggggctcggggcgtcttgggcggggctccgggagggtccccagggcggggatctccggcgttctggggcgggggctgcgggcagggtctcagggagtcctgagcggggactgctggtggggtccccagggcgggggtcccgggagtcctagggtgggggctccgggcggggtccccagggcttcctgggcggagtcctcagggcgggttggggcaggaggagggagcggggaaggtcccggcctcgaccccctcttcgagcgtggctccctgtccgtcactccgcttggcggattgtatctggcgcttacccagccggagcccactggcctaactgtggtccgccccacggggtccccgcagctggcgtcagccccggggagcaggccgggtcctcttggtcgctgctttatccctggggcttcacaaaggactgtgcaccaagcgggaggcaacagatgggtgtgaaatgtgggcaccttagagtgctgggtgcttggggtggggcgagcgcgaacagcagcttgtgtctgatctcccagtagtttgctttggaaactgggaccgtgtgttgactctgaacgcaccttacgcgcccagcagccgggcacacagcaagttactgtttactttagcaagggaaaagcaggtcactaaaaattttggaaggatttcgatgcattctacacgtgtaaaggtgacaggactgtgcatggtgcagtgacagcggaatgatagtgatggtcgtgcactttccaagcttgtctaacccaggacggcttaggccagcagaagtagttatgactttttccctttacaataca

SEQ ID NO: 5799 - DNA, 6000 bp, Homo sapiens
gagccatgtggcttttctgcaggaacagctaccaggtttctttcctcatcaaggttgggagctgcggccggttccccagctgacatcttcccgtttcacacgtgcccggctctgtccaggcctggggtctgtgccctgggaaggaaatgtctcagggggagtgggacccttgggtgagcaccaggggaatgcactcccactgggtggtctttgcctttgaagcagctctcccggcctctccgggcacaactttaagcaagcttgtccttggttcatggaagccaaccggaaagctgaggttcctgccctgtggcttcctgctgcaatgtggattcactgggacctgcggggcagagccggctcgatgccaggcagccctggactctctaagcagaaagagccttctcaggcctgggatccagctcccccttctcccactgtgcgggtggcctgggatccagctcccacacacacacctgggcacacacacatgcacacgcagcatctcacccacagacccagcacacacctggagacagatggacctcagacggaccccggcggcccagccgaggcgctcgtgtcacccatggctcctgttcataaggcgaagggcacgcgccgatcgcagacgatcacttccacacagacttgcattatgtgggtttcatttgcacgaaatccacctgggctggaccaggactccttcaacagcaagtgacagaaaatccatctcaaattggcttaagctagaaagagaggcagtggggagagagacagagaaggagggagggagggaagtgtccctgcaatgacaaagcctgaggaagccctggcgttggccaggaggattcacggctcaggcgatatcatcgggccagcgtcttgccagctctccgtgctcctcttggtcttgctggcttagcctgagcctccactgtctgcaagaggctgcagccactccagcctcacgtcctgtctcccggagcccagccaacctctcctggctctgattgggccgtgtgtctctccctgagcctattgccatgctgattggctcagcctggtcctgtgccctccccttcatccagggctggaactccacccagctacttagggagttcctgccgggctgagccccatgttttatgggaaggaggagggaagcggctgagcagggcaagagcgaaagtccactgcctggcaaggacagcctagacacgggggaaagaagggacatggaggggctgagccctgtcacacgtcatgccctgcatgccgggctggacatggagaagctgagcgtgcagtctggagctgaggctgggaagccctgatacatggcttagaagtgagttggtgacaactggacggttccccagcaggggcaagcaccagagtgatgggaacagcccctgctgccaggagcccacggggggagtgtgcacgtgtgtgcgtgtgtgtggtgtatcctgtgtgcacgtggtatgttcatagatgtgtagtgtctgtgcatgtgtgcgtgtgtgtggggtatgttcttgtgtgtggcatatgttcatgtgtgcgtgtgtgtggtgtctgcttatgtgtgcatgtgtgtgtggtgctgtagcttctaattcagcccaagccacaacttagacttttaatgttacgttcaaacaaaaccatttggagactcacccacagctctgaggctttggacgacgcccgctcatcacctgccttcccctctgctgagtgcaatgaattcaagctccataaaggccacacatggagccctgtgtgcgtctacagttctgggtcccgagatgaggcggtgaaacagcaaacccacacccagaacccctgccccaggagccccagccagcaggagagcagggcaggggtgcaaagagcaagccgggggtgggggtgggagaggcagagcagcaggctggaggccggggctctggtgggattttacgttgagcacggggtgagcctcttgaagggtgagggcgtgtgtggccatccaggtgggggtggggagcgcaaaggccctggggcaggagcaggcctggagcgcaggccacagagccaggggccgggcgcaggtgagtgagccaaagggaaccaagaggggatggtggagggagcggcctggctgagcaacccggggctttgaccttctcaggggcaatgggaagcctggaattgcatgggctggtgtggaggtcaccgtgaccttgccaggcctgggggtgcagccgcagtgcccagggaggtgagaaggggctggccaggctgcctgttgtgaagagcggagaagtatgagagagatgtggagcagggcgtctggcttttctctgacctgcgatgggctggtgggagcaggagcgagctggcctcactgtgaatgtgaaaatgctggttggagcacaccacggtgggtacttccttcaacggctaaatgcgccgaaggcctccaagcttgacagggttgaatttcctccaaggccctgggaggggcgccctgtgctccctggatggggccgacattcctggcctgtccccagctgcgtcgcctctgcccagccctcaatcactgcagctctcaagtggtcctgggtgccgtgatcttgctgaactctgatgctttccaaataccataaacttagtttattttctgtctgacagaaacggcgccacttaagtcctgcaaagaaccctcgggttccactcaggctgagttattcgggggccactgctgaacggtttgcatttgtttcctctgtgacatcggagtggggaggacgctgcctccagcacagggccaggggccagggctgctcacacagagctgctggagcctacagggtcccggctgtgggtcctgggctgcccgcccccaggaagggcaccttgccaccattgaagtggggcgagctgattcgggcacagctggaaaccaggaggcagccagcagcagcggccctgagcaagaacaggaaccccaggccgaggcgggcgcatcacacgagaccagcctggccaacatggtgaaaccccgtctctactgaaaatacaaaaattagccgggcatggtggcacccacctgtaatctcagctactcgggagggtgaggcaggagaattgcttgaacccgggaggtggcggttgcagtgagccgagattgtgccactgcactccggcctgggcaacagagtaggactctgtctcaaaaataaagaagaaagaaagaaggagagtccggaagccactgctgcccccaccagcagagtggaactgtgatttcatagaacagacacagcctggcagcgagaatgaccacagtgctcacagccactcaggtggaatctcaggaactcaatgtcaggaggaggagtggggccctaaggcccgtgtgcgggagacagtggccatggcgtcgagctcaaaggtgagccgggtgtggctggggatgggaaggcgtggcgcagagccacggggaaggcacacgaggtccagagacggcagcctgcgaagtggagggagggtggacgccggggtgatcacccactttcctagactgagcgttgggcacaggctttgtattgcttcattcatcgtcatatttgatgtatgtttgataaatatccctttaaaaattaaagacagtttgttaattgagaagggtactgtattatgggtaaaagaaattattttatgctaactagtgctgggtgaaaaatgaggtgtatgtgttccattatttccaatttaaacagcagtttgtctacaaaggtttgtgatgagtgtcaggtgttaggtgcacattaatggcatgaagtaagagcattctcctgcggaaaacacagaaaagtccagaaagaatgtgcaagcaacctgcccaggcacttccacagctgctgggtgtcacgggaagccgggaactaatttaagcgcccggcagtagggtggtggcgctgtgatattttcttctgcacaagtttgctgcaggggcatcgtggagggcctgtgtggagccaccgtcagaatgccaaggagcacctgccctgaccctgtcccgccccgcaccattgcccactctgtcccgttgagggggtgcttccctgggtcgttgtgagacctgggccaggcccacagggttctgctcgctcgtaacagaagcctgggtcccgtgatgagcaggcgtggcccacagaggggtccccgccgtgcatctgtccccacggtgcgtcccccgaccgctctggggctgctctgagttgggggagccgggcggggcgtgacggcattctcctctctcctgtctcctcctccccccgccctcgagcgcagcctctggccctggcagtggctggtgactggagtttggtcagttggcaaacgtgtccccaagggtcagagacacacacagttcacgtgtggccgccctgctgagaacacgtgtggccccacatggctgctgccgcagtaacacacacagcactgaagggcgcacgggggacgggccctcctggcagccacggcctcccacgcgtgggagcctccctgcacgttctgtgcggggctctgctcgccttggggccctggccgtcgctggccctgttgacttgggacctcggccaagcctgaacctgaaacagccttcggcagggtccatttacagaccccatgccggagcatcacggcaaggcacgaggccacagctgccccaacgccgtttgtgtctaaaaagcagggcacagcgccaggccagtgttttgtgggcagacctggagggacacttgtcacacccacgtcggcgtcacctcgggggacaggggcggggcctgagggtgggcgtcggagggaggcttggtggatctgtcctggcttcattgttttaaagaggacaatctcttaattttatggtgtgataaaattggttcaaaatgggataaagaaacctggaagaaacacacaagaaggcagatgtacaggtgtgcgggtgggagcggcggaggcagagtgacgggtgggagccgggcggggcgtggcagcgttctcctctctcctgtctcctcctccccccaccctcgagccctggcagtgacgggtgactggagtttcgtcggctggcaaacgtgtccccaaggctcagagacacacacaggctgttcacgtgtgaccgccctgctgagaacgtgtggccccacatggccactgctgccgcagtaacacacacggcactgaagggcgcatgggggactggcacagagtgacgggcgcagcgtctgtcatggagaagcagcggacggcggcagctgaggcacctgctctcccctctgcttgatttttaaggactgtgctgctgttgtctcgttctctctgcccctgtctcctccttccctcctttctccccctcgctgtctctctgctccatctcctccttgctctctctgaatctctgcctcctgtctcctctcccactccccttcctccctgtgtgtggcaatgactgaccgtcatctgcctcttatcttttctcccgctcttcctccctgatagaattctgaaatgtatctgggctccagccagagtgaagaccacatttcctggcatcccttgcagggtgtcgtggctgtggctgtggccgtggccgtgtccgtggctgtggctgtggccatggctgtggctgtgtggtcgggctctggccgggagatgacggccgacagctccacctgggacctcagacacatccaatccatttcttcttaaagaaagaattgaagtcaattgaagtcaaattgagttcctattgattacagtcgtagactcagaaccattatgtacgcaagagctaacgcgtgaagccagctgttctcaggggctcctgtccctggggttttatctccaggtggcacctggcagggcacagaggtggcatcacctgctgggtactccaggccccagctctctggtttgcccctgggcagggctctgtgaagc

SEQ ID NO: 5800 - DNA, 6000 bp, Homo sapiens
acaggtgcacaccaccacacccagctaatttttagtagagagcagggtttcaccatgttgcccaggctggtcttgaactcctgagttcaagcgatctgcccgcctctacctcccacagtgctgggattccaggcgtaagccgccacgcccagcaactccgtttcttacttgttggctcacattctcctgagaagtcctccctcaaccatcggcctgaaatagcagcgagcctccccagggttgcctctgccttttcttgactctttctgtcaccttctatgcttgttgtctggtccccactagaatataccttctgtaagagcagggatttgggacagtgcctagaatagtacttgcagacagtaggctacgataaatatgaatgacggccccatgcagatggtagcccctctcgctcgaacgcttcacccagttttattttcttttcatcagttaccgccctctgaaggtatccacacacaaacatgaaactggaccaaagcagggaccccccgcacgcagaatagtgctgggctcgcgtaaggcacctcagtgggtccatcagctgatgcatggacagacaaaatgggtgtatccagacactggagtatcgtgcagcgaggaaacgtgctgagtgtggatggaccttaaacacaccatgcaagtgaaaaggcgtcacagaaggccacatacgatatgatcccatttctatgaaatgtccagaagaggcacattcataaagacagaaggtgactgagtggttgtcgggctgggtggaggggatagggagtgaatgcaagaaggatccttctgaggtaacggaagtatccggaaactgggttggagtgatgggtgcacagctctgcacatttactacagtcgctgaactgcacacacaacacgggtatattttattgcatagaaattgtattaaagctgttaagaattttacttagattagcatttttcccacactgtgccatcaacttagtatatgattagattcattgtttctaactgtatttaaatttaatgtttgtcacattttgcttgctaaatttttaaaattttaaattactgtgggtacataaaaggtgtatatatttatggagtaccttgatattttaatacagacatacaatgtataatgatcaactcccagtaactggggtatccatcacctcaagcctgtatcatttctttgttaggaacattccagttccactctttttgttatttaaaaatatacaatacattattattaactatattcaccctcctgtgctatggaatactagatcttatgctaattaaatgttttccctatttctcccattggctacaccttaggatagtgcaatatgaaaatcaggaaactgagcttggtggagtgttttcttcattctgtcattttatcacatgaggacattcacgtaaccacggtcacaaaatacagaacagttccatcaccacaaaaatctctctccatctacccctttttagtcatccgaaccccaccaccactctataatgctgtcattttgtgacataagtggacacatcgtacagttcatgcagtgtagaccttcggagatgttttcctccctggatgtaatgccttggagcttcgtccaagttattgcacacatcagtggtcagctcctttttattgctgagtagtgtccatggcatgggtggtccacggtttgtttcaccacgtcagagtggcatgggtggtccatggtttgtttcaccacgtcagagtggcgtgggtggtccacagtttgttttgccacgtcagagtggcgtgggtggtccacggtttgtttcaccatgtcagagtggcgtggggggtccatggtttgtttcaccatgtcagaggacattttggttgtttccagtttggggtcagtaatgtacaggcttttgtgtagacataagtttatttctctgagttcaatgtctaggaatgcagttgctgggtcataaaattgtttactttttgaagaaactgcccaactatattccagagtgggtgcactattgctgttcccatcagcaatgtataagagattagttactccagaatacattattcccagcatttcatattgccactgctgtatattatttcagctgttctaataggtgtatactaatatcccaaggcagtctttttttttttttttttttgagacagagtctgactgtgtcacccaggctggagtgcaatggtgtgatcccagctcactgcagcctccacctcccaggttcaagcgattctcctgcctcagcctcccaagtagttggtattacaggtacctgccaccatgcccagctaatttttgtatttttagtagaagcaggatttcaccatgttagtcaggctggtctcgaactcctgacctcaggtgatccacctgcttcggcctctcaaagtgctggaattacaggcttgagccaccgcgcctgacctcaagatagtcttaatgtgcatttctgtaatggctagtgatgctgaacctggtcacaagcttatttgccactcatatatccttttagtgaaatgtgttttcatgttttttgcttgtcttctgtttgtgtgtgtgtatggtttttttttttttgagatggagtctcattttgtcacccaggttggagtgcagtgacacaatctcagctcactgcaacctccgcctcccagattcaagcaattcttgtgcctcagccacccaaatagctggcattacaggtgtgcgtcaccacgcctggctaatttttgtatttttagtagagacagggtttctccatgttggccaggctggtctcaaactcctggcctcaagtgatttgcccccttagcctcccaaagtgctgagattacaggcatgagccattgtgcccagaataattgtatttttttttactgtcaagttttgagagttctttatatattctagctactagtccttcaacaaacgtggtttgaaaatattttctcacagtctgtaactcatcttttcatcctcttaatgtggtctttctcacaaggttggtttgtttgttttgagatggagtctcgctctgtcgcccaggctggagtgcagtggcacgatctcagctcactgcaacctctgcctcccaggttcaagtgatccccctgcctcagcctcccgagtagttgggactacaggcacacaccaccacgcccagctaatttttttgtatttttcatagagacagggttcaccatgttggccaggatagtcttgatctcttgaccttgtgatccacctgcctcggcctctcaaggtgctggaattacaggcgtgagacactgtgcccggcttttttttttttttttgagacggagtcttgctctgttgcccaggctggtggcacgatctccgctcactgcaacctctccgcctcctggattcaagcgattctcctccagcctcctgagtagctgggattacaggcacatgccaccatgcccggctaattattatatttttagtagagatgggtttcaccatttggcctggctggtctcaaactcctgacctcaggtaatccgcccaccttggcctcccaaagtgttgggattacaggcgtgagccaccgcatccggtgaaaagtttctaattttttcatgaagtttactctatcaacttcttttgtgaattgtgtttttttggtcagatctaagaactcttccccaagctctagatgtgagaaattctgttttcttctaaaagttgtatattttacgcctcagtctgatcattttgtgttagaatttgcatttgcagataacatgatggcccatgtaaaaaatacaaggattttacaacaacaaccgcaaaacaccaaatgaaccctcaaactaatgagttcagcgaggtctcaggataagaaaatcaacatagaattcatcacatttgtgtagaccaacagtgaacacgtggaaaacgtcaaaaacgcagtgttacagttgtttgatgtgaaatactataaacttaaaaggtgcagaatctgtatgctgaaattacaaaatgctggtggaagaaatcaaaagaccgaaataaatggaggggccaccagggacgcagatgaaggaccgagtcagcgatgcccgtgctccccaaacgatctgcagcagttcccatcaaaatcccagaaaacttcgtagactgaagcgtattccaaaatccgcagagatgagcgcaacatcacagaggaccccgaggcgccctccaggccatttccttcctgacagctggaagagcggcctggcggatgagggaaggtggaaagccgttccccagcggccagcggcccgcgccgtccagctttgccctttttaaaggggaagcaaatagggtccaaagcagcgtcgcctttgatctggcacctgaagcgcgaagggcgccggccgggtggaggtgcggggttggggcggggacccgactagggcgggcggggaagtcacgcccacaccgagctcggccgcgcccatgccgagccccggccacgccacttccgccggaagctcggttcagcttcctgaaagagttggtcctgcagttccggaagttgcgtttctactagggaaaggtccgcaaactcttaaggtcactttctgaaggcggcctcatcacagtcggaggtgagctcgatccggaccctgtgggcagagggtccccggccctagggtggccacttgaagaagaggaggacgttctctgttccggaacgaaagtagcgcgtgcaggctgtttccggggacccgaggccgatgcaccgctcgccccgcccctctcacggccacgtctccgccggagcatccgggccgggcggcctccggggctgccagagcagcagggtgaggggctcggaggccgcggcgcctcggggctcgggctcccgctcccgctcccgctcccgcagtgcatgggcgggggaggctcgaggggcggcggcggggcctgggcgcgtccctgcagcgtggcgggacggccccgttccagtcacccccgcctcgctgcggtggcctcgggcctgggcgcccgccttcagctgcggcggagctggctctgtaaatgccggtgcccgcgagccctcctgaatgcttgtctgcgcccgacgagcgcggcctgtcccgaagctgtccactgccaccactcgggcagtgcttgctttagcctggccctttgcagctgaaaggcgtgacatggtgtcgggtggttcgtgggaagtcggggtttcaggagtccgtgtacttccttgtttgtctttgtcgctggccgacttgtcttcattccaggtggccagagcgagtggggccgggcgttgtcacgggtatgaacccgacgaatgtcagtcgtgtggcgggtcctgggtattgtgggtctgggtcactgcccccgcggagcccacctaggacagggacacccagggtcgccagcgagagggtaccgggcggtggttgggtggggtccgctactctaagtgggagcctggggggcgggcgacttccgtgctaaggcctctatgacgagaagcaagccaggcaaaattgtgagaaaagcgcgcctcaggcagaaagtttgaagaccctgagggcggaggatgtggccacagtgtaatggcaaagggggaaagcgatggcggtaaggatgttggtgtaggcaggtgctggattcttaagaggttggagtttattgtcactgggccagtgtaagccatttacagatgactcatggattttttttttttttttaagagactgggtgtgttgctgtattgcccaggctggtgtggaactcctggcctcaagcgatcctcccaccccagcctcccaaagtgctggtgttacaggtgtgagcagccacacccgtcgtcgtggattattttgaactgtcttttaaacgacatcaacatagcgctttataaccctttaatatcttttcaggcagtataccttaaatggcaaga

SEQ ID NO: 5801 - DNA, 6000 bp, Homo sapiens
cctgtctcacaaaacaacaacaacaaaaacaagaaattacccaatcattcatcaataggtgaatggataaacaaatggaatactacctagcaacggaaagtgacgaactatgatgaatgcaatagcatgaatgaaactcaaaaaccccatgctgagagaaagtcgacagagcaaaagagtacatatcgcacgattccattaatgggaaattctagaagaggcaaaagcattctatagtggcagaaagaatatcagtggttgcttggagccaggcttgggagaggaaatactgactccaaataggcacagggggattgcggggggtgttggagatgttgtatattttgactgaggttatgcttccacgggagtatacatttttcaaacctcatttgaactgtacacttaaaaagagggtgcattttatataaaatatacttcaataaagttgtttttctcaactactaaaaaagttcagagaagcctctaatatatgtccatgtacataccacctaggattcataaatgttaaatgttttgttacttgcttcatctttttcatatagaagaaatgaaatattacagataaagatgatctctccatagctcccaggcttattcttcaccccttcccaccggcaagtacattcctaaagttgtatttatcctttctgtccatctaaaacatgtattcaccgacatcttcattttattgatgaaggtatcaaagcttaacaagagctaatgcataagccatagataaacaatgcctttgtcagcagcacagccagtaatgatgttctatcttaagttcaatctgcaggactatgttatctaatctgcgtttgaggagctgcgaatgtaatttatgtaattattggagtgtttatactggtctttctcttcagtttttttttttgttttgttttgttttttttttttttttttggagacggagtctcactctgtcgcccaggctggagtgcagtggcgccatctctgctcactgcaagctccgcctcccgggttcacaccattctcctgcctcagcctcccaagtagctgggactacaggcgcctgccaccacgcctggctaatttttttgtatttttagtagagatggggtttcactgtgttagccaggatggtctcgatctcctgacctcatgatccgcccgcctcggcctcccaaagtgctgggattacaggtgtgagccatggcgcccggccctgattaatgtagttttaaacaacataacaatttgatatcagtgattcgtttaattgcaattaagatggaatacagatatttatgtatttccctctaattttctcaagtagattactagactatttgcaaagcatctaacaccactgaatcctaaatagctggctggatttcactgttctatggacactatatgagacaaccagagggactgatgtgacgacattccttgccctttcttttgatttatcttttttatggtgtatcttctatgttgtccagatttccccctcagttctaatgtttatattttgaaagctgataaatattggagctgaaaagaagagtttaggctagaattaagtattttgtaataacgaagctgttaatttccctttgtaattttttttttttaaactcacagacacaggtctctgaaagaacactctaattctggttttcactggcgaagtaatttgtcttttttccttcttaaaaatagatacgattctgataagaaaaatgatagcttgtcttttctctataagagaagcaatataaaccagtttcaaactcaagtttaaatttgcactgggatctagggtattttttctttcagaatttgaaagttggctcggtacaatggctcacacctataatcccagcactttgggaggtaggaggattgcttgagcccaggagtttgagaccagcctgggcaacatagtgagactctctttttatgaaaaaaaaaaaaaatttaaagctgaacgttcatttgcttttagctttagatacatattcttcttcttctttttttttttttttttagagatggggtctcactctgttgcccaggctggagtgcagtggtgccatcatagctcactgcagcctggaactcctgagcccagtgatcctccagccttggcctctggagtagctgggactacaggtgcgcactaccatgccttagatacatatgcgaatctcattggctattgccttggatatcacaatggagtttaactctgtccatcatgtcagcaatatactatagtgtcactggagccacaactggattatggatgtgactcacctagtgatgcgccatccttttcaataacatctgataattgcagagatgactacatcagactagttgagccacagggtactgttgggtcactggtgactggcatgtgggataggggtggaagggaatctttttttggtgctgcagaagataaagggctctaccctcctgtggagtagtgtgataccccaagaatggagagaacagaaattctaagatacgcagctgatgctggaggttagagaattttactgagtttttcttgttttttggacagctaatcagaagacaatatataaagtttagtaactgaagtatggtcagggagagggcctgaaaattctgctttggaatatttaatggtgacatttagataagggttaagggtgaagccagccttatggatgtggggatcaggggaatgttcctcaggtgctcaggtcagggacagtggcaacatcctcaatagttaaggaggtgtgggtattttgaggaaatgatgtggtttgtttcatcactatataagcatcaggaactggcagtagtgatatgtgaatgggatcaaggtaaccgagaacaagatgtgaaactttagggaaatggtaagtctgtctttcatctggttcagcacacggtgaactgttccagaggtagcttcttaaagcccttcgttttgtcaaaccagaatcttttttttttttttttttgagacagagtcttgctctgtcacacaggctggagtgcagtggcacggtctcagctcactgcaacctctgcctctcaggttcaagtgattctcctgcctcagcctccagagtacctgggattacaggcacgcgcgaccatgcttggctaattttttgtatttttgtagagacggggtttcgccatgttggccaggctggttttgaactcctgacctcaagtgatctgcccatctcggcctcccaaagtgctaggattacaggtgtgagccaccacgcttggcctggaaaccagtctttaagagaaagggatgcaggaaagattggagatctttgaagaatctctttttaagaaaattatctttttcgctctagttctgtcacctttagtagactctttattaagcctaagaatcttatacttcttatctctgttctatgtgagttggtataacgggtcaaattcacaatccagaaatgcctgtattgtttctgatgtgctgaggaggtgtacaattgtcttccttgatttcaacctcaaaagctttacatctttacctgggaacatagaagtcattattattatgtctttcacaaattatgtaaacttaaaaaaattatattttcaatgtaaaccactccttggaggaaattagttcctttaacatttatttcctaattttaatttctactagttttatctctttcaagcttaaatgagtgggccttagttctgtattattgccatcttaatcatgttctttgtgattttagtagctttactttttaaaacttacatttccataatgaagacttctgtatttttgtttttttcgtcatatatccgactccagctccctcaagacctgtcagcttttccctgcaccctttgttatctcttgctgtggtccaaaggtaaggacagtaagccgtgggcacagactttccctaaatcgtatggatttcctttagtcaataacaagaattttgatagttaaggcatttacgccttaagaatgtgataaattccccctcctactgaatgtaaagaactatttttctacgcagactaactcttatattcacttttcttatagaataagtacgtaaccaaatctgttcttggcttctaagaagttagaactcaacgtaaagatgacttgtggaaaattacttactcattctgggtaaatggacgcaggtatttagtgcttaagtaggttctgatataccattacattaacatcattttaaaaatcgctctgaattatatgtattttaagagtgactgggttttaaaaaaaatagaagtggtagagcataaatcataatctttaataaggtaataaaaggcaaacactattgctctgggcaaaactgggctaatgcttttggatttctttccgcagtcttcacagacgacgctcagcatcctatcagcccttggcagagacacacgatccagcctaaatcctcaaattctggctcttgcccaaagtgtgtagccagtatccatagagactgcgaaaagcatccgcgagccggggcggccccctcctcctcagctccaaattgcttcctttttcggtgggagaaaaaactccgaggagttgtgtgagcgcctaaggagcgcacgctcctccggccctcaacacccagtatagttttcgctaagttcctggccgaaccacagctcccacgatgcacccaggttttagagcggtcagaggggcggcttccggtttaggacagcgcggctgcgcacggcgtgtggtcttattggctcgaaccgcctcgtgcgatgcgcgtcacggcgacgtgcggtcgtgggggcggggagacgcggcggcggcggtcgctgtcgcggcggcgagagcgcgattccagaagcggcatcgcggcggcggcagcggcggcggctacaccgggcttggccccctccctcctccgttcccccctcctcccccctcccctcagcggtggctcccaagaagtccgagacacgcggtgaggcggcgacgggctccgggtgagggtctctggagtgtgggcgccgtttcctgggcgcagagggagagcttggggtcggggggaggtgagagctgaggggcgaatgtccctggcgcgggcgggagagcgcgctctcggcccggcccgcaacttgattcctaactctgacctgccgcccggcgcgccttggcctgagggtcggccgtgtggggacctggagccgccctccttgcgaccgctgtcggaggagtccggcgcccgctgttcccctcgcctcgcctttcgcggcggagggtcggagcctgctgccctctgctcaccttcgggtgcagttgctccagctccctgcccgcggagaggatctgcccgcccctcttcgtctcttgtctgtttttatcacttctaggaatttgtttggtggaggcttgggatgggctctctcagcgctactttcacagtgactggggtggggaagagttccctcacctttttcaggtggcgcgtcaggcagcctgcttggtacctggagtcctgttttcccaagcccccgtccgtcagtgttcgcttcttctaaaattaccgatgacagggttataaatcagtttttagggggctcggagagagtttgggttggaaactgttagctcttttttcctcctggcttttgatcttgatttaagcgtttgcctctgaaattttgacaacttcataagatggtccaaaagtgaattttggtagaaagatttaaatgcacagttgggattttatgggggtacggtgacttcattgcaggttgttgactttttttttaaaataagatgttcttttaattttttgactctgggtttctgagccttggttattgtcccccatttctgttccaaaagcagactttttttttttttatcaccccttcccctcacccagagaatccctttaaacgccaagaaagctgtcataa

SEQ ID NO: 5802 - DNA, 6000 bp, Homo sapiens
cctggagtatggatggagtagggtgaaaatggagcttagcaccgcctttgggacactatcagcagatgcaaccccttgggctgtacccccgacagcgaaggtaggggaatgttgtttagaaagtcagtccacaaatgggtattctccaagctggttccctgaccccacactggacaagctgctatgctctctgccctcaggatgcttataaagtggccaagggtggataagataccaggagggaagtctcagtggtttgaataaccagcagttcctgctttacctttgatgcatcaggtgctgcactagacatctacttataggtgagaaaaacaaggctcggggggttcactgactccccagggtcatccagtttggatgccagaaaagggatgtaaactcaaatctggggcattccaaagtccgtgttctttccaggtggggaaacttgggtctgagcttcgccaggcctgctgggactcccagatcagcccctgccttccaggagctccgttgtgaaatgcccttgcccgtgtgatgtttgtgtgtgcttttttctgcaggaagtcttggccttctctccctccccatcctctcagcccgtcctgcccctgcccggagggctgtgtgcttcactggagggcctctctgctgtgaatgcacccccgctcctctccactgaccacatcctgtgcaccccgcttctcccttctttcaggtcacctcctttgatttggggaagggagtgagccattggcaggtgagagaaacctgtgctgaaaggtgtgggtgactttgggcttttgctcctgtggggaggtgttggctcttcccaggtgagaatatgccctagcccaggttgggctagggcaggaggggaagtacggtgccctgtcactcaaagggcacgggcctggccgccagcgccccggagtctggtgttgctccacatgggctggctgtgtgaccatgtgcacgtcactctgctttctgggcctgggtgcctctctgtagcgcaaggagttcgtgccagatgatcctggaggtcctttcagcccagcagttccgcggtttcagatgcctgcttgggaaattcattgcccactcgttccctcttcctttcctctgttgcctctttaaaatgaaggtttacttttcagctggtgttaattggaaagctttaatgtatgctttggaatgagtgggaggaattccaaggccataactccctgagccctcaagcgtggaaagttttttagtaagaacgagttcgaacaggatcttgggggcctggggacaggacacaaccttggcgtgctcattcacctcagggaacacagctggctctttggaacctggctgattaaacctggcaggacctgggtgacagaaacccagcagggccagagctcctctgtctggggacccttgtgccaccagcagccacagccttcccctggagcctgctctccccactcctgtgccagcccgtcactctctcttccccagctgtgccagccctcactctggccctgccccaaatacacgtcatgtccctctggcttgccttctttagctcagcccttccctgtcccctcctcatctctctacctattgatgtcacctctttccttttatgcccagcgtttcctttccactagcccaggttgggctagggcaggaagttgagcttggcacgggcctgggccagggaccacatacagtgtaaactggactgtggggctgggagggctaggggagcattgccgctgatcagtcagtcagttaatgttgaccaagcccccatcacctgcccgaggtgaggccgagctcttccagtgaatgaaaaagatgtacacacagcacttcccttgggggagctacccataatggggtagaccagcccccaggagggacccttacggagtggtgggtgataaactgcttctgtaagtcagagaggcggcttgggccttcagaactcaggtgggagtcagtaggcctgggtccagcctgccactggccactggctcctttgcaggttgtggctcagtcacaggacctgtctgagtttcatcttgtggaatgagaaggttggggtgggtcttcctgaagtcccttccaactctgcatagttaatagtcaccatttatcaagtgctttctgtgtgtcaggcggtgtgaaatgcttgacagacctaatcccatctcattctcccagagcgaggctcttttatttgccctcattttgcagatctcaggcttagagctgaggttgcaatccagtggcctctaggtctgatccaggccacagatgcgttttgtttgggcgcagctgacatactggagagatttttcaaaacaggggatgttggctttttttttttttttttttttttttgagacaggttcttgctctgttgcccaggccagagtgcagtggtgtgatcacagctcattacagcctcgacctcccaaactcaagtgatcctcccacctcagcctcctgagtagctgggaccacaggcacatgccaccatatctggctaattaaaactttttttttttttttttttttttttgtagagacaaggcctcactatgttttccaggctggtctcaaactcctgagctcaagtgatcctcctgccttggcctcccaaagtgctagggttatagatatgagccactgcacctggctgatgttggctttttaaagttggaaggtctagttacactgagcctgtgctgcccggtggcaacaattggctggatctggctctcaggcaccacctccacatggggctgtgctttcctgacccctcagtcttgacacagtactgggacttgcccttgtacacagtaacttcatgaatttatgttttccaccttgtaggtacttgagtttgcaaaccttgactgaaggctgtgatgttatactgtatcagtcacacagctactgttagggacagtgttccagcttgagtctgtctgactttaaactgtgaaccatcctgctgtttttctgagttctcccctcccctcccctcgttttttgtcttaaaaagagatagagttggccgggcgcgtggctcacgcctgtaatcccagcactttgggaggccgaggcaggcagatcacgaggtcaggagatcgagaccatcctagctaacacagtgaaaccccatttctactaaaaatacaaaaattagccgggtgtggtggtgggtgcctgtagtcctagctactcaggaggctgaggcaggagaatggcgtgaacccgggaggtggagcttgcagtgagcctgcactccagcctgggcgacagagtgagactctatctcaaaaaaaaaaaggagatagagtcttgctctgtcacccaggctggtgtgcagtagcacaatcatagctcactgcagcgttgatcggctgagtagctaggacttcaggcacacaccaccatgcttggcaaattaaaattttttttgtttgtatgttgtccaggctggtctcaaactggtctccttctgtcttggcctcctaaagtgctgggattacaggtgtgagataccacacctggccctgagttatttctaaatcctagcagggattttgaatcttttgtctgagcctaggagaccatagataaggaagttggcaagaacccctcttaacagagaggtttgagtccccgcatctgtctgaatgtgctcctgcagggaggtggcgtccacttttggatgttgctcatgttttagtccagagaaaaactgtcctcttgctacacagtatgtcctttctgaattaattaaatgtcattgttttttctctaccacttgttttcctacaccttggtttctatttactggcaggttgaaagcaggtgaccccgcctccttgcccctaggagggctgccaaaatgccaaacagagagcttgcgttttgccccaggcacttggaggcaggaaacagggatgtctgtttggacagtggatgcttcagggttggtcaggggtccctgggggagaggcaggcaggatgctaggcctcccaaacagggaggcggccccacagggagccctggtggagcttgaggcttcctgcatttagtgttggtctgtccagctgtttcctcctgatagagtggctggacaatgccacagtgactcaactccagccccgtcgacgaacaacaggagatttgtccagggttagctcgggagtggcgtctgcatccctcacctgcatccaagctgctagttgggaggaacctgttgctccttgaaccgcttccctgcttactcttggtgccctagagccctgtcccagttggattgattcaggctgtttctttttgatttccctgtagcttgtccttaacccttctttgtgcacagctgacctagagcttctgtggctctgtgctgaccagctgcccgcctgccgtcccaagcctggcattgccagacctcccttgcccttggcctgaggctcagtgggtttggcacagtccccgaaggttctgagtctctctccaggcattcagggcctgggcgagcttcagatgagagagacagctgtatgattcattaatctcctccagtgtgtggaggattaaacaattttttggtgggtttattattatgtattttttttttttgggaaaaattattacttattgagtattttctaaggctcctgtcatggttactaagagctttgcatgcattacctaccttaatccttgcaggcactctctgggagagggatggttactcccattttacagatgagtctgaagtccaagaggctagggagcttgcccaaggtctcagatccttcccacttcgtatcctgtgacacatgagttagggagggatgaggatgtgcggaagagtttaaaaaatagtttgagaactgttgatgaaggatgagaggtttaaaaggagctgtgcagggaggaggcagaggtgagccgggcttggtccttgcactcctggagtgcgggaagcaggcaggccaccagctgcctctgatgtaagatacaatgtggttggtgctagcagtggagctgccagggtagtttggaagcacattttcagctggtatatgagcaactagtagaagacacttcaaaacagaagtgagaaattcctggcgcacagaacggatttatctgtcagcatgacttaaactgtccatgtagaaaatactgagatatagtcccatttatgtctagagttgcaaaaatgcaacattgcttagaattatttttagtgcaattatttggaagtttatatcaaaggccttagaaacattcattcataattctgttctttggagtttataccaaagtagttatattttttcattgcagcactatttatagtagctaaaaattggaagcatactgaatgtctaacaatagaaaattagttatataaattttgatacattcttttttttttttggatggagttttgctcttgttgcccaggctggagtgcaatggcttgatctcgtgggttcaagcaattctcctgcctcagcctcctgagtagctgggattacaggcatgcacaaccaacacgcgtggctaattttggatttttagtagagacagggtttctctatgttgatcaggcttatcttgaactcccaacctcaggtgatccgcctgcctcgacctcccaaagtgctgggattacaggtgtgagccaccgcgcccagcctgatggaccactgtgtgggcttttaaaaattatgtcttcaagaattatatataatgactcaaaataggccaggtgtggtggctcacatctgtaatcccagcattttgggaggctgaggcaggaggatcgcttgagcccaggagttcgagaccagcctaggcaacatagtgagacccctgtctctacaaaaaaatttttaataaattagtcaggtataggggtgtgcctctgtggttccagctactcaggaggctgaggtgggaggatt

SEQ ID NO: 5803 - DNA, 6000 bp, Homo sapiens
tatatttaacctatgagaaccaatgcataagacccccgatggtacctaaatctattataacagttagtatattagagttagtcatttaaccaactcttcctggaagataagggtcaccagtgcagagataagtctcttcaccttttagtccagaatacttagcacttgcttggcccatagtcatataaagttaacagaaaaaaatatgtattaagttattgcactggaaagactgaatggcttccagttggctttcagggattccagagagatttcccataaaaaggtgagccttaatgaaagatttaaaaaggaggaaaggagtagagtatacaacgtccacccagtagaaaaagctaattctgttgtggcagcacaacagaatcttttgggtctttctcatccttagagaaaggtaggtaacaagagtattcaactttttagaataaaacagcaggattaagctataaatgcagaagtattatactaagaaaatgcctcccagatattgttaaagcaaatagtatcatatccagcacaaaaccgcagtgaattgatttaatcagacattatcagagcaaggaagaaataacattctggttttaatggcaaaagaaaaatcccacctcatattgctttgcaggtattggtggcactcagcgagttgttctttggaatgcagtttaaaaatattgggccttgggttagggaggaataggaccacagaggcttttgtgtaggagaacggcccaggtgtggggctgcctggaggctcagccaggtagctggctgctgcagccttggcttggctcccatctggcccagaagacactaagaacactgctggggtagctgccatgaggtggtgatggatcatggctctggcctgattctcgaggagtcgtggattcactgcagtgtgctgtggccatatgtgaaccctggccatgtgtgaggtcccctgggaggaggaggagaaaaccacataatatgtcgcccctttcagcagcaacgaccattggaacaagctagagcctgagatttcccaggcagcatggtccgcagttaaaatgctgcttcctgattctaggggcctgggattttgggcagcagcaaaaggaagtgttggttggcccctggagatgaagtatggtacagtcttcaccttctggggttccagcatgggctcagagttgacaggagacagaattacagagtcccagcacaaggcaggtggaacctcagagggcttgctcaaccttctggcgtttgtggggcctctacatcatttacgccaacaattaatctaactgagcctttccagtaataggaaactcacttcttctgcagcatctcacaaagctggataacctttgtaattgtaaccctccccaagggtctcatcccaaccatcaacacagctttcctccagtccaggcctctcaagaacctgtgagttagagatagacctccttacagtgtggggttcttgttttggatcttctgtaacttagggatcttcttcctctgcaggtgtttttgtctccagatattcttgtccagttgtcctccaatcatcactgtcccttagaattagaggcttaaagaatcctgatgcccaaacctcactaaatcatactctctgggggtagaactaaagcactggtatttttaaagctctccagatgattccactgtatagccaaggttgagaaccactgtcttgctccctgaacctggtcaacttcttgaggtttatgctatggaatcaggtatcttagatttgaatcttgcctctaccacttgggcaattccttgtgtttttgttttctcatctgttatatggggataattgtatctacctcaaaaagctgttgaacgggctacatgagaacacaggtaggtcaagaataatctctggcatatagtaagtgttctataagacttagcaagtgttctataaaatttaactcatgtgcctaggacagggcctagcgaatgttgacataatatttgtgcacttgccatgagataggcattgttctaagcactctacttttgttgtgttgaagatctagtataagaaaaattacataaataaaatgcgtcttcagaacctctttacctggtagggtctattgtttcaaactacccatttgactcacacactagtgaactctctgaaccccttatcatcccacatgttttcttgcctcccatgaaaatctccttaagagttctacagaagatctgtacctgtaaaagcatccaacatgactacattaagagctcatcaatggtcaattcaatatgttttgttgcctcttgttaaggctagtgcctattaatgagctgggcatttaagagatgcctagtaaattatttgtgggatgactaaactaattaacctggtgaaagactatgctaatatatttttgcaaaagagatagagaaagactgaattcacaggaatggtagggatgctgagaaaatagttctacaaagtacctactatgtgctaggcacttttcacaatcataagatgtgaatgttcaggtcatctcttggtgtataacaaatcaccccaaacttcgtctcttaaagtaataattagcttgcttgtgaatttgttcttaggtggttacatagcaggaacagcacctctttgttctaagacagctcaacagggggctagagtatccactttcaaaacagttcactcctgtactccagcctttatggaaccaccctagtggcataggctcctcactcacagccccaggctggctctgggttggatgggttgggacagaaaactcttgccatgaaaatatagctctccatctcagcctctccactccccattccaaagggagacgtgtctgtgcttggggagaagccaagcaaagcaaaagatttcaacagcgaaaggaggaaacacacccactgaggttctcatagcaacataatcacgcacaggcagcagcctatttcggtgggagcttgtttcagctcccctcctccctggttagtcacagaaggcatgcacaagcagaagcagtgttgggtgggggcagagtgtcggactgaaagtcaggaggctggggagctgggtcctctgcttgctgatggaccatgggcaaatgtcctcctctctccaatcttggggtccttatttgtaaaatgagaggattggaccacagagcggtgaggatcatttcttttctgatttcctttgattgcacaaacactgagacacttttggtagggaattagatgtctctcagaatcttttgtctctgagaagatgcctagagaaaagggaattcaataggataaaagtcattctccagattcacatttattttcctaccactttctgcatgttgacagaacgggaggaacgactgggtgttgtcaaggattctgctcactcacccccaactctaacccaggtctgtgttctgagaagggaaaaggttaaggaggttaaggtcatctttttattcaagttttcacacacacacacacacacacacacacgcgcgcacacacacacacacacactcaagcctcttgctacattttcatccttctcattcttcatcctctcctgtctctatccctcacttctcacctctacttagtgcaatgtatcctctctttgcccgaggaccagatgatggaggcatgtttcctactgagaatgattctagaccttttcttcaatggactctggggttagttgaggacagtcaggctcacacttcccagttatcgaaggtgatgataaaaagcaaatagggcatttgggagggacctccccaaacaagtacagagatgaagtgaagacagccgggtgctcagggagcatcttataggtctcagtccttgactcgtaggttgaaagcttaaaagtacagctgttttaaggagtcagcctgagtgtcctgttgcaaagggagaggcagaatggggtcccccgcttttgttctatctcccactgcccgacagatggccagtaaaacagagaaaaagaagctctcaaagtgaagacaggaatgcattgtataaaaattcacaccccctgctgccgcccaaactcccttaaaaaaggatcaagagaatcctgacgggtacgtgacatcctccctctctcccataaaagggacttcaaaatctggcgatggtgggggaagggtgaggagggagaagagaaatgcgtgggcagggggctgccagggaagactggagtgggggggggggcactgcagtctcgcatttgactttctcccaccctctttcccaagccactctggccgccacctttgcccctccctctcagcctgaaaggggcttggagtcccaagggctttgggtacaaagagagagagagagagagagagagagagagagagagagagagagaaaaggataaagaatgacaccacacttacccctagagttgaaggagttaaggaccctcccccatccagacacccaccccttcgttccccaaatcgtaattcgccgaggaaggatccaggaactggcagaggagcgggagagctggggtgggccggggtggggagggtgcgagttaactgtggcccggtctcgcccggacctcgccctaggtgggagcacgcgcaccgggtctgagaacctgcaagagcctcgcccggcgccggctttctctgggccccccgcgcgggcctggcctccacgtaagttgtgtgcagcgccagggagtggaggcggccgagaccctcggagactaggggagggggcgggcccgggggcgctgggggccctcggtctgcgcccagccgccgccggctccagcgaacctcctaccccgcccccactcacccggctcagcccctaggagagacgcgcaggaagcgtgttgcttcgcccagcggatcggcagaagttgagaggagttggcggctgcctccggccggccggactttgcgagcagcctggagaggatccgcgaccgccgccgccgccgccgcggaggcttcggggctgcttccctcgagcttagcccgcagcgcgggtggagaggggcggggagggggtcgggggcacgagaagaacttgaaaccgtgtgaaggaatccggagcagatgagaagggaggaaaataaaagaaagtggagactgcagaacagactccgctgtggctgactgtgccggccgacgctccagctgaggggctgggttggatttttttttttctcccatcctctcgctctctcttttaaagcgacaccagctctctctcctcctctactatctcggtatcaccaaacccttgccggctcttatgggcatgaaacactcctcccgctgcctgctcctgaggaggaaaatggcggagaacgcggccgagagcaccgaggtaaggaggcgagcgagcaggggctctcggagaccccgccgcccacccggaccaccgcgccgccgccgccgctcagcgccgagtgccaaactttccccagtttcatcccgctcgcttctgccggcctcctcctgtgtgtgtgtgtgtgtgtgtgtgtgtgtgtgtgtgtgtgtgtgtgtgtgtgtgtgttggtggggggtgggggggaagttcatgtctcaggtcccctccctcttgaaaatgcaaaacagtcactctcaccccatcaccctctcctgccacccgctgctcccttctcccgcccccaagtcccaaaccccgggcagccgcgctcccctgccctctcctctgggctccgtgagggctcccgggtcccggctttgtgcagagctggggtgggtaatcctggggccaggtctgccccctgcagtgccttgaccgtctcctgccgctgcctcagctttacccttcaagctcgagtcggttcccgagctctccgtccccgcagccgcgcggagagcccccggccgcgggggccgagccggcaggaggactcgggcacctcctacagaccctccggcccagatctgg

SEQ ID NO: 5804 - DNA, 6000 bp, Homo sapiens
aactatagtgaaatagcaaagaagctgatgacactcctatattatatatgtagttatgtaactatagtgcaatagcaaaagcagaaaattgacattgatactgtgtgtatatagttctatgcaattttatcacatgtagatattacatgtagacatgcaaacactgtcactcaagatactttagaactatgtaatcaccattgtatatacataacttaacacagtctactggtgttaccattttaccagtccacgtgaaatgaagaaacgttaccttatttaagtccctaatttgccctcccccatatatagtataattgtcttaaatatctcttccatatattttcagaccacagcagacaatgttatgatttttggttgccaaacgtaatttagaaaactcaagaggaaaaggaaagtcttttgtatttactcagattttaacattgttcttttgtttttcttgttccaagattctttcttttgtcatttctttacttagaacaatttctgtagtcatccttttgaggtaagtctgctggaaacaaattctactagttttcttatctgaagatgtcttgatttcttctccattcctgaagggtatttttgttggatacaggattcaggattgaccattcttttcttccagcacttgaaaagttgtgatactttcttcaggtcttcttgatttctgatgagaactctatcatttgaattgtttttcccctataagtgtcatttttctcttgctacttttaagaatttttatttgtctttagtttttagaagtttgattataatgcatctgggcatcagatgatcatgaatttctttgagtttgtcctatttggggtttgctcagcatcttgaatctgtaggtttgtgtcttttgccaacttttggaaatttcttttttcttttcttttctttttttttttttttgagacagagttttgattttcttgcccaggttggagtgcagtggcgcgatctcagctcattgcaacctccacctcctgggttcaagtgattcccctgcttcagcctcccatagctgggattacaggtgtgcaccaccacggccagctaattttttgtaattttagtagagatggggtttcaccatgttggtcaggctgtggccccacagtctcgaactcctgactttaggtgatccacctgcctcagcctcccaaagtgttgggatcacaggcctgagccaccgtgcccagccagcccttatttctttacattcttatttagccccacattttgtcttttccttctaaggctccgatgacatgaatattagatctgttgttgtaatctcaccggcctttgaggtttaatttttttttagtctactttctctctgtttttcagattgagcattttctattattccatcttcaagttcactgattcttttctctgtccttattctacagttgaggcctacccagtgatttttaaattttgtttattgtatttttcacttataaaatttccatttgtttcttttttatgtcttcaatttctttcctgagatttctatatctttgctaaaacatctgatttccttgctgtttcttcattcgtttcaagcatgttcataatcagtcgttcaagcaatgttactatggctgcttttaaatccttgtcagacaattccagcatctgtgtcatcttggtgtttgtgtctgctttaatttttttttttttttgagacacagtctcactctgtcacccaggctggagtgcaatggcacgatcatggctcgctgcagcttcaacctcctgggctcaggtgatcctcccaccttagcatcctgggtagtttgggccacaggcatgtgccaccatgcctggctgatttttttaaattttttgtagagatggggttttaccgtgttgctcaggctggtcttgaactcctgggctcaagtgatctgcctgcctcagcctcccaaagtgctgggattacaggtgtgagccaccatgccatgccaatttaaaaaaaagtttattttttagtagaaacagggtctcagtatgttgcccaagctgctctcaaactcctgggaatcaagccatcctcctcctgcctcagcctcccaaagtgctgtgattgcaggcatgagccaccatgcccggctggtgttgctgtctgttgataggctcttccaagttgagattttcctggttgttgatatgacaagtgattttctattgcatcttggccattctgaatataactttttgagactctggatcctatgtaaatctgttttagcaggcctttcatacactgttctggtggggagagggagatttcatctcatcgctgccaggtgggagaggaagcccaggttccatgcttggcctccactgacacctggtggggagggctgcctcattactgatgggtgagggagggagttcaggttccccactagccctctgctgacaccacactggctgaaaaggggagggccactgttcctttactgatatcatgtggggacaatgacaaaaatgccagctccccaagagaccttcactgacacaccctggaggggaaggtgggggatgcaggggcaaaccctcacagctggggtgaggttggaagtctaggctccccacgaggcctctgtggatgtggtgggcatggcactgcaaggttttcagtggcatttggctggagtagggcagttgttgtctaaacatcttctgtcttgctaggcttcccatttcctgtttctttggttagagaaagcagctttttcttggggcttctattgtctctgcccattgcatttccaagttgttgactgctccagcatccagcaacttggaatctatttcctacaatagctaggatatctggagatctctagtcagcctgccctgttctctctacctttcagagtcttcttaggtttgttttacatatcatgtgtactttttacttgccttgatgggaaggaatagagaagataaatgtaggtatttcttcttgtcccagaagcagaagggttatgcttttttgtttgtttgttttttgtagttgttgttgttgttgtttgagatggagttttgttcttgttgcccaggctggagtgcagtggcgcgatctcgactcactgcaacctccgcctcctgggttcaagcgattttcctgcctctgcctcccaagtcgctcggattacaggtgcctgccaccatgcccagctaattttgttatttttagtagagatggcgtttcaccatgttggccaggctggtcttgaactcctgacctcaggtgatccacctgcctcggcctcccaaagtgctgggattacaggcgtgagccactgcgcctggctggatcatgcgtttcttatgttttgagtctaatttgcaagtgggaggctgggagacattttctatccctgcgaaacagaagaagtgattccttttcattttgttcattttcatcctgtttttcctaaagccacattactttcctttaatccacatgtccgcctcagcacatgtcaccatgtgctgtgtttgggacgtagtaaatagtccaaagagccaggccggggtggaagctgtgattttgacgggattgacagtagactgagaactttgaacttttagccttggggaacaattttatgtgtttattctacaatgatgatcactggtgatttgtccaaaacatattataagtgtgaggtgtggaggcaaaggagttactggaagctggggcagggcagaagcccagtgtatgaagttgtgcagaggacaagcaaaggacagagaccagtgaatcggagtcatcccctgaggctcaaccccgggcaccgcctccagctcttctccacctgcttctaggcagtgaagtcctaggaactagcaagaaagtctgtccttaagtttgtgggacaagcatttgttgcacacctactatgtccaaaaccctgtagagttaggtaaaaagacatcttagatcccagctctccaaaaaagcaaggatctaagtgtacagagacttcttgcttcgtgatttcttcttcatcctatttatccccttcttatacccacaggaccagacctcacatgccctatcagagtctcccaggtggtttttccagggagagagaacattaaacatcaaacaaacatatatagagaaaagcctctcacccaggcagcctgagctagctgcaggagcaagcattcttctgacttctgagacagtacaaggtgtgtccaggtgacttacctgtcactgggcagctgccatgcgcactcctcacacctgacgctgctcagggagaagccaggcagctataatagtgttcttggccggagaacatctggcctagcaggcagggtgtcatctatgaagctgggtggagagaaagctgttggggaaaccagccccacaccacccagcggataccccgagtccggcggagacaaaggagttagaaagagacagaacaagcgtttaaaaggcaggtccaggggaccagagcgttggaggcttgctcacggcccagagctctgggctccacccaatttattggtttacaagctctttgttcttagggcagatgggaaggggaggaagggatgaggaaaaggattaatcagtgagtcattcgataagatgtgtaacagtggcggtttctgtgaatttccttgagcaaaggcgtgtgtctaaactacttaagatctttaatgactgaaatgggtgggagtgggtttcaggaggagccaagatgtttgattatactcctctgcttcaagggagtgttatctccctgagcaacctgtggaaagccgctgagcaacctgtggaaagccgctgagcggttatcctctcggggcataaagacaaagaaggcaataaggagactttgctcctcagaggccacccgtggcttcccatgggtgtctcacacaggggagaccaactcaactggcacctagaactctctttcccacaaaagctaggctggttctgattcttaacctgctccagcagtgacacactcagtcccacagggagtggacgacccccaggaagaagatgatgttttggaggaaactccccaaagccctcttcattgggctgactctggccattgctgtcaatctccttctggtattttctagcaaggggactttacaaaacctgtttacgggtggtctccacagggagcttcctttacatctgaataaacgctacggggcagtgataaagagactctcccacttggaggtggaattgcaggatctgagtaagtttacaatgctaacctggaaggtgtgtgtgtgggtgtgtgtgtttggggcacttaggaaaaagggatatggaaggaaaaatgggtgagaggtcacattttcatctcagtcgctcattgaagcatctgacactgaattctgtgccttcaaatgggagatgggtattgagaatgaagtgagtagaagtggaaattagagcaagcagtatgggggaggtgagcatgtgtgtgtgtatgcgtgtgtgggcttgtgcacatgcattatcattatatctacatatgtgcaggcaacgagaagaataagaatcccaagggccatagacctgtccttaggcctattgaaggggtgggttgcacctccacacctgtgggtgtttctcgttaggtggaacgagagactttggaagagaaaaagacacagaaacaaagtatgtagagagaaataagggggcccaggggaccagcgttcagcatacggaggatcccgccagcctctgagttcccttagtatttattgatcattcttgggtgtttctcggagagggggatgtgtcagggtcataggataatagtggagagaaggtcagcagataaacacgtgaacaaaggtctctgcatcatagacaaggtaaagaattaagtgctgtgctttagatatgcatacacataaacatctcaatgccttaaacagcag

SEQ ID NO: 5805 - DNA, 6000 bp, Homo sapiens
aaccattttcagaggttacacagagaaagaggaaaacttcagggatcgtattaccagaatgatgacaagtgcacacacacacacacacacacacagcaaaataaaaatgtaaagaagcctggaagacagatcatttatgtcatttatatacctggaataggtacattttagaacctagggcagaggtcagaatataaatggttatcacacaatgcttcacattatctgtgctcatcttgtgggcacatacgtccattcttaggtggttcttcccatggatgccccccacgtactcctgacctgttgcagatcatgtgttccactggaaggccagcgtgggcccaggaggatggggcccctggggtctagtcctggttgttggtttccaggagctctccatctcttggctttcctttgacttcacctacaacccctcagcctcctatgctggctgcccttcctcctgaccttgaccggtagattgaagactgctgtgaaggacttggtcctggtcatttctcctcgttgtccatattctgtttctgcagaagaccttggtgccatgaatgtatatatttctagatgtcttaaattcataaatcgtaagtttctttttcatattccagacctaaataaataactgcctccttgatgtcttaatttgcatgtataatttccctctccaatgtaaaacatctaaaggtgaggtcttgacgcatcccaacttgtttaaccccttgtcttccctttctcagtaaagggcgacacctacctgcctagttgcttgagcttggcattggctgcttatttctcatgttttattgatgactaattcctgctgattctatcatctaaacatacctcctcagttctcctcacctcctctccactctatctctactgactctacctttctctggcccaagtcaccatcatcttttccccagacgactgcaatttcctggtctttctatttcttcttctacctcttcataattcattcccctcccagcctctaagtaaatcacatcacgtctctcctctgcttgaaaaccatcattggcttcataccgcccttaagataaaacctgaacacctcaccctataagatggtacccttgctaattcttcaatcttatcttgcacctccctttcccttgcccattctcctcccagcgcacggccttctttttgaccttgaacacccatgacctttctagctcagggcttttgcacttgtcagtctggaatgctcttccctgcatttggcactgtggccccattctcttatctatttttgagacagaatctccctctgtcacccaggctggagtgcagtggtacaatctcggctcactgcaacctccacctcccaggttaaagcgatcctcctgcctcaacctcccaagtagctgggactacacgtgccctccaccatgcccagataatttttgcatttttagtagagacagagttttgccatgttggtcagactggtcttgaactcctaacctcaggtgatccacctgcctcagcctcccaaagtgctgggattacaggcatgagccaccgtgccaggctccattctcctctttggattgtcagttgaaatactacctcttcagagggaacttttccagctacccttgcaaagttgagtccccaagttcatttctgacatggcatcccatttatcctcctcaaggcatttactgcaatatggaattattttccttattgtctactgttaaaattttctgtctataatgtaatttattacatgaaaatgtatgcttatcaaagcagatattttgtatagatcactgctaaatcctcagcacctggcaccatgctggcactcagtagctgctcaatatatactttttaaataaatgaatgattgctatgaccatggcaaacatctgaatctggatacaacaacaaaaaataacaacaaaatctgtgctggcatgaaattggtgcttggtgaatgctggggaaaaatcccctgccattggaagccacttggcagtgtttatggatggagctgtgtcttccttcacctgggaactggcatttctgaaggtgtgattgtactcatccttaacatacgcttggggggaatgatctaggcatagggtttttcttaagctaagaaatgagtctatttcacaaaagaactaaaaacagaactctgattcatgaatttgccaatggcttgtccttctcaggggaacctccctgggcacagtgaaacccttcttggggcacgacctcatgcttgatgtgaaggtcatcacagaacatcagctctgcctgaagggtggccggcagcccagtcaggcttaacccgaggggtactcaaacggaggttcttgacaccttatcagggtgtgtacgcttctgcagaacgaaggttccttcccatgctttgccaggattggttttgaagaattactgacctagttgacagtctcgtgaataaaaatggcaatgatgaaaacaaacctgcaaatgaatcattcattatgaatttgaaaacaaaaacaaaaagaatcaggggttagtcaatttatgactcagaaaataatgacagataactggataagggtaaagtgacagataactggatgggggtaaagagtatcttctatagtgtatttgctgttggtttccttttttttcttttctttcaaaaagattttttaaacagagcaacttttgtgtggagtctaaatggcttaattacatagtctgtaagtgagaaaactccgctggatgactccatgtacttgctttctctcccttcacggaaacatgcaaggtgagagaaaggagtggaaatgagacaggcaagcatgagatgggcaagctggctgctttcctgttgtgatgtggtttggagaaaaaagaacaaaagccctttactcaagctgtaactcccagccagtcagcatcaaaggcccaagaagctattaaccacaaattaattaaccccttgctttagagaactaaggacctttctgaggccctacgtgcctagctaggcttaactttcacctcatcatgaacttttccttattttagtactaaaaatcatgcccacaggtggagatttaagatgctaatgagacatatgttgtatgaagcagcatcttaagccaccgtacatgtgcccgaaaaacctcacctctacatgccctgacttccccttactgcagacctccacaaagggaacccacaccttgactttggagagcaacccacttcctttcttggtgtttggtcccttatgtccataagctttcataaaatctttctctttgctactgtatgctgtgatctcttttgatttctatcctgggggatcaaaaaagcccacagggcgttggtgccagaaatcagctgtgcaagcacagaaagggagcagaggctgttgcctggctcaactggtgaggagcaagactggagaatgagcatgcagtgagttctaatactagcacatttcttacccactcaacacctgatcccttcccgacacatccaggagccttggttctctccttcctccaactctctgagagtgaatgctgctgagaaccactgtggttttaaaatactccgtgcaatacaaagaactctcagatgcatcctgtggtttgagagcacctttatgtgtcattctcatcattaacctcaatgaatgcatactaatgatctaatatgcaccagaagctacacaaaaacactttgtagttgttagccaattcattttggctacagccagccagaaaagaggaaactgaggcacagagaagcaaatgtcaaccctacctggaagtgtcagtctgaaaagatcagttgagtcttcctctaccagaccccaacttgtctggtctcgtgaagaaagacagaaatggatggaaaaccattcttatcaccttcttgctggagagttagggaagagtcagctggtccctaacaacaaactttgccctactccagtactgccaaaggggtctttgttgtaacatggcctacaaggagaggacatctttctgggaaagcacctagaatgtggctggcacatattcaatgcccagtaaatgtagctattattttttcaatcaacactcttacataccccttttccactcaccctcttctccctttttttggtcacccaataagcagaaattccagatgcatccttcggggtggttgggagcaaaggatccccagggtgcactgtgccctgggctgaggtatctctgaggtgcttccatcttctgggtccttcctcactggggttgttgcctcaggctctcaggactcccctggaaatcttctgatgggaaaggcattgattgacttgccaccctttctctaccatccctttgcaattctgggagagttgcagccccgccctcccaggcttgcaaaggtagacggagaattatattggaatttaaatcggaagctctcaaggcatctcaaaaatactttctctattttttttttcctgtagatattggagaggttggcaaacgggtcttcctgaagacagaagaatgtatgatttaatgttttctttagatttctgtatgagtggatgcacagtgctccgtattgtgtggtggggcggggtgtgtcttcttattgatgaaatacactgcgcaggtcaactcggtaaattgaaatgagaagagccgactgcgggggtggagggggtgtggtattagggtgccggcgcttgtggaggggggcgcgaatgtgaacgtgtgaaagcgagaggcgtgccaggagagcgcgggaaagcttactggtgaggcaagtgtgcgtctatttccatggcgccctggctcgcggcagcccctggctgggcgaggggtgtgatgtgggagtggggtgggagggggcagcaggcggggcctgccacgtcacttggagagtgtgtgttgggaaggaagggcagagcggagagccgagccgctgcagctgcggcggcggcagcgaagccttgagccgtggggaggtgggtccccgcgctcgggcgccggggcagccccgggccctctgcgaggcctgcggcgcggctcctagggaggaggtggcggctgtggcggccggaaccgcgaccttggccggacccagccccgcggtggacgcagggcggaggccgagccccgccaggagtctttgccgagccggagggaggcgcatctggcgcttcggtaccagcggcagccgggggtccggagcggctggaggagcgcagtgggaactgggaagagctagcccggctggagggcggacctctgcgtccgggagccgggtctcaggcaccgctgggggcgaagccacgcgtcttttcgggcagccaatttcacacgcgcctgtgtgcggttccgggcatcccagtaagctctagcacccgggcgcgggtaacgggaagcgcagaaccaaatccccagcgcccaggtcacctccccagacccagccttgcagggaccagggctttagggctcacggacccaacggccaggtcagaccgcgaaccgggaggagcgcgggccccaccctaaagagggcgcagccgggagctggggagcgggtgccgcgctccagagattgtgtcgtgggcgccgtcctagtggcggggagcgcacctccgagggggcatgagatcggagaaatcccttacgctggcggcgccgggggaggtccgtgggccggagggagagcaacaggatgcgggagacttcccggaggccggcgggggcgggggctgctgtagtagcgagcggctggtgatcaatatctccgggctgcgctttgagacacaattgcgcaccctgtcgctgtttccggacacgctgctcggagaccctggccggcgagtccgcttcttcgaccccctgaggaacgagtacttcttcgaccgcaaccggcccagcttcgacgccatcctctactactaccagtctgggggccgcctgc

SEQ ID NO: 5806 - DNA, 6000 bp, Homo sapiens
acagggtgcagatccaaggagaagagttaccaaactagttactgcttcatgagtcacaaagagacacagccttttcattagaccatgtggttgcttggccatgaaaataataaaggtagaggggatttaccgacgagctccatcctagcttgcatctcccactgggcaagctcctcttggtccattgagctaatgcacccctaggtttgtgttactcacctaggcctttttgcagtcttgaggaatccagattccactccttgcagtgctgtcaacttcaagaggcagaactctgccacccatcgagttgacttttccagcagcacctgcagtggggcaagtggccattggacaagacaatggtgagctggagagaatctgaggagatggcctacgctgcccaatacagtgacaactaagacacacaaggtctcagacttcaaggagctcctaagctgcccaacacagaagatctcagaagacacagaagatctcagacttcaaggaactcacatctaggtaggagcgaaactgtttgggacactcctgcagtaaatgatattaccatttatctggttattaaggccacaagcctaggagacagtcctaaaacttttctttcctcacatcccaaattctgccatctctatttcaaaatgtaattctcttccaaaaactccttacaagctcaccacagtctccctcatctaagccaacattgcttatgctacttagtaacctccaaccttgtgtcttgtttctagtagccagaataatctccaagaaatgcaaatcatattgctatattgatgcatatcctccagtaggttcccattgtactcagaatgaaatgaactattcttaccatagccttagaggccctgcatgatctgggctctgcctgcctttctgacctacctttgatgacattctttctcagtgacttctttctggccatactggctctcttgtttcctgaatatgctgagtctgtccttgccttgggacctttgctcttacacccatcctttcatcttcctgttccttgctctctcttcttgatgttttttgttcaaatgttacttctgcagagaggcccttcttatctgcaaacctatatttgtcacttgctgtgcctgattcttaattttctttatctaacactataatgtatgacgtatatgtttattgtctgtatctcccaccagaatatgagctccatgagacctgggaccttatatgtctccattccagtgcaagggcaccatctggcccatagctggggctgggcaaatatttgttgaattaataaatatcttcagacccttaccaagggaggacttccatcaagaatgctgagttccagttagccaggagtgatggcttgtgcctgttgtcctcccagttactccagaggctaaggtgggaggattgtttgagcccaatacttcaaggttgcggtgagctatgattacactactacactctgtctcaaagaagaacaagaggaagaagaggaagaggaagaaggaggaggaggaggagaatgctgagttcccagctcacaattttcttccagtcccttggaggtccagtcctgctgtaaacacatctatcagagatgtggaagatttcctaatatgccccccaataaaacccggaatttaggaacctgggatctcatccaatctgtgaatcccttgtagtaaggcaatctcctaatgctgagtcagggcacatgcattcacaagaagctaggaagatgacagtcttagggacatttaaaggaaggcaatgggttataggaagagggaggtacaagataaggacagataaagtggagaatagggaagctcagtagtgctaggatatggtcagaaaacccttgtctcgtagggttatccccagtagggttctagcagtggcagcagcaacaaaaccaaaagacttggcagtacttcagctgggagcttcatatttatatctttgtttttatttttaaatttttttaaaaaatatatttatttgcattagaacagcagtgcagaaaggtagggatccctggagctattgagattgagggatatgcgtgtggaaggtgggaaaggggaagagtttaatatgggaaggaggagtataagagaactcattgttcatgaaagaaaagctggggtacggatctgaaggaggggagggaacatacacttttgtttttctgaaaggaatgctggcgtctgaatctggaggaaggatttaactagttccagacagggactgttgcactgcctgggcaatcccgcaggggcccctgctttccactagccacaatagagcgggaaggatgcaatcattggctttgattaaggaggtgggtggtgtaggcgggaggcaacggtggtgagaagggtggtcccaaggccgcgggaggagccaatcagcggcgactctgggctcttgcagcctccttagagactccgcagccctggaggtaccaagctgcctgctgccttttctcgcgctgcaggcgcggagatgcagcgcctctgggggcgcagctccagccgcactcgcagggcaaggcacacgcccccggctcctgctgccatgcgcctctgcgggggaccctttccaaataaattgcaagctttgaaagtggccctgtggaggcactaggctggggaaaaaggctgcgggaggagggacatagggtgggaggtgagtaggcgacttgcttctcagattattcccaattagcaccaagttggcagacaaccccacaaacccacgaagccttcggtcccccacaagtcacattccctgtatttcagaataatcggatcgtaagaaaacttcaagtcccatcgtaggttaaagagggacaggctcttagtaccgccgccgcccagtaaaactacatggaacaaacccagggatcctcatctgcacagctctgcccaaagtctgcagctctgcgagtccagccggcgggggaagctgggtgggccccgcagagagcaagggccttcttgggggaggagcgggatggggcgcagagcagtgcgatcgaagagggttactgtgggactgcacaaaagcaaacccgtcggaggagttttgccagaaacaccaccgcctgcattgcgtcggacctgaccatttccaatgtgaaattcccggggaaggtcgcgagccgctaggggccgttcgtgggcggggcggcgggccacaggggaagtagagttagcggtcggcttttctggtaggagaggaaaaagctgtgctggcaagggtgggaactgaatgacaaccccgctctcttccaaaccaccccctcatattttccatccacctcctcgctcctgccctcccccgccctccccaacccacgcccgggtgggccaatcgctgctcggtattccaggcgctttctcaggtttctgctgatcttgcagcgcccagaaatggaccgagcggacccgccgccgcacgcaccctgctccactccaagctcctaagggctcctggcgcgccgcgtagccttggcgaggtccgcgctggggtgcggagagcgaagggaactggagagccatgtagatccaggctctcgcccgcccgcctccttcgggatcgaatcaagggctcccatagtgttaggagggggcgagagtgctgtttatcgtcatttgcctcggagcttcgagagagggtggtattttgcttttccgccccgcatcctccggaactccctgcaccggagagaggacggcgtctccaggttgctggcaaccggtgagaatgggggtagggaaggaacattttcgccgtagctgctccgtaaagcgattgtccaactgagaggggcgtcggacgagtggaccagggcggcgagtttgcccggcgcgtctcggatgctgctgcggcggccgccgcggctcccgccagggcactgcaaagacgacctgccgcattcccactcgggctctccgctgactcagcaccgcccctgcgccaagccagccggccaggtagggggttccccagctcggggatgcagaagcgggggttggggggaccgggtgggggaggccgggggtgcggggatgctgtccgggaccctgagcttcccccggcgtctctcggcgcttttccgatctctagtttaacgaagttgtaaacagatcggctgttgggcattggggaaagtgggatggaagagccccaaacttggatttccgggtgtctgcgtgtcgtctgtccgtgtgtgtgtgatagccctagcaaacgtccagtgctttctcaagctagaggtctgtgttcttcggtgtctgtaggtccgtcccatctgaatgcttctgattttctacccccgtatcactttctatttctctgcagcgtgcatcgatcgccctggtgggagcttagaaggcggcaggcgaagaggggtaggaggggggagagccgaggagaagcagagagggtggcaggcgtggggatctgccgagccggcactgcaccgggtcctaggaaggctctcggaggggaggggaggccagggcgacccccgaagcaatggcccagtccgctagaacggcactgcgttaaggcacctgggatcaggaagaaatatctaaacaacaacaacagaaaaccaacaaacccccaaacccaaacccaaccctctgcaaaaagctgcacccggcccgcaggcgagggggattccaaactgagtgaaaggcagggtggaggggaaggcagcgagaggcaaagtcgcagatctcccgacctgctcgtgttgaagcacctccccctgggcgtgagggagacgcgcgctccggtgggggggccgcttgggtcccccccacccctggtccctggctgcttcccaccccgggctctctcctggcctcccacccccgcgcccggcttccaccatgacggtgatgtctggggagaacgtggacgaggcttcggccgccccgggccacccccaggatggcagctacccccggcaggccgaccacgacgaccacgagtgctgcgagcgcgtggtgatcaacatctccgggctgcgcttcgagacgcagctcaagaccctggcgcagttccccaacacgctgctgggcaaccctaagaaacgcatgcgctacttcgaccccctgaggaacgagtacttcttcgaccgcaaccggcccagcttcgacgccatcctctactactaccagtccggcggccgcctgcggaggccggtcaacgtgcccctggacatgttctccgaggagatcaagttttacgagttgggcgaggaggccatggagaagttccgggaggacgagggcttcatcaaggaggaggagcgccctctgcccgagaaggagtaccagcgccaggtgtggctgctcttcgagtaccccgagagctcggggcccgccagggtcatcgccatcgtctccgtcatggtcatcctcatctccatcgtcatcttttgcctggagacgctccccgagctgaaggatgacaaggacttcacgggcaccgtccaccgcatcgacaacaccacggtcatctacaattccaacatcttcacagaccccttcttcatcgtggaaacgctgtgtatcatctggttctccttcgagctggtggtgcgcttcttcgcctgccccagcaagacggacttcttcaaaaacatcatgaacttcatagacattgtggccatcattccttatttcatcacgctgggcaccgagatagctgagcaggaaggaaaccagaagggcgagcaggccacctccctggccatcctcagggtcatccgcttggtaagggtttttagaatcttcaagctctcccgccactctaagggcctccagatcctgggccagaccctcaaagctagtatgagagagctagggctgctcatctttttcctcttcatcggggtcatcctgttttctagtgcagtgtactttgccgaggcggaagaagctgagtcgcacttct

SEQ ID NO: 5807 - DNA, 6000 bp, Homo sapiens
cccccctccccctcctgcttccatctcttaacatgcaagtgaccagccacctgtccccagcacaggcatgcatgttttgtttttgtgttttgttttactccatctttgtcactcccatcaaacaggaaaggaaggtcatttccagggcttccttcccaaggtgttggattgaggggccagtgagaagggaaggggagggaagggaagaacagctgcctccttcattaaagtgtttttgtttttttgggttttttttttctgcagatctatgaggctaatgcatccaggatagaggattaggtgagagacagcttcagtcttttgctgattaatacactattaccaattattgcttgacaatccatctttgccatgcattatggaatagtgatgtaccatggaattacagactctgtgatatttggcagtaagacccagtctaccaaggacctgttaatcaagttctccttatttatgtatgtatgtatttatttatttttaaagaaaggtgccttagtatggtttattttgaccaagctgtcttctctttggctcttgctggtccagcctaagaagtcctgagcccttgtttcccacttccaatgcctccatgttgagacctgaggtgactatagctctgtttattatatgagtaacacatagatgcttcctgtatctatgaaccccctgcaccacaaaggaggaaaatcaatgtctgacagaaagactactggcataatttttgcctccctctgtccctttaaatgctttagatgatgaaagatgctggccaaggaatggtggggaggttggagaaaacaagttttctctaatctggggctgacagcctcccttgtggagaagatacaatgctggttttgctcaattttcttttttaatggagggaaaacttggggaagtcaggcacaggtgtaatgggggtaagttggaataactggtttaccagaggaataaaaaagaagctggaaaagcagctccgagcgcacttctcttactcaagctctctggaccatgcctgggtttcctggtggagccctgccagagctggctagggatgctttagagatgtggtcttttcagcagcaacctctcttcctcttgaaagaaaggagcagagggatcctgagccccgagacttggacagacagactggctagtatttttacctggctggcagggtgtgtcagacaaggccactgctaggatcctgtcctcacattgggcttcctgcatctatgaactccctgcaccacagaggagtaaaatcaatgtctgacagaaagactagtggcatattttctgcctccctctgtccctttaaatgctgtccaatggggaaagtttttccctgacctagttgaaaatccagcaggtctccttgttttgtgttactcatataataaacagagctatagtcacctcaggtctcaaacacaagaaattaagccatacagtccaaaatatgaaattgttgctttttgcccacaaagttgaagtggtctgtgataatgcagtggtatataacccgaacaaatggttataagtcttcagatggttaggtcccatctctacaaccactttgcgtacttagctaatctcagaaaccacctttcagttcctattcccaggtttcccctccctcgctgctccaacagctgaatttccttcccctagttcaattgcgttcagtacatatttagtgaaatgcataatatggacgtggcaccatgtttggtgttgtgaagaaaatcaaagatcaataaaaaatgttccttgagttcaaaatatctctctctctctgttagctctctccctctctctcatctacctacctatcatttataaatagataaataggtaactagagagtagctagctagaaaggtaggtaggtaaatagatagatagattgatggatagacagatatagtgtggtagataccatttgcagatgcgatagctagatagctagatacatacatgcatacatacacagagataaaaatctattcttatgggaatgtgatctctagacaggtgcatcagtatcacctgggcgctgtgtgaaatgcactctaagccctaccctggttcagagtctgcatgttaacaagatcctcaggcaatggtgcacattaagcactgctataaaagagttaacctcgtaggattagatagtaaagaaggcagctttcagttatacaatgtgtgctctgggaagaagacagagatcgaggtaggagtgtaagaggtttactgggagataataaagaaagttaaaagtgataggaagaagaattcattagggaaagcattcagattatgatgctgatctggcacttgtgaaaggaaggaggggaggaagaggggttggacagagtctcagagtggaatgtagatctttcaaagtcttggccaatctgctggggaaatgcagagcaaagattgccattagtggaaatctgcactgagtagaaatggccaggtctttgtaaccctgctgtgctcagagggctaccccaaaggagtgtggcccctgcactaaagctgaggcagtgccaacagctggagcctgtcagctaactgcactctggcagttgaaaagcaaattctttctttaagggagatttgagcagtatacctccatggctaccacatgtgacatctgaaggtaattttgccagaaacctataagaactggcaaatgcatgggaaacagatttaaggaaataccacattaaaggaggcctgggttttgtgcttttcctggactgtttatgttgtactcttattcttcagggaacaatctcccagaaagcccctgaaagacaagctccagagaattctttcctctggggagcccgaggagaacccaggtgaaccaatgtagcatccttatatttacaagatgcatgaatcagtagacaagactgtcatgggtctctgacctcactgtctgcaagctcagtaagtcccaggctccccaggaaaaatacctgatcctgactggcaacctcagagccagagaagaatgaaagcccactggagatgaagcagggatggcacagatatggggaaaggggatgcaaggccctgtggttaaccagtgatgccttcacatactgattttcatgttcatacccttcctcactcatgcacgtctgcaaagacagccaacaatatgcacagtcacacagaatgaaaatacttacgcacaccaaattcacatccaccttcacatataaactcttaaaaagccatatgcacacatacttctcaaaccttgacccaagtttgtgtgtctatgcgctgctattgcaacacacacttgtgcacccaggaccaagtttccaaatcacaccctttggatagagacattcattgacaagaggtcctaacttcacgcatataaatctgaagcaatatgcagaaacaaaaatagacaatgaaaacagacattcaaaaacacagccactttatgataatttaaaaccaagaaacttctggagactgtgtctggcagttccagacacacaccttgaaacagattcctcttggttaccaatgcctgctaaaaccctgcaggggttgagacagggcaggggaagatttcctagtgtcccaacctagaaagattaatatgttatatcagccatcatcctgccttctgcagcagggaactaaagttctcaggccagatgttggagtgagggagtgcttgtatcaggaaaagggattatgcatttctatagaggagtgaaatataggggacaagggccaaactctgattgtttgagtttgagttccagcatcatcagtttccacctgcataagcctgggtgagtctgtcaatctctctgtgcctcagtttcttcatttataaaatggtgatgataatagtacttacaaaataggttgctgtaggaatacacagagacaatatttgtaaagtgctgagagtgggctggtgcataatgagagccaagtaagtattggttgttattattccattcttgggaatgctccagccttggagattggacaacctccctggctccctctcataagccacctccaccctcagtctccttcatggacctagatgcagttgctcggtccaagattcaccaggcaggattagccctcaccaggattgtaaaaatcgcttctccccttccctgctgtggtttttgcaaatgggattcgttggagcgggtggaggggttctgctgggttgagaccagacagctcatctcctgactaggctgcttgcctgggctgccaccaggtctgtactggaaacaggctagggcatgggaatcctgcagggttccaacccccttgtacatttttgtggatctgtaggaagacgggaagagagatgcttctccattgatacatgtatttcaaggtccgtaactacgtggcccccctcccttctgtaatccttcccaaagaaataccgttatttctccaaaataaaaaggactggtgtctcccgtctctgtctctcatactccgactcagctcaaagcctcgtccctttagcccaaggcacttcgttcctcctggagtccactcggcttccagcgggttcccaggtgaactgaaatccagagctattctcatctggttgccctgggaatttcagcgctgtcggtacaacctgttcctccatcctccccactccttccctccctccgctgggctgcacccttctcagcccctcctttcccttgctaggggccccagctgcgccctccggggagacacccgctgccacgagacccgggaggggaagcgggaggagggggagaggaggggaaggcgggggaggcgccgagggtggaggccaagcgcggcgcagccagagaggggcggctgaaggttgcatctgctggaaggaggcttttcggctgcttggtaacgggctgccagaagagagagaggcagagagcagggcagcggcttcttgacgtcagggccaagcgaggggatcgcgccagcaaccccagctctccccagagaggggccggccgaccgctggagcggagcctgacgccaggcgcccgcggagcgtgagtagggggcgcgggagccggtcagctggggcgcagcatgccctctgctcccgcgccatggagatcgccctggtgcccctggagaacggcggtgccatgaccgtcagaggaggcgatgaggcccgggcaggctgcggccaggccacagggggagagctccagtgtcccccgacggctgggctcagcgatgggcccaaggagccggcgccaaaggggcgcggcgcgcagagagacgcggactcgggagtgcggcccttgcctccgctgccggacccgggagtgcggcccttgcctccgctgccagaggagctgccacggcctcgacggccgcctcccgaggacgaggaggaagaaggcgatcccggcctgggcacggtggaggaccaggctctgggcacggcgtccctgcaccaccagcgcgtccacatcaacatctccgggctgcgctttgagacgcagctgggcaccctggcgcagttccccaacacactcctgggggaccccgccaagcgcctgcgctacttcgaccccctgaggaacgagtacttcttcgaccgcaaccggcccagcttcgacggtatcctctactactaccagtccgggggccgcctgcggaggccggtcaacgtctccctggacgtgttcgcggacgagatacgcttctaccagctgggggacgaggccatggagcgcttccgcgaggatgagggcttcattaaagaagaggagaagcccctgccccgcaacgagttccagcgccaggtgtggcttatcttcgagtatccggagagctctgggtccgcgcgggccatcgccatcgtctcggtcttggttatcctcatctccatcatcaccttctgcttggagaccctgcctgagttcagggatgaacgtgagc

SEQ ID NO: 5808 - DNA, 6000 bp, Homo sapiens
gctctgggccaggaagggaccgggagctagggagagcacagaaattaatcaaatgcaagtgcaccctcgaggagctcactaccaagaagtggacacataaaggaagatgatgatgaccagagaatcacacatgcgagactcaaggtaatccacggagaaaaagactggagtgctccaggaaggcttcataaggtggtgtatttgagcttagaaagaggaacaggagagaagcttctagaagtgaaggaggtgaatcaagatggccactggtgtggtggctggaagggccttggtggcctgtgagagcgagggtcctacctgttgccttacaaagccattgcccacagctggagggacctggggcatgggtgtgacggctcattaggtcacctggcctctgcgtgttcaaatcttaccaccagggggggcacaagagccaaagtggaccctgagcctgagctggggtttctttcccagagacaggacgccttgagggaagggaggaaaagctttcccactccagcaccacaaagcctggaaggcctggctgcttccatgtgatttctgactcaggggcttacccatattttcctcttccggttaaggcaaaacataatttttccatcgctcaccttcctggttgcctgtagcactaactgtctgtaacaaatgcactttggcccaggggtttattgtgacacagaatgtcaggaggaatgaaagacacctcctgatccaaaatgctgtgaaccaaaaagtatctgagacaggtctcaatcaatttagaaagtttattttgccaaggttacagatgggcgcccaggaggcagatctgtgccttctgcaaagatgattttgagggcttcaatatttaaaaggcggctggtggggaaagaggaagaaagtttttttaaggtgtgggtaggtaagaaacaaacggttgcattcttttgagtcactgatcatcctctcactgaatgcacaatttacatggcagaggagggtagagaaataagtcacttatgccttgtctagcacagcgaatcttcatttttacattggaggaagcaatcagatatgcatttgtctcaggtgagcagagggatgactttgagttctgtccttttttctgtacctgtgaagatatgctatcaatttacattgtcatggtgaaattcaacagaactgttttagggcaaatatcatagggtccaccagaaatttcctcatgggcaaattgtgaaagaagtgcatagctgcttttttttttttttttttttttgagacggagtctggctgtgtcccccaggctggagggcagtggcgcgatctcggctcactgcaagctctgcctcccgggttcacgccattctcctgcctcagcctcctgagtagctgggactacaggcgcccgccgccacgcccggctaatttttttgtatttttagtagagacgaggtttcaccgtgttagccaggatggtcttgatctcctgacctcatgatcctcccgcgtcggcctcctaaagtgcttggatcacaggtgtgagtcacagcgcccaacaagaagtgcatagctttttttgttttttctttttgagacggagtctcactctgtcgccaggctagagtgctgtggcgcgatctcggctcactgcaacctccaactccctggttcaagggattctcctgcctctgcctcccgagtagctgggattataggtatgcgccaccatgcctggctaatttttgtatttttagtagagatgcggtttcactatgttggccaggatggtctcgatctcctcacctcgtgatccgcccaccttggcctcccaaagtgctgggattacaggcgtgagccactgcgcccggccgagaagtgcatagctttttaaaaaatctttgtagctatcttatttaggaatgggaggcaggtttgcctgtggcagttcccagcttgattttttcctttggcttattgattttggggtcctaagatttattttcctttcacaatactcttgtacaggtgaggagactgaggcccagagaggaggctgcctgcctaacatagaccaaagggtcagaaccaagagtagaactcagaccccctcacttcaggcccaatgctctcatcacataaaaaggatgccttgattatacgaatgtggcactgaactatataggctgaccccaattctttcttcagtgtaaacaataataggaataggagcaacaggcagcgtttctgcagcgcttctgtggcaggcaggttctaaggcctccctgtggatttcctctgtcaacactcacgtttaccctaataagtaatttctattataaacttaaatatttactgaactcctcccaccagtacttgttaacttgggagaagggggagatgcaataaaatctttcttttcctaagacctgtctcccaagatagatggacgcaggcccaaaagggcacaatggaacactgactgttttccggcctccttcccaccctccagggtgcttcacactcctcccctgtgctggaatcatcctggacactggttaggatgtgtaaagtcaagcatcaccaaaattcctctgcttgtcctcttggcattaggctcagtttaggccctgcctctccttccttgtcctccttcctccccatgtaccactatcggttgtttccccagtgcagccagctgcccgcttctgtgtctttgcatatccagttccctcttggaattccctcctccgcattgactactgactccaccttcccaagtcaagtcagctgctgcaatgtcccctgctctggggagcctctcggactcagattgacgtggggatgtgccctgtgcccctacttgttactagcttctgctgctctgcctctgatctctccctccccttcccggcctgacacctcatggggttttgccctgccttctctaggctttatcccattgccccgccttcattcattcttctctcacctgaactactccacagcctcctagcagatttgcacctggtcctcagctcaactttcatctaccactgctcccctcatattacctgattgcgtctccccaaatacaacatctccatgttccatgcaatcccgtaaagcactgagccaaggactggagatgccaacaatggtcctggtcctcaaggggcttcctacctgcccctccggccttcccccacccaactacctaaaacacaggcagagaacctctgaaaacacagcagatccaaccattcccctgcttgaacctttcggtggcccctaatgctcagagtgcaaagtccaggagcacaaggctctttctcaccttcccacaaactaccccgtgactccaggctccagcccagagcccggacagcccctgccccagcctttgcccaggattctcccttggcggcaactttccctgtggttctgcagcatcatctcccagtctgggtcagaggcctctccttagcctcttagcccccaagcctctccccgtaactgcacctatcaccctcaaaccattgtctggctgcctgtctcctcccacactggtccctgagcagaaacaaggactaatccatgtttttcagctcctacccctaatgaaataccctaatagatactgaaaaatgtttttgaaccaatgagacaagtctactgataataaacaggcaaataacagcaatgtgctaacagtggctgtttctggtgagcagaattttgaggtctgttcctttcacttcttggtatttcggttgtttctgtaatgactgtatcttgcttttgtaatcataaaggacagtaaaggaaacttcattttgaaaataatacaaagggattcggggacttcaaaagaaggtgactctcctcgtccactccagagaatcaggaaaggagtgtttaaagacccacagaattcctacaagtgacgttgggggggggccagccagccagggcgcatgccggccagcgagtggggtgggctctgggtccgggagaagtcagatcagtgctctgtacagggccttgagggcaagacgaggaatttcgacttaggtccttgaatctggagagctacagaaagtttgtgagctcaggagaagcgctccgagctcggcatctggagcagttcaaggcagcagcgagcaagtccaaagacgcaggagggagggtggggtggaggagtagagagaaaacagaagccgtctacagaccctttttccctctggggcaactaaacctcaagtgcaggaagcgcttggggactgcccagccctcagctgtgttattattcggtgataggtatttgctaattacttccaaaagcctcccatctgtcatcccacccagactgcgcgcttctaattcctcctaccccacatgctgtgcccaatgaaaagtatggtcagcgagcgaaggtttgcaaggagacagacgagggcgaaattaagccaggcggcttccctttaaatcctcgcaaagcagaagggcccctcactctggcagcaggccttggccaaggggcctttagccctgacgacccggggaagagtctcccaaagcagaacgcccggtccggcgcccagaccaaacgcgggggaaccggaagggcgaggcctccacgtaagtccgcggtaaaagtggcagggagtggctgcctgcaaagaccccaagacggcttgaagaaggagtgggtggcgggtgggggttagggcgactaggcggggaaacagggagagggtcgggctccgcggggcagctggggccggggctcgccgacctgggcgggggcggggggcggggggggtgcggcccgggcggggccggtggggcgggaggcgtggccggcggggggagtgggggcggcttttcccggcacatgcgcaccgcagcgggtcgcgcgccctaaggagtggcactttttaaaagtgcagccggagaccagcctacagccgcctgcatctgtatccagcgccaggtcccgccagtcccagctgcgcgcgccccccagtcccgcacccgttcggcccaggctaagttagccctcaccatgccggtcaaaggaggcaccaagtgcatcaaatacctgctgttcggatttaacttcatcttctgggtgagtgagcgcgactgccgcgcgctcctctcagggcccacctgttcgcgggccccggacactggccgcggccgcgagtgccggcagctggcactgcccgcaccgggcaggcaccgggcgggaagagagagcgccctgcggctgccagctggctccaaggccgggtccagagccgggcgggacggccgcgacgggcgcattcgggtgggggctcatcaccgcccagccggcgtggggagccgggccctcttgagatgaggcgtgcgggagggtcctgagcactttagctcgcctaggatttgagctggggtgtgtgtctgctcccagctcaagtccctccgagtgccagagaggaaggcagggagaagcggagcacccctctttgggccaaggccaaggaggactgtggtgagcagtatggcttgtgaccgggtggggtctcccaggtagtagggggcgccaggaagggagggtgcgggcacggcgagagctcagccaagagcggctctcacttttacgcaggagcggcaggggtgcctcggccgcgggtccggccccgggacccagtccctgagagtcgggggcccctccacccttgaggaggaacctcgcaggcccccgttccctcagactttgattctgagccaccgtgagagcgccgaactccctggtagctccctgaaagactagcttgtcttgatttctttcaaggacgataagtatcttcactggagagaactcagagttcgggagaggagggggcagatacctatctgcgcctctagtgggatgagtcctgtgtgtgcatttccgggagagatcaggtgccagccagctgcccgcccaggagagccttggccttg

SEQ ID NO: 5809 - DNA, 6000 bp, Homo sapiens; identical to SEQ ID NO: 608

SEQ ID NO: 5810 - DNA, 6000 bp, Homo sapiens
ttcttcagtctacttaacttaaaaatgtaactgtaatagatgcttttctcttgacagcggccccggcagggttggaacttttcctagtcaaaacccccctactcactctgcagacccttcctgaaggtcttcgccccatactgagcccatcttcagtcccttcacttgttccaaactagcccaatccatgacccttctctgggagctcagccaatagatcccaaagtaccacagcagcacctggctgcagaaggacccccgggaaatgcagtcaggggtgagaagatgggtgggctgaatgagctcggccctctctgggccttagtgctggcatctatgagatgaggacatgcctgaagtcagcctggaattttgagcccaggttatacctggtaaatagaactcccaggtctccggatactcaccactaaaacaatagcacctcattgtttttgttttgttttgttttgttttttaattatactttaagttctagggtacatgtacacaatgtgcaggtttgttacataggtatacatgtgccatgttggtgtgctgcacccattaactcatcatttacattaggtatatctcctaatgctatccctcctccctccccacaccccacgacaggccccagtgtgtgatgttccccttcctgtgtccaagtgttctcattgttcaattcccacctacgagtgagaacacattgtttttaaccctccccagcagcttctttaacccctccatttcccttttggcggagacccttgtcatcactcctctctaccaccagtgctctcccctcctgcactgtcccaggcttcctcattcttcccttgcaggtccttatccaacatggctcacaattcctgggaagccacaaggaaaccaaattctagtagcaactcagagtcagcattcattagcaggtcacagggccataaggatgccaagaaggaatttgtccctctccttgtcctgacaaaaggcataagtagaagaaaattgttaggtttggttatgacctttgacattctctctttgacatcctccctttctgcacccctcttccacctgtcagggcacctagggctccccgggtccccacaagtgtctgccctaaggcccaccaggctttcttgcagcctgtcccacatctgggtgtcactgccttcctctgaatcaccctcctctcaaaccagccgccagcgagcccagcccagcccagctagtgccctaccacacccgcccccaggataattaacacccagccacccagcatcggacctctacacttgagcaaaatgtatattttaaaggcaaattctcacgcctgtaatcccagcactttgggaggccaaggcgggcggatcacgaggtcaggagattgagaccatcctggctaacacggtgaaaccccgtctctactaaaaatacaaaaaattagccaggtgtggtggcacacacctgtaatcccagctactagggaggctgaggcaggagaatcacttgaactcaggaggcggaggttgcactgagccgagatcgtgccactgcactccaacctgggcgacaaagcaagactctgtcaaaaaacaaacaaacaaaataaaggctaagtaactgtaatcaagtaactatttattatttatttattttagtgtatccacaggttgtgcagccatcaacactatctaattctataacattttcgttaccccagagaaacttgtaccccttagcaatgactccccatttcttccccccaaccaaccccagccccagccccagcccctgggaatccctaatatactttgttttgttttttgttggtggtgtttgagacaggatctcactctgtcacccaggctggagcgcagtatcatgatctcagctcactgtaacctccacctcccgggctcaagcgatcctcccacctcagcctccccagtagcttgggcctacaggtgtgcaccaccacacccagctaatttttgtattttttgtagagacggggtttcaccatgttggccaggctggtctcaaactcctgagctcaagcaatccacccacctcaacctcccaaagtgctgggattacaggcgtaagccactgcacctggctattttctttctttcttttcttttttttttttttttgagacggagtttcactctgttgcccaggctggagtgcagtggcgtgatctcggctcactgcaacttccacctcccgggttcaagcaattccctgcctcacccggctattttatatttgttgatctgctgctggttatgcctgtgagccaaatttgtacaaattcttaagctttacaatcatgcgtgcctctctgtacgtatattatactttaattaaaagttattaaagtattggggccgagcacagtggctcacgcctgtaatcccaacactttgggaggctgaggctggtgcatcacctgaggtcaggagtttaataccagcctggccaatacagtaaaaccccgtctctactaaaaatacaaaaaattagccgggtgtggtggcacacacctgtaatcccagctacttgggaggctgaggcaggagaattgcttgaacccgggaggcagaggttgcaacgagccaaggtcacgccattgcactccagcctcggcaacaagagcgagactccatctcaaaaaaataaataaaaaataaaaaatgtatcagggagtacaagagaaagtcatataagctctttctacttttcatggtttctatgtctgaacccatgaatcttccttctgaaaggtccaactttcttctttaataacaataataatggcaaaggcattgggggaccgtgagcaaagggcaggcctttgcaggggtgggaatggaaagggaagcacgtccctagaggtgggcctgggatgggggttgggggatgaagcaagtggaccttgaaggtctccacaggtctgagtgtcctatgctccctgggcctctcttcccccaggtcttctcgttcgcaactgcaccatcactgccaatgctgagtgtgcctgtcgcaatggctggcagtgcagggacaaggagtgcaccgagtgtgatcctcttccaaacccttcgctgaccgctcggtcgtctcaggccctgagcccacaccctcagcccacccacttaccttatgtcagtggtaagttccaggcaactctctgtgccatcacgtggggtagcggtgataccccaaccagtactccccactcctacccctagataaggtcagcctgtttctgccttcccatcccatccagcacctctcaggccttcagatgtgccctatggggtcccctgctgctactcattctgtctctgtttttccagagatgctggaggccaggacagctgggcacatgcagactctggctgacttcaggcagctgcctgcccggactctctctacccactggccacgtgagttttctccttaatccccaccgctagagagaatgcatacacgaggggccaggagggaagccagacagaaagctcctaggattagggataagaggaggggaaaaagcagagtccactgtttaggagaggagttggccaacggtggcgggtgggatagaataaggtgggggaaaggggagaggcaaggtgacaggagggctgggctgagggagccaagggctagaccctcccctaacccctgtgtgtcccctcctattacagcccaaagatccctgtgcagctccgattttattcgcatccttgtgatcttctctggaatgttccttgttttcaccctggccggggccctgttcctccatcaacgaaggaaatatagatcaagtaagagacagaacacaggcctccggtcctgcccctgcaccacaccccactggctcaaccccactgcccacgcctggaatctcactgaaacccaccagctccacttcaccagccttggtcctaccccttctctccccttagctggcgtgctcctgacacccctcccccaagcgcacccgcctctacccatctccttctcccgtctccccctgcccccactgctggccaagactcatcggatctccttctgcagacaaaggagaaagtcctgtggagcctgcagagccttgtcattacagctgccccagggaggaggagggcagcaccatccccatccaggaggattaccgaaaaccggagcctgcctgctccccctgagccagcacctgcgggagctgcactacagccctggcctccacccccaccccgccgaccatccaagggagagtgagacctggcagccacaactgcagtcccatcctcttgtcagggccctttcctgtgtacacgtgacagagtgccttttcgagactggcagggacgaggacaaatatggatgaggtggagagtgggaagcaggagcccagccagctgcgcctgcgctgcaggagggcgggggctctggttgtaaaacacacttcctgctgcgaaagacccacatgctacaagacgggcaaaataaagtgacagatgaccaccctgcagctctccagcttcctctctgaaatcccagtcccaaaatccagtttcctggccgcctcctggctcaggtcaggatctggcagaggaggtttctcagccggttatgttggggcctgcttaagggcgggggtgagaaaggtccccaggctactgtggatcctgtgtctgacttcagatccccttttcccacagttatagctccacttttttgggacaggtggggagcaaaagggtgcagaggtcaggtcttgaaatcaccaggggatttccgggtgaggtgggtggtgagaaaggaaacagcaagcagggctctggcagctgctgcagacggcttcacacagggacgcgggctgccatcttgctctaagtgaaagtgaaagaaaagtcggcagcagagggaacagggaagaaacctaaaggctgcaggctgccaggtgtgcttggagagcccccttcttccgccgggcctcgcaagcagcgtaggactgtggagaagggcggtgggcaaggagggaactcgagagcagcctccatgggcacacaggagggctggtgcctgctgctctgcctggctctatctggagcagcagaaaccagtgagtctgggagtcggggagagctggctgggagaagagctactgaagccccagggtgccaccctccccgagattccagaagagcaaaggggccggggatgaccccatcgccttctaagcccaacaggggaaaggctcagcggctggcaaaggaaggaaccaatagtgtgtgtggagggagggtggggactccacagggaaaatgctaaagaggggctgcctctgtggctgtggtcaggagccactgtcctacagagagggcactggcctgggagctgacacttcagaagaggaaaggactccccaggtgaggaaatcacttggaaggtgaccttgaaggcgggggaggggaaggctacccgaaatgggagaaagcagtgcaggctgtcagtgccccagcaacagtaactgtccagtctcctctctctgcggtggcacttgcttgttttctgagaattcctttgactgaaaagatagtcttttattcaacagttggaaatgcaagcataaactcctctgagcaaggcaaatccaggactttaactctcaccaagaagtatttgcctggactagcaggtgctctccagaaagctggtttggggatgacgggagaatagagggacacagaaacagctaggatcttggatggcaacttttaccctttgatgactccacagcttgagggcgggggcaggaagcaagtgtggagtagctttctggggaaggcggtgctcaccccagcctttgtctgcagagccccacccagcagaggggcagtggcgggcagtggacgtggtcctagactgcttcctggcgaaggacggtgcgcaccgtggagctctcgccagcagtgagga

SEQ ID NO: 5811 - DNA, 6000 bp, Homo sapiens
atgtgtatggcggggggggggggcgcggtggttgctgaggggccgtcacacaggtctcccggaggcccgcggagtgaaacggggggagccaatgggattaacggcggtgggagaggggctgtgtgcgatctgccaaggtgcgcccgtgtggccctccggcgggctgtgcggtggcatgtgacttcactgagtaggtgtctttgtatgtctgaaatccagcgagtgtgtgggactgcccgtgtcagttacatgtgtgcatgtggagacgtagatgttctggagccatgttgtcgctttgtgagtgctgagtggctccgctgtgctcccgtgctgtctcaagagtgtggaccagaatggcccaacgctgggccatgtgtctcccatcgcgtgggtgctcctctctaactgtgtctgtgcatggctgtcggccggtgtcggtgtgtgtgcctgtgttgagtaaatgaggccagagggctgcttagcagaagacctagggcccaggtcacatattctcctggaaaagggatcatggaaggacagtgaccagaaggacagaacaggggaggagagggcccggccccttgaactttggtctctggtattctccctccctgcatcagcccagatgggaaagtcaggccagggccatacagacttttggtgctggggcccccagagagaagctgaccagctctttgctctcctggcccaggacgtagggaagagccccctaggtagtggaaatgccatactgaccttgtggcacagaaatgaagacctcacggtggggtggaagggcaccctctctggagtgagagtgaagagttctgagctacccttaaagggagaagggaattgagtgccccccagggcagccgttctgcaccaggctcctctcctatcccctatcctgttccagaaaggacccccccgcccagggtgatctcacacaggagacttccattcacatggaatcagatacacagcgtggcacaccaacaccagatcagatcacacaaggacacctaccgtgttacactgtgcctgccaaggagtgggtggggagagcactggaatctgaattgggaggctagtgtagtgtccagaagggactcagatgtgccatatcagcacaggacgtcaacctatgcctgctaggatcttggggtgaaggagaggggctggctggtgggagggtctcctagactggtccctccctcttctccattcctatcccaccccagtcacagaccttgtttgttgctctctccttgtttcccacgcctgctactcttcccctccttgttttctcttctacttcacctacatttccaccgtaaatggctacttccactacacccatgcatacaccatgggaggcagggatagaggaaactacttgaactgttttggggcggggagggcagaaagtgggaggggtgctgggaatgtgctaaggtgtagtgtttggccaagtaggggcctgaggattagggagacacagatggagagaaacaaagaccttagaagctgaaggggaagctgggagggatgcccaggagagagagtcctcaggaaaaggccccagaggtagacaaaaggcagagctgggcgggcagtggcggggcaggcaagggaggcggagggacacaggagggggcggggcactgaggctgcaagcagatggagaggatttgctttgctgagctgaactcttcagccagtgaggtttgggagaacttgatgggggtggggatcattaccctggttgcccgctcctgcttcttcatccctttcccacctcaccttgggtcttggggaaggaggtgtttggtctcaaccccttcatggccctaatgtaaggaccctagggcccctattctgtctctaagctgtggccaccttattcagttcacacacctctaagctcactacagagggagaactggggctgcagggacttaggggctgcaagccatttgtggtgagaaaggtgacctctttctcctttgcaggacctgaaggagaagaaggagaaggtggaggagaaggcaagccggaaagagcgaaagaaagaagtggtggaggtgtggaggggtgggggagaggaccacatctgccctaccatcttccctcccaatcatctcatccttcctctgctttccttccgagggtgctgggtcctgccgttcccctgagccctgtcacccttgctgccccaccctgtggcccatcccaagcccttttatcacccaggctccagtcccattggtggtgatggtgggcaaggcatgcagccagcctgaggctactccctctcctggtccccacaggaggaggagaacggggctgaggaggaagaagaagaaactgccgaggatggagaggaggaagatgaaggggaagaagaaggtggggaggggcaggggaggctgggctggcaaagtctgggctcaaaggagagcagagtcagggtgggtttgaagacctgaagcagggctgagggcgaccacgggggctctgccagagcttcctgcccttccccaatgacccatttctggctcctcagatgaggaagaagaagaagaggatgatgaagggcccgcgctgaagagagctgccgaagaggaggtttgggctgggttgctgggcctgaggggctgtcagggatgcagccgggctgggcgccctttggatttggacccagatccctgtgtggcaggggtgggggctggaacaggaccgggacagggggaggtctcccctcccattttacagctcccccattctctccctctccacaggatgaagcggatcccaaacggcagaagacagaaaatggggcatcggcgtgagcccctgccaacaggctggggttgggaggcctctctgggcctggaggtgggggtgggggcagccaagtccagccactcttcacctggctccctgctctgggccctgcaccagagctgccaccctcttctttctccccagccttctcatttccgcctctccagacactgcgccctccaccctcactctgccattgttccacctcctgacctgctccatctgagctctccagctggcccccaattgctcctctctctctttgctctctttctccctcccctaccagcctcattcttcctccggtagcctctcccacctaacctctgcatcccccagcctcatgtcctgccccatccctatcctgcctgatccctggatctccctcagatcccctcttctcagacagcgccaggccggggtggggccggggttggggccgagccccacagctgcccccctcccctccctttttgtataatttaataaagaaatggtcgcgcttctgtttttaacctgtctcctgctttcccgggggctccagtcagtgcgacaaaagggtagagagggaggagggtggctgacctcccattctgccaggacccttccctttgatacaaaagcagcagcacactcctaccacccacgactcaagaagacaagatcagccctccaggggtggcctggagcccagctcttctgagagctgacttatgtcctgttttggattctcagggatgctcctccccagcaatacacacttccctgctaacccacacaagacctagacactgctgagcccagtggaaagctaccagctctattgtgctgaaccaggcacagagaaacagcccagaaacaggaagtccttcccctgagctgggagagggctggtagtcctgggtctcagcctgctaggatctggagtgagctgcctggcatcagagatgccctctgcctggcatggaagcgagctccttccagtcaagcagggaaatcctgggtctcgtgtcatccccaggtcggctgtatgtttcgtcacctgccctccaactctccctgggctgggctggggagcgggagttgtatgactcttgtcagtcttgggccttccctagtcccactgcctctgtttcccctgagtttgatctctgttaggagatttctaagatttctgcatttctccatctccgcatggcccttgccttctcctcttagttcggaacctctggactggaggatgcttctgagggcatggggacctgagttggagtggggaggggtgttgactcatcaacagcatcatttctcccaggagacgcccgtaactcatccaaggtcaggactacacactgtcacgcacacaggtacactcacagcttttatcttcacgctccctaaccttggcaaattgtacaatttctttgaagctcagtttcctcatctgtacaatggggaaaagcattagatttcatgaattactataagtaaagtgtccaatacagtgcttagcacgtaatgaagcctcaatacaatgtagttattctccatgccccacaaagctggcatgcctagcctcagacctaccattttttggggtgcagtaaggcttcctgtccaccatgttcccagggacattgtactgatgggtggaaaggcaggtctaaaggggtcacgaagttctgggaggttaagggaacgaggaaggagattgagcaacaaggaaagagcttgccaagaaggaggtgtgaatattgggactgaggaggcagcttagagatgggcaagggggcagttccaggcagaaatggttcgtggaggcagaaggtccctgggagagggagcagtctggagggtggggcaggggcgaggagggggaggtggggagacccaggactgaggaagtaaacaaggggagcgccaccacagaggtggagaggtggagggtgctgctgctgggaatcaaccccctcagactttccactgcgaagcgaaaccgtaagccctggggtgcggggggcgggccgggaggaggggaagtggggaaggtggagggaaggccgggcacaggggtgaaggcccagagaccagcagaacggcatcccagccacgacggccactttgctctgtctgctctccgccacggccctgctctgttccctgggacacccccgcccccacctcctcaggctgcctgatctgcccagctttccagctttcctctggattccggcctctggtcatccctccccaccctctctccaaggccctctcctggtctcccttcttctagaaccccttcctccacctccctctctgcagaacttctcctttaccccccaccccccaccactgccccctttccttttctgacctccttttggagggctcagcgctgcccagaccataggagagatgtgggaggctcagttcctgggcttgctgtttctgcagccgctttgggtggctccaggtaaaacggggatggcgggagggttgacctccagccccacaggaggggaccagcagggatctctgtggccacaaaggtcctgaggtccttagctctgtggattcttctaatcccttttttgggcagtccttccaccccgaaagcctctctgggcagagaagaaacagaaacccaagttcttcctgcaccctgtttctccctcgggaaacacccaggctccttctctacccctgcctctcggctcacgccccctccccttggcctctcttttgctcacctagtgaagcctctccagccaggggctgaggtcccggtggtgtgggcccaggagggggctcctgcccagctcccctgcagccccacaatccccctccaggatctcagccttctgcgaagagcaggggtcacttggcagcatcagccagacaggtatgcaccccaaacttgggcaacaggacctccgaatccagcactcaaccccacacccgtgccggtcctctgtcccctgccctgaggtgtcactccctctgaagccagtgacccagtctccctgccctcgcttgcaccgttcctgcccttgctctgcaatcagcgaccctcacgccagcatcccttctctccagaagtggatgcggccagtccaacagaggggtcgggcgtgaggggacggttggtgg

SEQ ID NO: 5812 - DNA, 6000 bp, Homo sapiens
catagcaaaaccccatctctaggggaaaaaaaaatttagctgggtacagtggcacatgcctgtagttccagctacttgagaggctaaggcgggaggatagattgagccctggaggttgaggctgcagtgagctgtgaccgtgccactgcactgcagcctgggtgacagaacgagaccttgtctaagaaaacaaaaaactcttcaagcctcagtttcctcatctgtatggcctggacaataatacctatgtcttatcactctcatgaggattaaataaaagatacaaccacataaagcacacaacaatgccaaatgtttactataaactcaccctctctcttccttttttcttttcctgtttggaaaccccagagagagagccaggttctcaggaccgttgacttccaggccacagactcacagagctgcaagttctcacaccgtccatcgggtctggaatctgcaaaccggtgggcccaaagctagagccagcccttggaatgctctgtttgctctacccagtgtcacgacaagttgaaaaaatttgttaccaatattaaaatcaggaggtattacataaatgtctggttttcaccttctctagaaattttggcagagcaggcaactctaggctcacatgccagtatagcctctacggtcaactcagacagctatgcagggaatggctgcccttaactagctgaggcaagtactctctggtttcccccagtccctacccttcccttttggtcaccaccagtgtacctttctcatttgcactacctagggggctcctgtaagcatttacatttgtagccctgctctcctgctcttgtccatacttctctatttatccattcaaaaattatttggcctggtgcagtggctcacgcctataatcccagcactttgggaggcagaggcaggagaatcacttgaggtcaggagttcgagaccagcctggccaacatggtgaaaccctgtctgtactaaaaatacaaaaattagccaggcttggtggcgcacgcctgtaatcccagatactcgggagtctgaggcaggagattcgcttgaacctgggaggcggaggttgcagtgagccgagatcacaccactgcactcgagcctcggcgacagagcaagactctgtttccaaaaaaaaaagaaaagaaaaaagaaaaaaaaatattattcaatagccaggagttgcagggagttagaatgaggagtcagtatttaatgggtacagagtttcatttggggaagatgaaaaatttctagatggttacacaaccatgtgagtgtactcagtcccacagagcagtacattaaaaaatgcctaaaatggccgggtgtggtgactcacacctgtaatcccaacactttgggaggccaaggtgagcagatcacttgaggtcaggaattcgagaccagcctggccaacatggtgaaaccccgtctttactaaaaatacaaaaattagccaggcgtggtggcgggcacctgtagtcccagctactcgggaggctgaggctggagaatcgcttgaacccaggaggtggaggttgcagtgaacctagattgtgccactgcactccagcctgggggacagagtaagactccgtcttggaaaaaaaaaaaaaaaaagcttaaaatggaaaatcttatgttgcgtgtattttaccgcaataaatttaatatcaataaaatttaatatattaggaaaatattaaacaagcattaagggtcttccagggccaaggcatctgtgagggtgctgggaacatagtgctaactaagacagacacggtcaccgctctggcctgtgagctagacactaagcagcaaataacttcattgcaactggaaaattgctacgaagggagaagcacaggggactgggagatcttatcacaaggaaaactgatttcaactgaggaacctgagtatcctctgagactctggggaggaagtcctgtgcaggagaatggtagagcaacaaaatataaacagccccaatcttggccctggaggacggcgtgctgctccctctcttctgcaccacccacctccacacttcctacatgtgaaaaataacttcaatcttgttgaagcctctattattttgggttttcttttgcttgtagcagaacccagtgcttaccgatagacaattctcccagttgaaagaaggttcttttgtgataagatctcccagcaccttgtgctttttcctttgtagcgcttgtcgaattgtaatgaagttgttcgttgtttagtgtctatgtcataagctggagtggtgaccatatctgtcttcttcaacatcacatccccagctacctagcagagtgccttgggctggtacacgcttaactacgtacatgaatgaatggagcagggctcaaaacatcaatgcctaccagagcctgccaggtaatgtaaatgagaaaagcagactggctgtgaacaatagggagggtgtttgctttctagtctgaaggaagaaggcctgaggaggatacattttccccactttgaggagcaactctgaggttgcacctaatactttcacttctatctattaaccaaaattgagtcacttggacacatccagctgtgagggaggctgggaagtatattttaaatctgggtagctaagagctcagctaaaaattgagggttctattaccaagaaggagaaaatagactttggggacagctaaagcgatagctgagatctgaagaatgaataaaaattacctagatcagtggttctcagagtgaagtgtggcctgcagacccttgggagtccctgagaccctttcaggggatcttcaaggtcaagctattttcataaaaaaatacaggatgttattttcctttgtcactatgttgacattgcaataatgttgcaaaaacaatctggataaaactgctgccttagcataaatgaaggcagtggtgccaaaccatatgatagtcattgcattcttcactgccaggtacttacagtaaaaaaagaaaaaaaattaatgccacttttacttaagaatgcccttaatgaggccgggcgcagtggctcgtgcctgtaatcccagcactttgggaggccgaagcgggcagatcaggatcacctgaggtcaggagttcaagaccagcctggccaacgagtgaaaccctgtctctacaaaaatacaaaaattagccaggcatgttggcgggtgcctgtaatcccagctactcgggaggctgaggcaggagaatggcttgaatccaggaggcggaggttgtagtaagccgaaatcatgctgctgcacttcagcctggatgacaaagcaagactctgtctcaaaaaaaaaaaaaaaaaaaagagagatcaagaccatcctgggcaacatggtgaaaccccatctctactaaagatacaaaaattagctgggcattgtggcgcatgcctgtagccccagctacttgggaggctgaggcaggagaattgcttgaacccgggaggcagaggttgcagtgagccaagatcacgccactgcactctagcctgggcaacagagtgagactccctctcaaaaaaaaaaaaaaaaaaaaatatatatatatatatatatagaatgcctttaatgaagcagtaaatactaattttattaaatctcaacccttgagtacggtgtgtcatgaaatgagaagtagcacacagtactatatgctacagatgaagtacaatgctgtcaaataggggtacttgtgttaattgttggagtcgcaagctgaactagagttttcttttcttttcttttcttttcttcttttcaagacaggttctcactctgtcactcaggctagagtgcagtggtgcaatcacggttcactgcagcctcaacttcctgggctcaagcgatccccccacctcggcctcctaaaatgctgggattataggcatgagccaccactcccagccccacttttttcagactggaaaacgcacactcacatgtgcatctttaaatgatcacttgggctgtggtatggagaatggcgaccagtgaggaggcaggagctgttgtccgagcaagggatgatattggcatcttggattggcatggtggcagtagtggtagtgcagagtgacttgggtagattttggagccatttagaaggtaacatccacaggaactggtaaataaatacgtgggagaagttgggtgaagggggtgtcaaagattacacccaatttattttgcttgggcaagttggtggatggtgagcccctcactgagtgagaagcctggagaagcaggtttggagggtggtagtatgcaggtggtatgcatagttggggatgtgtgttgagtttgctatgtccggtgagcttcccagtggagatgtccaatgggcagacggatactcacatagagagttcatggtagattcgggctagaggaaagcacctgaggcctggccagagacgcctagaggaacagagcctggttaacagtcactcctggtgtctcagatattctctgctcagcccacgccctctcttccacactgggccacctataaagcctccacagatacccctggggcacccactggacacatgccctcagggccccagagcaaggagctgtttgtgggcttaccactgctgttcccatatgcccccaactgcctcccacttctttccccacagcctggtcagacatggcgctaccactaatggaatctttcttgccatctttttcttgccgcttaacagtggcagtgacagtttgactcctgatttaagcctgattctgcttaactttttcccttgactttggcattttcactttgacatgttccctgagagcctggggggtggggaacccagctccagctggtgacgtttggggccggcccaggcctagggtgtggaggagccttgccatcgggcttcctgtctctcttcatttaagcacgactctgcagaaggaacaaagcaccctccccactgggctcctggttgcagagctccaagtcctcacacagatacgcctgtttgagaagcagcgggcaagaaagacgcaagcccagaggtaaggtggtcagactcggcttccttccccggagctgagagggaggggaacgtggggcagatgcacaggaatgtgctctgcccagttgtctgcccacagctctggccaccttctcttgcatttctcttggaactggtcatgagcagcgatttcccactggaactgtgagcttccagaggtcagagactgtgctagactcctctctgcagccccagcgtgcacagctcagtgtccagagcaatgggtgctccttagaggagtagtgacctaaatagcaagatcagagagggagtgaagactggagactatcccaggctgggaaaggcgtggaaggcaactagtcgtgggcagttgaggggagaagactggaagaggggaaaagaggagaaaaagagtgaagaaggggagggaaaaaattagaaagaataaataaatataaggtgggaggaaacctataaaaaagaaatgatgaggaaaaacataaaaacaagaaaaagagcaaaagaagtggaatctagtctagagaaaattcttgcaaaaccaattttccttaacgggacaatctccaaaaattgacaccaaatatcatacttgcagcatttcataagtcgcatgatctatgtaatagtctcttttaactaccttttgtgtttctgtgtgtatttttaaatttttgtctgcttctttgctcttttaagatttttgaacaatgtctaaaggcacttctactctagttagctttaaaatgattcatgaaataggaaagctaaaattctcagaaagtgttgaaactgagcttttgcgtatgaattgccctaaaagttgcagatacatatctttagataaatatgtcatttaagaaacggattcgaaaagaattggtggtaggggtctcatgaggccggga

SEQ ID NO: 5813 - DNA, 6000 bp, Homo sapiens
ccttctcaatcttactctcctgtctcggacaactgtcttccagatctgtcactatctgaggggtcctaggagaggcagtcactagatatttctcccagccactaagttgtgactggggaactttactcttttcacatgcctttctaattatgcctgaaagccccactcctttgttagggagagatattctagcaaaagcaggggccattatacacttgaatataggagaaggagcacccatttgttgtcccctacttgaggaaggaattaatcctgaagtctgggccacagaaggacaaatagacaagtgaagaatgcctgtcctgttcaacttaaactaaaggattctgcctccttcccctaccaaaggcagtaccctcttagatccacccagctctctgatggacagcccaacaagccccaacttggacttcaaaagatcgttaaggacctaaaagcccaaggcctagtaaaaccatgcaatagtccctgcaatactccaattttaggagtacagaaacccaatggacagtggaggttagtgcaagatctcaggattatcagtgaggccgttgtccctctatacccagctgtacctaacccttatactttgctttcacaaataccagaggaagcagagtggtttacagtcctggatcttaaggatgcctttttctgcatccccgtacatcccgactctcaattcttgtttgcctttgaagatcctttgaacccaacatctcaactcacctggactgctttaccccaagtgttcagggatagcccccatctatttgaccaggcattagcacaagacttgagccagttctcatacttggacactcttgccctttggtatgtggatgatttacttttagcagcccgttcagaaaccttgtgccatcgagttacccaagcgctcttaaacttcctcgccacctgtggctacaaggtttccaaaccaaaggctcagttctgcttacagcaggttaaatacttagggctaaaattatccaaaggcaccagggccctcagtgaggaacgtatccagccaatactggcttatctttatccccaaaccctactaactgttggatgtgcctccccctgcacttcaggccatacatttcaatccctgtatctttaacctccttgttaagtttgtctcttccagaatcaaagctgtaaaaactacaaatggctcttcaaatggagccccagatgcagtccatgactaagatctactacagacccctggacctgctaggccatgctctgatgttgatgacatcaaaggcacccctgctgaggaaatctcaactgcatgacctactatgccccaattcagcaggaagcagttaaagcagtcgttggccaacctccccaacagcacttgggttttcctgttgagaggggggactgagagacaggactagctggatttcctaggccaactaagcattcctaagcccagctggggaagatgactgtactcacatttaaacagggtgcttgtaactcagctcacacctgaccaatcaggtagtaaagagagctcactaaaacaccaattaggctaaaagcaggaggtaaagaaatagtcaatcatctattgcctgagagcacagggggagggacaatgatcgggatataaacccaggcatttgagctggcagtggcaaccccctttgggtcccctcccgttgtatgggagctctgttttcactctattaaatcttgcaacagcaaaaaaaaaaaaaagaaaagaaaagagttttagacatatgactttaagaggattaagaaaattgaataaatgtttataagtttgatttattaaagggttgaataaaagttcagaaaggttttgcctagtagtgttgtttgccctgtcaggtatttaaaatatgaatattaaatgtcacatagttaaaaatattaggaaatttgtcttttatttctaaaaagcagaagtacagcacagtgtttaagagcatggactctggaataagactgtgtaggtcaaagatccacaaactatggcctggtccctgtttttccatagtctgcaagctaagaagtatttgacgttttttggctgggcacggtgggtcacatctgtaatcccagcacttcaggaggccaaggggggtggatcatctgaagtcaggtgtttgagaccagcctgaccaacatggtgaaaccccatctctactaaaaatacgaaaattagctgggcatggtggcatgtgcctgtagtcccagctactcgggaggctgaggcaggagaatcacttgaacctaggaggtagaggttgtagtgagccgagattgcgccactgcatgccggcctgggtgacagaacaagactgtctcaaaacaaataagtatttgacatttttaaatagttggaaaaacatcaaaagaagaagaatattttgtaacatgaaaattatataaaattcacatttcagtccccataaaaagcattactggaatacagccatgctcatttgtttaggtgtggcctatgtctgcttttgtgctccaacagcagggttgagtcactgtgacagagactgcatggactacaaagccaaaaatattgaccattgagccctttacagtttggtgaccgtggtctgggttcaaatcccagctctgctatttattagtatgaccttgtgcaagtcactcaacttctctgtgcctcagtttcctcttttgtaaaatgggggataatagttattattaataactattaggaggattaaataaatcaatagttgaaaagtgcttgaaacaatgcctggcacacagtcaatgcaatgtgtgtctaaacatctattgaacttgaattcgtcaaacattaaagaataagtaaaaattatttttattttataaaaattactacttttatgaatagaacaagaatttaaagttgaacctggattaacaaaatctagggtttcaaatctagagcttcagtaaattaaatattaaacaccaaagtcactctattagccctttcccagcacctctggctgggactgtggaccaagttctgtgaatgattctatggcctaggagatcaaagatctccatggtttatcagtaagtcttctctaagactgggaagtaggtgcctagagttatgcctggattaaattttgacttcctagccatctgattttgcacaagtcttatctgtaaagtgggtctactaatatctatttaataggggtattaagaagattaaaaacattgagatacataaagtgttttacacaacacctggattttagtaaacatcagttattattattagcattcttccaagatctgcacacaaagtgagttacggctaatcagttgataaactcctagcagagcagaaggttatgtgtgttgtgatgtttaagtggtactgggaaactctggttgccttgaggttctgaaattctactgtatcagatgggttcctttaaacattgctctctctagggggtcctctttttaaaagtatgcaccttctggagggcatctcttcatccttgtgtggtttagtttatcaggtattttcctcacgatggcagcctgagaacaggggacgcccaagggctgggatttgtgtgctccggaagaaaacggggtgtagaagtggggcctctgaaagagggcgaaaaggcaaggaaaaggagaaatgttgcacagtcttatggtctgtcccctgccattctgttcccctgaggtgtcagagcagcttctctgtcttcccagggatgagtttacacagacattccctgtggccccctgaggcctccacctctgaaatctgcagaacagccaggaaacaagcccggcccatggcgccacctgctgcctgcctgcctccgctcatgcaccctgggctgggatggtacttctgttcgtctggcattattgcccttggtcatttaccggcagccctgggcccctccttgctcttctccatgacactaggactcccttggtcttgaagctgggtgagattatcagggtttgtttctcaatgactttgaggtttgacagcagagcacactctttggcagatgagggggcttgaggcttagtcttattccgtgattaaaagcatttcttgtatgtttgtcctttcccagcctggagtgatgggaataaggccactatgttgacttagcggaaggaagggctgactcactgttcaccttccctgtacgttaccagctcgaggtctcaggatgcgttggaccctattttggtctccggaatttgtcatcatgcagtgctattttccccattatgcagaggtggagagggattaaggcgggggcgggcccctgtctccatggagacagtgacgctaccccgctaggggttatttggaagcggggcaggcctaggaggctgaagaaggcttcggactggactccccagcccctggtgttagggcttttctctttcttgggcttgggaacattagccagccccattttagaggggaaaactgaggctcagaaagggcactgaatccccttaggtcacaatgcgcccaagggaagaggcaggatcgactgagcctaggatctcgcgtcttcggctttcccccagagcctgggaagcccttcttagctccactcttctttgagctttccgtcaaacaaatcctagggcccgtggccttttcgagcgctcctaaaggcgactctccaagacccgctctctaaggtgctcttcccctttaagactcacggctcttcccgtcaggctgcgtcgcagtcttaaggccccgccttttcagacagcttccgctgggcctgggccgctgcggggcggtcacggcccctttaagcctgagccccgccccctggctccccgccccctcttctcccctcccccaagccagcacctggtgccccggcgggtcgtgcggcgcggcgctccgcggtgagcgcctgaccccgagggggcccggggccgcgtccctgggccctccccacccttgcggtggcctcgcgggtcccaggggcggggctggagcggcagcagggccggggagatgggcggtggggagcgcgggagggaccgggccgagccgggggaagggctccggtgacttaaggggagggaatgctcctctgccgtgctcaccgcgtgctggggctgcgcggggctaggtatggtcgggctgttttcccactgtcccttcttcgggcagtgtcgccgtccagcctggttgttgaagcgtccccgtggtcccccggggtccaggcccctttgtggaggcagctgctggcccccagcccatgggaccgtagtcgcggaggcctctgcagaggcgcaggctggaagcggtggcctttgaggggggcggcaggagagagtaccgacctccctcgaactcctggcagaggtgggggtcgcagcaaaagcactggggtggagggcggccagtgtggggcagacgcctgtgtgccttcctcagatacgggcagagttgtggatgtgagaagggtctggcttgggtacctcagttccaaacctcctgtgtccatcagagagctggcggtcaccatggcaatgcgggagctggtggaggccgaatgcgggggtgccaacccgctcatgaagctcgccgggcacttcacccaggacaaggcccttcggcaggagggattgaggcctggcccctggccccccggagccccggcctctgaggcagtgagtgttcttgaggtggaaagcccaggtgcagcctctgaggcagtgagtgttcttgaggtggaaagcccaggtgcagcctctgaggcagtgagtgttcttgaggtggaaagcccaggtggtggtggtctgaggtggaggggctgtttgcacatcttggtataactgctttctctattgtgttgcaaatcatagtagttaccacttactgagcgtttataaacactagaaaaccctgtgcacctttaaataaatgcaacc

SEQ ID NO: 5814 - DNA, 6000 bp, Homo sapiens
tcctataaaaaaggcatcatgcattgctggtctatctcttgcccatctgccttctgccatgtgaagacatggagttcctccccttagaagatacaatcatcaccagataactgaatatgctggtgccttgatcttgggcttcccaacctccagaactgagaaaataaatttctcttctttataaattacccagtctcaggtattttgttgttaacaacactaatggactgagaaactgatatgagctataacatggatgaacctcaaaaacactaagctaataccagctgaattagctagccttgctgcaaaaatggtcttagtctcatctttggtgaaaataagatagattttttatttgtttgcttttgttttctgagacagagcttcgctactgttgcccaggctggagtgcaatggtgcgatctcagttcactgcaacttctgcctcccaggttcaagtggttctcctgcctcagcctccctagtgtctgggcttataggcatgcaccaccacgcctggctaattttgtatttttagtagtgatggggtttcaccatgttggtcaggctggtctcgatcccctgaccttaggtgatccacccgccttggcctcccaaagtgctgggattacaggcatgagctaccatgcctagcctgtgtctttttattatgaaagaaatacatgcttataaaatatcaaacagtaaaaaatctttaaaaataaaagtgccctatttactccatccttacttctaaatactgagattaatttcacagtgaacagaatggtcacttgccatcatatcaatataaatagtctaacgaatatcttgttttcatgaaattaacaatactgagctattaaattgacttctgatatcaactacctggacttaggccaaatttcacaggttgagggcacgcccttcataagactgccattacttcagataccagccacaagttcaggggttcccaggggtgtcctcactcctgatcaactgactacaaatttggggtttcccatgatcccttcaggttttatgatttattagaatgactcactgaactcaggatagtgccatgcttatgattgcagttttattatagcaaaaggatacaaatcagaaccagccagagggagagatgcatggggtaaggactgagagggtcctaaatggaaatttccattgaccccattgatatatcactttcttagaactttaatgtgtgataatacacagagtattgccaatcaggggagcttcagtgcccagagtttttactggggtccattatgtaggcatgattgattgaaccattggtcacaagttgaactcagtctctagcttcccttccccacctgggctgatataacatggctcagggcttcaatgcgccaatcacatgactggtctttccggcatggccagccccaccctgaatcaccttcttagcataaactatcttagagcccatcatgagagacctcattagcatgagatatacgggcccaccatgaataacaaagacaatcctattatttggaaaattccaaggatttaaaggctacctccaggaagtgggaacaaaatccaggcaaattctttattacctaggttaactgcaacatgatgcaatattcagagagtgaacgaacaagtgaaggcacactgtcagcctctcagagttgtggaacttccagtcttccctcataataggtaccataccacacatgacatgcaatcaatactagtaaagcttatcttccttaaaactttaaataaatgtaaatagatgttttagtgtttttttctctgtgccttagcagatcctcttttatactgcctaaggtacttgtgccccattttggagatcactgcccaagagatctcttggataaataatttaaagggataaggggatagattctattattgtttccaaatgtctgtgttctcctttgtgaaaggattaaactttgatacccttgacatgtctttctgtagacaaagtatatttccctgtctcacttgcaggtttgttcaggtaacttgcattggccaacagaatcagagcaaatacaacgtacaccttatctgaataaaggatgctactacatggttcagcttacaaggagctattctgtgatctcagcttccagaatgagaaaacacttggagaggggccaagcagagttgcagtcaactccaaggtggccctaagcacaagtgtaatgtaagtgagaaatacatgtttgttgttgtaagccacttggattttggggttgttggtgatacggtgtaatccagttataatgtgacttattccagggagagagctatagttttaggaatatggtttgctttctaattatgagcttagattgtaaagactctgagaatcaatgattgttatttcagggaatatgtgtgcatgtatacctgtctacgtgcatgtgctggttaggcccaatcattaatttgtggagaacttaaaattcccttatccttcccttatgctttgtcattcccctttcccttttcttactaaataatttgattctaaataaagcagtagcaagataggtgtctatggtgaggtggctgggagagcagcagtggcctggcacagggggagagctttagcagggtgagaagggtgactatgcagggtattggcttgacagtggttctggagcccaagcagagtgagaagaacatcccttaggggtgggaaagtgtcctggcatggggaaccagagcgaggagatgtccactcctggcaatggcccagtgcagggtgtcagaggataagattgaggagggtgtccatagtaggggtagcctgatgtgagaggtcagagtctgagaggtaaagaaggcatctatgtggtgggatagtcaggtgcagtgagttggagtgcaagcagggtgaggagggcatccatgtatgaggttaccttctatagggagtcagagtcgcaaatggctgagcagagtactctagggccagcctggtatgtatgtcagcatgtgggagaggtgaggagggcacccatgcctagtgttggcccagttggggttgggactcagcacttaagcaggatgaggagagagagcatccttgcagagggtagacctggtgtggtttcagagaccaagcatgataaggagggtgtccatgtggtggggtagcccagtgagggaactcagatcctaagtagggtaagatggacattattgctgggggatggaggacctgcatggagtgtcagagcccaagcaggatgaagaaagcttctatgcagagggaggacttggtgtgggtttcagaaacttagcaggataaggaggtggtccatgtggtaggatagcccggtgaggaaatcagacccctccagggtgaggagggcttccacccatagggtgaccttgtgtggagcattagaacctaagggggtctaagtggtgactaggggaccagcatcaggaatcagagtgcaagcagagtgaggagggctttcctgcagaggaatggcctagcacagggagtcagagccttggcagggtgagggggatgtttgttgggggatgttcatgggggtggggagtgggctggccctttgccggcactctcagagtgaggagggagggcatccgcgcaggggatggtggcttggactggggagtcagagcccaactaggaagagagggacatcttagcaggtgggagattgacgacatccaggagattgatcaaataaggaataagtgaaagacaatgaaagcaggtttcttagtgtcacagaaaggagttaggaatgtgggaagggagaaaactagaatgaaacttgtggtgttagattggaattagaggaattagtgtgaactcatggtgttcaatatatttagatatagaaataatatagaaatatagacgtgtgtgtttgtgtgtgtgtgcatgcatgtatgcatgtgtgttatgcaggagaaggaatcagctgggggagattaaaaggaggatcatttgcggagagttgagggcagagaatccaggtgtgagctgggagcatgtctatggagagattccacatgaaggatttaatatttggagtgttttcttctaggcctttggaaaaagtcatatttagtactttgtttaagtttatccccttctatactgtgattctatataattctcctaactgttaaaaaatagtcatatatattggaggtgatgtggcgattaaaaggttagggaagcatggaataaaggctggccttccctctcctccaacatccagtaaagggagctgctttctggagattctagcaagatgaatgcagacttttgatagagttagttaccaacaaggaaacacagagagcatggaggaacagcttcagaagacatggggtttaaactttgccatccccaccatgctacaggaaactaattcgtgaaggtggggaggctgatatgtgagttttgtgtcaatgatactcttagaatgtggtactaacaagttgcctgatcagtcaaaattgatgagatgaatgcaacataagtctatgttcaggatgtttggtcaaaagtaattacatttgtgtgtggaagcacagaaattgtattttttactggtgaaaaacgcagttctccagaaagactctaagtgcttggttcttcttttatttttcttcctctttccgcaaccctttgagttcccacttttattgcatttgcttgcatttgtttcaaggctgtgattctcactatactggtcctgaggaaagggcttctgtgaactgcggtttttagtttttattgtggttcttagttctcatgagacccctcttgaggatatgtgcctatctggtgcctctgctctccactagttgagtgaaaggaaggaggtaatttaccaccatgtttggttcctgtttataagatgttttaagaaagatctgaaacagattttctgaagaaagcagaagctctcttcccattatgacttcggaaatcacttatgctgaagtgaggttcaaaaatgaattcaagtcctcaggcatcaacacagcctcttctgcaggtaaagatcattttctaggggtcagagtgaatgacgaggtgaaggatgaggagagggtttatgaataaggcataggtgttttcagttgctggttgtctgattgagtatgtctgggaaacacaagagtcccagaagattgagtggcctgcagatacgcattacggggtgtacatttgtattgtggagaagaaaagattttgtgccactctcttcagcctccactctgcttactgaaacagaggtgagagaaatccactccagttctgagctaaggcgagtgctctgatgcccctgtgttttctgaggctgagtggggctggggttaagagattgagtacagcttctgaaaccatcaatccagatgcagggggtcctgatgaatttgtgagatttgttttttgatcagttagagggaaagagtttgggtggacagtggtgagggtatatttgttggtaatggatggaaatgtaacaaaaggcctttgcaaatgaaagactagaaagtctacaaagaaagtctcttaaatctccaggaaactttttctgaaatcagagaacctattgcgtgttgcatctctgagacagactctgttacgtttgggagtagatgcaaggtgatttgggtgtcatgtgtgatatctcaagtatagagcaaaagagagaaaagaatgtatatagagtacaagaaactatgggggaaggggtcaggactatagttacgctttctaaaatacctctgtgaaggtgtggagagcacttagggaaattttttctccttaaaaactttatataatttctttattacacaagtattaatgttcattgtagaaaaaattaaccagaggtacacagatatttgaattataattactcttatcatctagagaaaatcataatttgcaat

SEQ ID NO: 5815 - DNA, 6000 bp, Homo sapiens
agtggtggattgtataaaaaaatgtggtatatatgcaacatggaatgctacatagccatgaaaaaaaaggaatcatgtcctttgtagtaacatggatggagctggagaccataatcctaagggaattaacatcagaacaggaaaccaaatactgcacgtcctcacttatgagtgggagttaaacactgagcacacatggatataaatatgaaaacaatagacatggtggattactagttgggagagggaggatggggcaaggtttgaaaaactatcttttgggtactgtgctcactagctgggtccaatatactcaatgagcaatcctacacatgtaccccctgtatctaaaataaaagccaagatatacagtaaaaagaaaggaccttaatagttatataaaaattaaaacgagacactttttttggtaaaaatagcttatgctgttgatgttaatgaagttaatttttgataaaaatatatataatttttgttatgtatttatgaaaataataacctgttatagagtcaaagctttaatcagaatctcacatgggtcattggcccataagagtttaatcattattcatctagattggtttcaacttcccaacaactcaactccactactccaaacccctgataagggttaagggaaaacaaaatcatttagggttaccgaaatgagctgtcccaattccagtaatggtgaactagcttgttgtagaccaactcttgcacgaagaacaactaacagaacaaagtcggcttcaaagcattggggaggtatcatggcactgagggatggggcacatgagggtacaggtgtgaccagtgtggatccatgaacaataaactgccacttttccctccttcaatttctggatctacataatctctagaatcttgatataatcccagggacagaggatagtcccaagaatgacttccaaagaatttcttattatccagtggtaataggaatcaacaataacaaaaaacctaatacattgaaaataatgagatgttatatgtcttgtgtatttgaggatatatgtatatttaaatttaaaaataaactttactgtcaaaaatgcaaacttggggagggcggaaagatcacaaacaaggctgccacttcacatctggagggttgcacggccgcggggcagaggctctcctcacctccgcccctcacttcccagacagtgggtcggccgggcagaggtgctcctcacttcccagacggtgcggcggccgggcaggtatttgaggatattttatattaatttgtgtggacctcatatctgagtctaaatatctcccaggggcaatgtttgtcaccagcaatcgatgtaattgtttttatcttaattcagatacaagagaatcaagttgtgcctgcttagttcaatcatggatagatccaatcatggataccagttttcaaaagaacaacccaatactccttttaggaaaaggatttagttcatattgttagttcacctctcacatctcatttaaaagagatcaagccaaaacaacaattttcactttgtctactggtatactagtatatgcttttattttcaatctctagtagttcccatcttctccattgcttgtttttgcattactccctggacaggctcaaagaacttaatgtttgtttggagatgtggcctgagcctgcccacaattctgcttttgctctgatttagcattctctctcttgattttgttttatattatattatattttatattggtgcatctcttctttttgcctttgctcctaccatttcagcgctcttgattcaaaggcatgtcactgtaatctagaaatttatacaggacaaataaatagaaagaagcaaagagaatggagcatagggttgctaatggtcaagaccagaacgtgattaggggagcataataggagacagatgagaaccaaagaagtgtttaaactactttacctccagatagctgaggagaatgcattcttttactggaccaccaagtgattcaatccttgggtttgtgtttctttgtctctgacgggaactggaaacaaatgttgacatcttataaccacttcttctctcttgtccttttatgatcaaatgcatctcaaattaaccattggggaagttttctgagcttttatcctgttactcaatgtctatttcatcattcgctatagctgtaactatcttgtcactttaaaaatccctgttcagtttaaaaccattgttgagaggtttttatggaggctctattatgaaggcatggttggttacatcattagccattagtgactgaactcaatctccaggcctttttcttccccggaggagtggggctgaaagtttccatcctctagtcacatggttggttcctctggcaaccagcccccatcctgaagcagtcttggggaacatcaagagttacctcacgagcatagacaccaggcttggttaaacttgttatgaatcataaaagactctcttttcatcttaaaattttttttttaatgttcagttaggtaactattgttaatttttttctttcatcttttattgccctggagctatttcagaaacttggaacaaaaaacaaatagataacataagatttttcttacacctttattactctagaacatggttgagaagctgaggacaaaacccaaacattgtaaccaaatcatttctatcaaccaggaagttttagggtttcagaagctctgtgataaacaaaaatgaaatatacatgtttcttataatatcacaagttcaatattctagtagattttcttgtatacaagattgctcacttgagaatgtggagctgtttgtgatgttaatagaatgatctacattttagagactgcatgtgaatgattaagtatttcaaagcccttaggtaatgattggaggaaaccaaaataaccttctctaagataactgcaaattgttgagctgaaaaaggtggcaatgtaggagaacattcttcccctccttcttcttgcctgttggcagaacaacaatttacaaagacaaaggtcttcctgtcttcctttctacttttcccagctaaggattagctcctttacgatacttgtaaaaggatttagaagcagattttactcttcctgttaaaataccttcctgtatttcatttccttttggaatcgtgaagatactctcttctttgtcttttcactatcatcctaaaggaagtagctgaagccacattaatatagagagtttatttgggcaaaggatgaggacagctacccaggaaaacacttgtaggttgccttgggaagtggtctagagagcaaaggaaagactgaagattttaaagaaaaaagaatgaatctgaaaaatcatggaaccatcccaaatgctcatcaatcaatgagtggataaagaaactgtggtatagatatacaatggaccactactcagtcataagaagcaatgtattaatagcacttgcactgacctggatgagattggagactattatcctaagtgaagtaactcaggaatggaaaaccaaacatcatatgttctcaatgatatggggagctaagctacgatgacacaaaatgtataagaatggtacaatggactttggggacttggggggaagagtgggagggggatgagggataaaatattacaaatatggtgcagggtatgctgcttgggtgatgggtgcacaaaaatctcacaaatcaccactaaaaaccttactcatgtaaccaaataccacctgtacctcaataacttatggaaaaataaaaattaaaaaaagaatgaatcaggagagggagtgaattaaaaagttactcatcagtaaattatcattggtttacagaaaccacattgattagtaattagctgtatactgttaaattttagggttcagttagtctagaacctacatagcaaatggcttcaagaggtaaatttcgtgcaaggtggcagtgaggcatgactcctgtcatatctctctcatgagtccactctggacttgatagtttcaaggcactcacattcctcaaataacagttttttttttttttcgttctcagcactccatagatttatggctgtttgttaacatactatttaagcaaggcctgtaagccactgccatgaaagagataaatacatttgaactgagttctctcctgagtgatgggtataacacacattgataaactgctgctttttctcttgtttctctgccttttgttttcaggacagtgtctctactaagaatctatgaggacaagaaaacatcatatattttctgtgctacaatataaaattcatgaagcctgtttctgattttatatcacttcaggctcccttttgcctaatcagggagattacaaaatatcactgacatctgcccaatattagtctggatgcagtaagaatgtttcatcacctttgcagactgatttcagaatgtttcattttgcagtcacattccttaacaatgttcatgggttttgttatttactatgttacccttcatatctaaaccatatccatccaatcaaacttttgcttactacctaggacactgttcaacacatggattaaggcttgcataaaataagcagccaatgtaaaggttagttagggagcacttaatttaaccaagttctctaaatagatgtcttttaggagataaaaaattttctattttgcatgccagaatgaataggaatcagacagagaaattttatgttagaaactgaagaaatgatctaagtattcttgtcaaagttctcatgaatggttttcaatgtttctcaattcctcttttgttttttttaaccccacgtatcgaaatcactggaaactttagttgtaattgtgacttcttcttttgaggtacacttaatgttggaagtctcttagtcctataagagtgtgtagcagtttgtccctgagctctagcttctttaaatgaagctgagtctctgggcaacatctttagggagagaggtacaaaaggttcctggaccttctcaacacagggagcctgcataatgatgcaagagcagcaacctcaaagtacaggtgagtatttcctcagtttcagaggaaagtggaagtgtatggtgaaatgagatcacctggagagaagaagtagccaaagaacagattgaagagctagtgattggaccaatatagtagactcaaaggaatttgaaagaaagagtaattcttcagagccagagccataagcacttgaaagaataagaaagcaaatattttttgggaggtttgtaccagattttattgatagtttagggagacagaaaagatttacatgatagaaggtaaacagggaaataactgattattggatgtctgctcttcaaagtcttttgactaattttgaaatccaggaagcagtactctttccaattaccctaagtttttttgtacttgcttttctaatttttttgtaagagaaaagcttcccatttttaatgcatgaaaatttgactttagcttcaaccctttgcatgtccatcaataatgttttaaaaaaatttttattaaaattttttatggatacaaaatagttgtgcatgtttatgggctccatgtcatattttgacacaagaatatgatgcgtaatggtaaagtctggaaaattacattatccatcacctcaaatatttatcatgtctttgtgtttggaacattccaaatctactcttctagctattttgacatatgcaataaattattgttgggttaggctcagtggctcacacctgtaatctcagcactttgggaggctgaggtgggtggatcacttgaggtcaggagttagagaccagcctggccaacatggtgaaatcccgtctctaataaaaagacaaaacttagctgggcatggtggcatgcacctgtaatcctagccactcaggaggctgaggcaggagaatcacttgaa

SEQ ID NO: 5816 - DNA, 6000 bp, Homo sapiens
ggtggctgtgtatgctcgaggtgccagcaaagcaatcagagtctgtgttccgtgttcgttccctagcccaagggcagcaagggcagtaccactgcagtgacagcggcaaagtggctgtcagtggtctctgggaactccgccccagacagatacagagccacagctaatgggaatgctcagctgggggtggggataccatgcagcgggcccaagatgggggccctgcctggtagagagtagggggcaagggattcacagggaagaaagactcggctcctcctcatgtggtggctgtagcatgctggaggtgccaggaaagcaatcagtctctttgttccttccccagcccgagagcagcaagactagtatgctgtcatggcaatgtagagaacctgtggtttgtctctgggatttcctccccagagaaatgcagagctgccaccacctgaagtgcctaggtcaaggcagggcagctgtgctgggggctcaggtggggaggcctgcctagtgaggagtagcaggcacatgaacttgcatggaaaacagtgtggccacttttctgtaaggcagttgttctatgctggaggtctgtgatagtccttaggctcttcaccctcttcccagcctgaaggcagtaggggcgggggctatggaagtggcaaaaaaaaaaacggtgttcctgttgtgttacctctgcgagctccatcccatagaaatgcagagctgctaccagcccaagtcctcaggcgggggtggagtggctgtgctgggggcccaggccagtgggctttgcctggcaaggtttagcggaggcctgcagtctgtctgctcctcagcaccatgaattcgactccatgcagctctccatgtaagtgcaggcctggtggaggacaggactcggggggttgtcaggggcatcccctgtgcccaggattgtacgggttcatggcagaagtgtgggtccctagggactgtcactcactcatcatttcctcgttgtggggagcctcccttggctccatgccaatcccgggtgggcagctgtcctgtctcactcttctttgctctctgtgggttatgttacttctgtgatgaatcccaaagtgtcctccttcaaattatgtgaatttgttcttgcagtcctgtcaaattaaccactttaccttttacctgtgataaagattgtgtctttactacagaatctctctctcctttttttttttcttttttttgccttaacaagcctgatttctattatctaggaagatgttaggatttaattaacagctctgtcacgtcttcttcaactcaaaaataaaggttaatggaggttttgcttattgttcatattgtctttttgtaatcttaactgtcttggacacagcttttcattcagctctgagaagtttctagagtagggtttccctcatatttttgaaattatagtcactttctgagaacaacagaatgtaccagacctattctatttttttcctgttctaagcaggatttatgtattctctaggagtcccaggtccttttgatagaaataaatattactttaaccaaaaatctagtttccagggttgcatatccgagtttgtgggttagtgctattgttgctattggaatacttcttgtagtgactggcggtgccggaaaatatatggattgccaaatctataattttacctcctcccatccccaatttaacatagtaaagtaatatttcactgaagatcacagaatatatatacacacatatcattaaagtaatattgtagcttagggaagagttcagggaaagggctatattctggaaattgtagagatctttcttaaaggatctctaagctgttatgtacttgtcttagtgagcttgggccactataacagaataccatagaccggtggtatgaaagagagacatttatttctcaccgttctaatagctggaagtctcagatcagagtgccagcatggcagaagtgtgggtccctagggactgtcactcatcatttccccattgtggggagcctcccttggctccatggcaatcctggatgggcagctgctctgtgtcgctcttctttgctctctgtaggttatgtggcttctgtgatgaatcccaaagtgtcctccttcaggtcatgtaaatttgttcttggagtcctgtcaaattaaccactttaccagtgagggctttctactagccttgcagatgactgccttctggagaactcatctctctttttttttcctctctctctctttttttaaatttttttttaaatttttttattatactttaagttctagggtacatgtgcacaacgtgcaggtttgttacatatgtatacatgtgacatgttggtgtgctgcacccattaactcctcattctcccagtgctatctctcctccctccccccaccccacaacaggccccggtgtgtgatgttccccttcctgtgtccaagtgttctcactgttcaattcccacctatgagtgagaacatgtggtgtttggttttctgtccttgtgatagtttgctgagaatgatggtttccagcttcatccatgtccctacaaaggacatgaactcatcattttttatggctgcataattttcacatagcttcgtttctacaatcacaacattcctgaggtaaacaggcaaggtgtaatcattctttttttacagagggagaacaaggaacttagggaaatcaaaatggggacactaacaggatttctgtggaaatttaagtaaatgagaatttgtagtaaattttttatcctaaaacaaataactcactttggccgaaaaatgggatgttacccaaggtcccctactgggccggcggagaaaaggacctgcctcctacaggggcacaaacaaggcagactaggacccagcagtcggccaaggcccaagggtctccagtaaggaaaatgtaaaatgtgagtgtgtgagactggcctaagatataggaagagcagtaaagagaagaaaactgacgagcagagggggaaaagaattattaaacatggtcaaggagcaaggagcacgacaaagcctcaggatttcttcaagggatactgctgtgccaggtctcaagggcagaaggatacaagcacaagacaccagggccaccaagctgatggggttactgagcctctggacagcaccttctgataggaagcaaggaagcacactacaaaggctgcaatcctggaggctgagacagtcaagagggagtggaagggcctctgctgctctgggaaggtatcttatagggcaaataagctcttactgtgtgcctaagagaaaggaagagggaagcgaggcaggtgtcatggccttaagaactttctagaggtttctatttattgacatttgacctagacctcttcatgagcaaggcgcagccttgggctacaggtaggaaagtcagcatcctactctctcctcaattccatctgttaatccaccaacccaaatccctcccacccccacctgaagtccaaataaggtaaaatgataaaatgatgtgctgttctctcaacagttggctgagtctgaattggagggtaggaagcatttgaagctctgcccatttagttccagaacaaaaaataagcagaggcaggaggtggagagcaaagacgctggcagccctgcgtctggtctttatagctgtgtctttggatttgtaggccactcctcaacttttcagctcccgcacgattccttagggcaagcgaccagtggttgacaccgcatatacacctggcttaaagttattgactcgctgccagttggagacccagctgtcctctggactcatcatcgcaatgattccatcaaaggaggagctggtgcagccatatagcatctctcagttacccttcatctgtagatatgcatctcaatagtcacaaccatcatattcaaactggtctatagtaccttgaccagtgaacacagcaaacaggcccacagatgccacaggtccttcagcaccgtctccagggccatcttctccaatgagaagagcaacagcaaggaagatggccacagcctgagcacccgcaggaagtaaacagctcgttagccgggtctcttcttataattccatcatgaggaccccattctcatgacctcatattaaacctaattacctcccaaacttttgacctccaaatgccattacgttggagggtagtgcttccaccaatgaattttgaggagatacagacattcactccctaacagtgctataaatgaagtcagggaccctgatggtgtctttatcacagaatcttacattttctttgtctttgccttaacacaactctttttgctcacctagaaagttcttgggatttaattaactgctctatcatctcttcctcaactcgaaaacaaaggttgctgtgtcttcacatgccatgtacacacaaggtatactttaaaagtttttgttcattgttcacattgtcttttgctctcttagactcaactttttattcagtccagagaactttttagtatagaactcaccccaagaatataactgcctttgaaaatataatattcacaaaaagaatttaaaaagaggggacatttactaaatttttattgggcataacaattatttcttttagggcgttgctaaattttttgtctaaatgaaaaaaaaaacaaattgagaaattccacatttcacactgatctagtgatctcaacatacttgtgggtttctactaactgttgtttggtattgctttctcaatttcctttttttttttttttcgcctcatctcccggaatgtatcaaaggaaacccctgtctttgaaaaagacttcttttgagctaactttcttatactggtacctttctaatctcactacaatatgtaacattggtgttcgatctcaagtatttctgaatatattcccctatccacagaaatatactctgggggaaaaaaaatagaacaaattcttgccgtcctgaccattgaacaagagactaattagacaatggggctagaaaaacctcaaagtaaacgtgagtactttctctcctttccatttcaaagaagcagatggaattatactaatttaaaacatatgaattgatggtagttttaaagattgttgatgatgacggggagaaggaggtggaaggaaataaaaatgacgttggtgaagaggaaggacatagagtcaaataagttggataacagaaacttctttataaaatgtatattggaccaagaggggagataaaatatataaaagagaaataagatgaaaagaaagagagtaatatgagaagattcttttaaagaaaaaagagaaaaggaagatgtagaaaaagcatttaggcttatgctgtatcagaggctctaactgtcccattttatgtttgacttaagtgacaccagtggatttgtattgtgataatattaaataatatttttgatagatatatagaacaagtgtggaaatgtttaaattaaaattaaagttttactttatctcatcaccctaccatggcaaactgtaatcacagtgtgatcctattgaattacctttttaggtaacaatatttcttagagattttttgcatcaatatatactgattacatgcttatttaattactatacagaatatcattgtgtgaagggaccataatttagaatttccactattgataatatacatgtaaatattagattacagtatgtgttttctattttgagaagtactgcaatgaatatcttttaacataaacaagctcaattatttctatagaatagacacctgtaattgaaattattgtggcaaatgaaatgcatttaaaaatggataaatgccactaaattgatccttctaaaaggcattcctaattttccagtccaggcagcagcatttattttctcactaagagtgcttatttcccctcagccttgccaacactgcatgta

SEQ ID NO: 5817 - DNA, 6000 bp, Homo sapiens
tgagattcttcaaatttttattcattatgactatattttcttctaagtctttgaacgtatttatgcagatattaaagtccttgtttgctagttccagcatctatgttacataagtttcttttctacttactgacttttctttgatccatggcccatatattcttatttctttggattctaataatattttattgtatgctagatattaaatgtgatgcattatggctaatctgtgttatgtatcctcttttttgaagaaaagttttattggggaataatttcagatttacagaaatgtttttaagatagcacagaacatttctttatacctttcaccccatttcccctaatgttagcatcttaaaaaatcatggcacatttctcaaatgtaagaaatgaatattgctacattgtttgaattttaccagttttccactaatgctctttttgctgttccaagatccaatccaggataccacattacatctagttgttatatttattgttttcctctggtctatgacagtttctcagtgttttttttttttcgtgaacttgatatattttaagagtattggtcagatatttagtagagtaccactcaatttagaattatctgattttttttttgcatgtttacattggatgtgtaggggaaaactttcttcagctgtgtttttcttctgctttcacaccagcactaccacaattatcaacacagaagaagacttgtgtgaccaaatgtggtaggggtgttccccacataccaattagcagacaccaactgggtatcctctaattcaattccgacattatctacctggagatagtgttagatcttacatttcagggattcaatatgcaagatcaccccctacacccacagacaccagtcacaagtctgggcctctggaacatctgaccaataagcttcaagttgggatttccacaacttcccctttgagttcagttaatttgctggagcagctcacagaactcagggaaacccttatgtttatcagtttattataaagtatattacaaaagatacagatgaagagaactgtagggcagggtatggggaaaggggtgtggagcttccatgccctctctgggaaggctgctctccaggaatctccacaggttcagtcatctggaagcattctgacacagttctcttgggtttttatggaagcttcaggacatcagcattcttgctgctgaccccctccccttgtcaccccagtaaagggcaggaccctctctggggaaggttttaagacccacaatcagaaaggcaggggaaaattagagtcctgccttgaggcagatgaaaggagggcagaagaaggccagaggccttccccttggggcctgacacactcaacattataagaaaggactgtaacagggaccataggagttaggagccagaaactgtggatgaaaaccaatatatacatatgtataataccaccctggggttatggattttggggaacaaaccttactggttaggtgcttttatcattgcatcatattagggggtacatgatatcaacaagactcatcactggtggttcacgcagtgaaccctgttcatgtggttgaggtggtatttgccaagattctttaatgaatagttactatttccttttatccatagtgtactctttggaagtgagtctcttatccctgactaccctcaaagggaggagagttaaattccacatcctgaatggggagtatctacatatattatttggtattttctgtaagcaagatttgtcacttctcacctatttatttatttaaatcagtatggatttatatagtttttccccttgtgttataattcaacactgtcatttattttgttgttcatattgttccattgggagcttttccaggttggtttctgtgtcctgatatgctcccatctttttttttttaacttgcttattttttaacattaaaagactggaagatcctccaagcttattttgtactttccctgtcctggccctagaattagccatttcttcaaagagcccctgattcctatgttgccttctgatgtggtttggatctgcatccccacccaaatctgacgttgaattgtaatctccagtgttggagatggggcctggtgggaggtgattggatcacgcggatggtttttcatgaatggtttagtaccatacccctagagctgttctcctgatagagttcctcacaagacctggttgtttaaaagtgtgtaacacctccccgcgtctctcttgctcctgctctggccatgtaagacatttccctttgccttccaccatgactaagtttcctgaggcctgcccagaagcagatgccactatgcttcctgtacatcttgcagaactgtgagccaattaaacctcttttctttatcaattatttggcctcaggtatttctttatagcagtgcaagaatggactaatacaccttcctttttttaaaaaatgatcttaattattttaaagcatacaattcagtagtgttaagtattattatggactgaatgtttgtctcccccagattcacatattgaagccctaatcctcagtgtgactgtatttggagatggagtgtttaaggaagtaattaaggttaaatcaggttacaagggtggggccctgatctgataggattaatgttcttgtaagaagagagaccagagccctctctctttcttcccttgtgcacacactgaggaaaagccacttgaggatatagtgagaagtctgcaacccacaggggaagcactctccaaacaccaactctgctggcatcttgatcttagactttcagtctgtggaatgatgaaaatataaataaatttctgttgtttaagtcacctagtctatggtattttgttgtgatagtccaagcaagtgaatacaagaatattcacattgttgtgtaccgtatctccagaacttaatcacactgcaaaactgaaaccctgtacccattaagcaacttccttttctttttccctccaaacttctttcagtaaccattcttctttctttgtctatgggtttgactactttagattcctcatataagtggaatcacacagtatttgtcattttgtgatcagttcatttcacttagtataatgttttcaaggttcatcagtgttataaagtatgacaggatttcctttctaagactaatattccattgtatgtgtagaccacattttgtttgttttgccttcatattaagggcgtgaaaatttgttctcagaggcagctaaactattgatgactctttttggcaatgttaagttttgctctgtttttggttggtgctactaagcaatgcatcacctctgtcctttctgttcagctcttggccctgcaggaactatctcagcttggacttgcagagttttgtcctatgtctgcgcagcctagaacttggccacagacatacagtgaattcctacagtcttaagggtgcctctctcttgtgaattatcctgccctgcaaattccagccatttaagcagctcaaaactccaatatctgcctcctcattttagtaagactgctgttctgtttaggattcatttttgtgctctgtactagaaagtggtcctagatagaaagctagggtgatcattgcactcacctttgtattctctcaaggatcacaatgctgcctgtgtgttcctgaaaatagctgccttgtgtgtcttgccatgtgttgtattttgattggagagtaagtctaatgccattctgtcatggctggaagcagaaatatatttgtttttattaatataaaacaaattaatataaagcactccctgtttctcttcttttatccttatgcagtctatcttgatgatcttatccactcttaagagtttcaatactctttctgtttccttactttaacttttgttttttttagacggagtttcactcttgttgcccaggctagatagagtacaatggtgcagtctcggctcgctgcaacctccgcctcccggtttcaagccattctcctgcctcagcctcctgagcagctgagattacagcccccaccaccacacccagctaatttttttgtatttttagtagagacggggtttcaccatgttggccaggctggtcttgaattcctgacctcaggtgatccaccctccttggcctcccaaagtgctgggattacaggcgtgagccaccacacctggcctactctaactttttattaacttttcacctactaaaaacaaattactaagatgttagaatgtatttgtttactttgctcttctttttagttatctttgcatgaagtataataataaaaaaaataagacaacaaagagaaaaaatataatggaatttctgatactgtgaagggtaaagaccatcacacaatttggacaaggttttggggaagatgtggtcatgtcatattcacaaaatatatctgggtaatagtctatttctcccgtgattccaggcatatgcacccaacagtccatttcgttattgcttatcactgcccaaaagttccaagaaatgatgaagtcagtctcatttggcatacatctactttttcagaaggaaacaaagcagagaaaaaattccgagagaaattcatagctagtaaccactctcacttttattttagtttccataactgaaattgctggacttgagagcaatttttccttgctcaacagaattaggtgagatggggaatcaatttaatatatatttagtgagcatctacagtgtcatggggcaaaaaaatagcaacttacaatattaatttctataggcagcccccaaatttgaatcatttcctgaaaaattacttctgcttttgtgaagtttcctgctagcagtttagagattgggctgtttcctcactgatacatatcccttcacacttctataatttaactctctcaactgcatgtgaaagatcttagctgaagatgactgacagtgttatttattccatgttagagttgcctacggcaacccaagcccagaatgactatggaccacagcaaaaatgtgagttaaccaaggtagcatggaagacgatgcatagcaacagtaggctatggatgaatggggagtagaataagtttaaagcagagggtgcagaagaattgaggataatttgaggaaatacttttggttcagtttaaagtccagagttggaatatgaaaagttggtgtatggtacaggatctgatcttaggtctcaggtaaactcttttctaactgttcacttctttgatcgcatcttagaaacccaacttagggcattgccgttattccttcttgctcttagctaaagcgggaactttgttgggagaattttatctctttagttatattcggagtaaccttggaccagctgtttaaattctaggtatggctgtttttctgactatggaatgaggaggacaccaatagttttgctggtggatacgagtaagatttttgtcaggaaagaaactgatttacatatctagttttgttttttttttttaacttcacagtgttgcactagaatggtgacagggaagaaaaagtatcaagaaactacagataatagtctctgtgactgaggatttgaaggcaaaagagccatttttacatagagccctgagagaatattatctgagacagacaggtaatagtgtaaatgccaaaattaatccttgattttgtatcgtaggcagtgaactcccacaaggtgtattctttagggtagttccctaagctttctctctttttactacatagttttactattataatttttaatgtcttttgagagtgttgccttaatttgctaaatcattctagtatacttgggatatttagacctatttctattaccataaattatatagcattggatatctttatttgtgtaaccttttcctatttttgaattgtatctatgttaatttctaagga

SEQ ID NO: 5818 - DNA, 6000 bp, Homo sapiens
atctacaaatcatcgacatccctgaaagggatggggagatacaagctggcataataaccaactaacaatacaatgacaggatcaaatccacacatatgaatactaaccttgaatgtaaacagactagctgccccatttaaaaggtgcagagtggcaagctggataaaaaatcaaagctcaatggtatgctatcttcagtagaaccatctcacacacaatgacacacaggcttgaaataaagggatggaggaaaatctaacaagcaaatgaaaatcagtaaaaaaaaacagggtttgcaatcctaatttcagacaaaacagactttaaaccaataaagatgaaaaaagacaaagaaggacattacataataataaattcaattcagcgagaagacttaactatcccaaatatatatgtacctagtacaggagcacccaaattcataaagcaagttcttagctacaaagagtcttaaatatttacaaaataatagtgggagactttaacactccagacaggtcatcaagggagcaaattaacaaagatattcagaacctgaacttgacattggaccaaatggatttgatagacctttacagtactccgaacccagaaaaccagtatatacattcttctcattgccacatgccacataatctaaaattgaccgcacaattgaatgtaaaacaattcttagcaaatgcaaaaaaaaaaaacaaaaactcaaaaaccaaaaaacaaaaaaagcaaaatcatgccaaacacattcttggaccacaacgcaataaaaatagaaatcaagacaaaacaaatcactcaaaaccatgcaattacatgggaattaaacaacatgctcctgaatgactttggggataaataatgaaattaaggcagacatcgaaacattctttgaaactcatgagaacaaagatacgacataccagaatctctgagacacagctaaggcagtattaagagaaaaacttatagcgctaaacgcctacacaaaaaagttagaaagatctcaaatttaacactctaacatataactaaaagaactggagaagtaagagccaaccaacctcaaaggtagcagaagactaaatataaccaaaatcagagctgaacggaaagagattgagatacaaaagaaacatcaaaaagatcaacaaatccaggggttggttttttggaaaaaaaaaaaagtctctcattggactaataatgaagacaagagagaagactcaaataaatacaattagaaactacaatggggatggtaccactgacccccatgaaatataaataaccatcaaagactactacaaacacctctatgtataccaaactagaaaacttcgaagatatagataaattcctggacacatacagcctcccaacaccgaaccagggggaaattgatttccttaacagaccaataatgagctctgaaattgaattagtaataaatagcctaccaaccaaaaaaagctcagatggattcacagccaaattctgccagatgtacagagctggtaccattcccatggaaactattccaaaaatttgagttgaaaggactcctccctaactcattctatgaggccaacatcatcctgataccaaaactggcagaagcacaacaaaaaaaagaaaactcgaggccggcatccttgaaaaacatagatgcaaaaattctcaacaaaatactgacaaactgaatccagcaccactcaaagagctaattcaccatgatcaagtggacattatctctgggatgcaaggttggttcaacatacacaactcaataaatatgactcatttcataaacagaactaaacacaaaaatcacatgattatttcaatagaaacagtaagaggtttcaataaaaccaacacgctttcatgttaaaatcactcaataaactatgtattgcagaaacatctcaaaataataagagccagctgtaataagcccacagccaacattatcctgaacaggtgaaagctggaagcattccccttgaaaagcacaagacacgaatgcccactctcaacattcctattcaacatagtattggaaatccttgccagagcaatcaggtgagagaaagaaatgaagggcatccaaataggaagagaggacgtaaaactattcctgttttcagaccatatgattatatacctagaaaaccccatactcttggccaaaaagctccttcaactgataaacaacatcagcaaagtttcaggatacaaaatcaacatacaaaaatcaccaacattcctgtacacctatacacaacacccaagctgacagccaaatcaggaatgcaattccatttatgatagccacaaaaacaataaaatacataggaatacagtcaaccagggaggtgaaagagctctacaaggataattacaaaacattgcttaaagaaatcagagatgacacaaacaaatgaaaaacattccatgctcatggatcagaataataaatatcattaaaatggtcatattgcccaaagcaatttacagatttaatgctattcctatcatactaccaatgacattcttcacagaactagaagaaaactattttaaaattcatctggaacagaaaaattagcccaaatagccaaggcaatcctaagcaaaaagaacaacactggaggcatcacattgcccaacttcaaattatactacagtactacaatatccaaaataacaaggtactggtaaaaaaaaaaaaaaaagcagacacatagaccattggaacacaatggtctaatgcagacacatagaccactggacagaaagcccagaaatagtgctgcacaactacacccatctgatcttcagcaaagctgacaaaaacaagccatgggaaaaggattccctttttaataaatggtgctgagataactggctagccacatgctgaagattgaaagtggaccccttccttataccatatacaaagctcaactcaagatggataaaatacttatgtctaaaaccccaaaatataaaaaaccctggaagataacctaggaattaccatcctggacacaggaatgggcaaatatttcatgacaaagatgccaaaagcaattgcaacaaaagtgaaacaaaacaaaacaaacaaacaaaataattaactgtaagagcttctgcacagcaagagaaactatcaacagagtgaacagataatctacagaatgggagaaaatttttgcagactatgcatttgacaaaggtctaatatccagcatctgtaagaaacttaaaccaatcaacaagcaaaaaataaacaaccccattaaaaagtggactaaggacatgaacagatacttttcgtgttttatttatcaatcttaatttacttcttatccatttggagtgtcaaataatggccaaagaaattgtaattataaattaaagaacaaaatttagcaagtaaaaataaacaaaaataacacaaaaatgtattatccttttacttttgtcattaagcaacaaatatatttctgataatttgtcaaatattttctccttgaattaatagtttatcttatttaaaagggtatattgtgtttttaaaattttattttaaatttgggagtacatgtgcaaatttgttacataggtaaacttgtgtaatgggggtttgctgtaaagattatttcttcacccaggtattaaccctagtacccattagttatttttcctgatcctttccctcttcccaccctctatcctccagtaggcactaatcattagggaaatgcaaattaaaaccacagtaagataccatctcataccagtcgaatggctattattaaaaagtcaaaaaataacagatgctgatgaggtagtggagaaaagggttcacttatacacctttgatgggagtgtaaattagttcaaccattatgaaagatagcatggtgattccttaaagacctaaaaccagaaatttgacccagcaatcccattactggtatatacccaaaggaatataaatctatcataaagacacatgcatgcatctgttcatggcagcactgttgacaatagcaaagacatgcaatcaacctaaatgcccatcaatggtagactggataaagaaaatgtgatacacatatacaaaggaatactatgcagctataaaaaagaatgagatgatgtccattgcaggaacatagatgaagctagaggccgttacccttaacaaactaatggaggaacagaaaaccaaataccacatgttctcactaataattgggatctaaatgatgagaacacatgtacacatagaggagaatgacagacaccggagcctacttgaaggtggagggtgagaggaggggcaggatcagaaaaacataactatgtagtactagtctgaatacctgggtgatgaaataatatgtacaacaaacccctgtgacatgattttacctatataacaaacctacacatgtagccctgaacctaaaagttaaaaaaaatcaaattatactgttaaattattagcatgatttataaacaatattgttttaggataaagaatttaattgcttggcaattgcaaattattaaattaaatatcaatatgttagggaggctaattcaaatgatataaatatttaggctataacaaaaggcagctatatattattaacctcacctcaaaaaggggcataatttccattcccttgactttaagggtaaattaagagaaatttgtaaagcactcaaaagaatattcaattcaatatgtggtggacagttgagaaattatgtgttatctatgtcatgggaaagcaacttttaaaaagaaaacatttcctctgaggttttcacaaataagtgaaactgtgaaccctcatatgtactgtgaaaggacaatttgaggagcatctctgattagcagcagatttattattctttcctcatttcatgttatacttaataaaacaaaacatacctgtatacacacacattcactcacattgaagatgcaagatgaagaaagatacatgacattgaatgtacagtcaaagaaaaggagttctgcccaaacatctcaacttacatttaaaggtatggaatttaatttcattttttcaattggtgtgaattaacatggtagtttcccgtatcctgttccattgtgttattggactgtttcagtatttgggtgcttttctttctccgtctctgtatctctctcacctgtcctctctttcaatattaataatgatttaaaaataacaacctctcttaccatttaagaaacaccagtttccggcactatacagaatgttttatctatgttccttcatttaatcttacaaatttactatgagataatctctctctctcccatttatcaatgtggaactaacacttacttgtaatattttgtctgatataatttcttaaggacattctctgaggaaatatgcatactcaattaaaattaataatttcaaattagtgaatatttgctgccattcacctccttatcattcatagaatatggtgttttaatgctattttttttttttgagacggagtttcactgttgttgcccaggctggagtgcaatggcatgatctcggctcactgcaacctctgcctcccaggttcaagcaattctcctgcctcagcctcctgagtagctgagattataggtgcccgccaccatgcctggctaattttttgcgtttttagtagagatggggttttaccatgttggccaggctggtcttgaactcctgacctcaggtgatccacccacctgagtcttccaaagtgttgggattataggcatgagccaccgcgcccagcctttaatactaatttttaattcaacttctcaaaaactttatgcttttcaccaagttgactcaaaataaagtttatacaccagcaatcaacattttaatttgctacttcaagcataccctccatacacaatgcaattccatc

SEQ ID NO: 5819 - DNA, 6000 bp, Homo sapiens
gtatatatccaaagaaattgaaattgcaatttcaaagagatgcctgaactcctatgtttattgcagcactgtacacaatagccaacacacgaaagcaacctcaatgtccattgacatgtgaatagaataaaaataaaatgtggcatattcattttattaatttaaactatttgtttctaagaactttatattttaggttgttagttagaaatgaacaaaataaacgcttttattgctctatgaaagcttgattcctcagatctaggcccccatttgtggtatattgcacatttgaatttatcataggagcaaaagaaagttgtatatgttgcaggctatgtttacatgactatgttacagaattaacatttatctttatttctttcctatattcctgttagaagacaataggattataattcagttgacagaaatgtagcttatggcagtccttaagtctgtgtcttaactttgggaattttggaggctggtgaagtataagtatagcttttcctctggctcttttgctagaagagaaagcagactttaagagaaaattattgcagcactatttacaatagcaaaactttggaaccaacccaaatgtccaccaatggtagactgggtaaagaaaatgtggcacatatacaccatggaatactatgcagccataaaaaagaataagttcatgtcctttgcagggacatggacgaagctggaaactatcattctcagcaaactaacacaggaactgaaaagcaaacactgcatattctcactcataagtgggagttgaacaatgagaatacatggacacagggaggggaacatcacacactggggcctgttgaggggatgaggggcaaggggagggagagcattaggacaaatacctaatgcatgcggggcttaaaacctagatgacaggttgataggtgcagcaaaccaccatggcacatgtatacctatgtaacaaacctgcaggttctgcacatgtatcccaggacttaaagtaaataaaaaatttaaaaagagaaaattatagattcgcatagctgatatggtttggctgtgtccccatccaaatctcatcttgaattatagctcccagaatctccacgtgtcatgggaaggacctggtgagaggtaatagaatcatgggggcgagttttttctgtgctgttctcctgatagtgaataagtctcatgagttctgatggttttacaaaggagagttcccctgccaccatgcaagacatgactttgcttctcctttgccttccaccatgattgtgaggcctccccagccatgtggaactgtgagtcaattaaacctctttcctttataaattatccagtctcgggtatgtctttctaagcagcatgagaacagactaatacagtagacaaaaaaaaaacctacatttttaatcataaaaggaatggaaattaccaaaaaatgtctcctaagggatataagggcatgctggttataagaattctaacaggaattccaactcattttttaaaatgagtaatttttaattttctagtaatgcatatttcagtacatgcattttcccagtatttgaaattgcatagacctcacttaataatagaccagaacttataaatttagtcttaggtagtttgtaagagatgtaaactagtatcataccaggtattataatcctggcaaaaaaataagcttactgtattccaatcactttcattatagatcatctgtatgaggttacctctaggtaatcagagggctaaataggaaattcattccatggaagcaaatcattgtggttaagggcacagatcatgcaataaaactgcctgcctgcctgcctgcctgccttccctccctccctccctcccttcctccttccttctttccttccgtttctttctgtccctctctccctgtctcctctctctccctttctctttttccccatctcgctgtctctctctgtctctctttctctctctctctctcccccgctctctctccttctctccctctctctctctcctctttccctctctctatctcggatcacttggtaaacaccaagacaaaaacctgccaaaagaaaaaggaatagctcaccacaattttctaagaacttgacacacatcagggaagagattgtgccatcttataacagtcacaatttcctaagactctgacacagtcagaggattatgccatcttcccacactcacagttggatatgccatgtgataaccccagccaggaaggagacaacagtgagacacaaggttctgtagaagacaaaagcagaacataagccaaatcgtccatgatgctgcctcctggagttgacttgaccatgatgaaatgtaaccgaaattgacaatattccatgacaccaccacggcttctgtgctgtggatggacattgaaaaaaaatgcacaagttaggaagttgttttcttatcctgccttttcctctgcctccaaactctattaaatccaatataaataaaaatctcattaagtgtttactttttaaagcttcttccccggatcagtcgtacattctcttctttcagcatacttttcatttacctagactgaaaatttgattccctaatgaaacgtgctctcctaaaactttccaaagtattgcatttgattgtcagaattgtcagaaggcaggtgagttgttgtgtaaaccttaactttatacaataacaatgtatccaccttagaacaattataaattcaagatacgatgtattttttaaattattctcttttttggtttatattttattttcttcttcttgtacactattatttccctagattctcttttccagaatgatgtgttagatttggaattcaataatgaaagacaaaaataagtatttaaatgaggaagtatatatttcctctgtctctttttgttatcctattcaatatgcaaaaccaggctgtgtgatctaaatcaagtttcttatcctctaaagcctaggtttcatatctaaaaattaggaatgatattaccagacttgtaaggctgttgtttgcacacaaaggaagaattaaatgtgatcatttatagactcgcctgagagcatagtattttattattaggtactcaataatttttttaacttacccttaccttctcacctcacctctgtaaattttaacaaaagacaggagacctgcatatttaccaattccttattctctatattgagtaaggtagaaattttagagatcctctaaaaatttttatccttgctgtcttgccatgttatggattcctgaattattttatattactggtcttttgctccattgccacctttcaggacagggcttacatccattatctgaaaagccagacgtatatattaattatcttgatttctttatattaaatatggaccatttaatgcaatgtttgagttagtcttacaaatatctcatttcctcccatgttcacaatagccaaaatatgaaaacaagctaaatgttcatttcattgatgaacaagtggataaagaaaacatagtgtgtgtgtgtgtgtgtgtgtatatatatatatatatatatatatatatatatatatatatatatacaagaaaaaactttccacaagaacctccatgtcctcatttagaatttaatttaattttttacctcacacacctctttttttttttttttacttccacttgacacctttctggggtaataggtatgttgtacctgaattccactctccctcaaaatatctgtctcaaatttgtatatacattagtaggtatcaatcaggaaggtctccctcaacccattcaataggccctgccacaaaatttgaaaagtttaaaaaattcagagccctgcttatgtacatgggtgtacatttttgcagacaaaaatcccctgtgccctacctactcagcaatcttcccccttcctatcaatcttcctcttcccctgaatcattggtcacaactgatctctttgttttctttgtcttggtttttctcgaatgtcatatagctaggataatatgatagcttttcaaaccggcttctttcacgtagtaatatgcatttaagattcctccatgtttttcatagtttgacaacatttcattttgttgtcgaatgatactccattgcatgaatgtaccacagtttgtttatccactcatcttttgaaagacatcataattacttctaatgtctggcaattatgaataaagctcctgtgaaaatgtgtgtgccagtttttgtgtgtgttgggagcaagccccccaaaatccggccataaactggccccaaaactggccataaacaaaatctctgcagcactgtgacatgttcatgatggccctaacacccatgctggaaggtggtgggtttacgggaatgagggcaaggagcagctggcccgcccagggtggaaaaccacttaaagacattcttaagccacaaacaatagcatgagcaatttatgccttaagggcatgttcccgctgcagttaactagcccaacctatttctttaattcggcccatccctttgtttcccataagggatactttcagttaacctaatatctacagaaaccatgctaatgactggcttgctgctaataaatacgtgggtaaatctctgttcggggctctcggctgtgaaggctgtgagacccctcatttcccacttcacacctctatatttctgtgtgtgtctttaattcctctagcgcctctgggttagggtctcccagaccgagctggtctcagcagtgtgtacaggttttccactttctatggttcctagattgtctgttaatactatacttacctctataagaaactgtcaagtttaccgggccgcgagggtgcaggctgcgcagatggtgtggtcctgcgccccgagggccgcagcagctcatccggcagctcccaccccaacaacctggaagggggcgggacttccgtttgtacccggctgtggcaatctgtggtgaagttgaaatgcttttctgctagactggcaacatgttttgattcttctcaaataactcgcaagctcttgtgaagcacaacggcctaccttgtcctgaagaaaacatactctaaggcccacagatgattaaacccagccatttatgtgacaatagcatttttatttttcttatcaagatctgggtatttgatccacacaatggtaaagattcccatgttagccaagatctaaatgattcaaactgatgatactctctgcagaagaggtaagaaccactggcagtagggtggaaggtatgtcattacagatgatgctgacagagaaggtcatctgaacctactttataagaaaggcatgattaaaggagaaaggggaaagggcattctaggttaggaaagattctgaagaaatgtaaaataatatgaaggtgtgagctgatatatttaagaaataatgaatgatatgtgggagtatgtatcatctgcagagatggatgagggaagatgcaagtggaggggaaggctggagccgctggtggaaagacgttaagtgtatttcaatggcctgatactgcaggcagtagacagcctctgtaaatcaggtagcttccttactcttgctcctactgatccctcagtctaaaatgccctctgcactttctctttagagatagagagggaaagggagtcaaacacgaaatctccaggaggccatccctggttatttcttactcctctgttgatttcctttaatctgtgaagtgtcttctaactcgtggcctgaggctttagtgactctgctgactcattgtctggtgctactgattgtgctaatggtcttcgatattgtgtccagtgccccccaccattttgggaagaaattggctttagtttttactcagattgaaattttatttagaaacgggagtagcaagaccaggtgcagttagttacacctgtaatcccagca

SEQ ID NO: 5820 - DNA, 6000 bp, Homo sapiens
gaaacagaatgaggcagaagtgtccctttcaaattaaaatgactagattacaagaggccatgtgctttctgctgacttcttttggcaaatttgcccagagagcccataggtaccatgaaagaagtttagctagcctgcagccactatgggaagagacccatggtgagatcctatagagaaaggaagaggtggctgaggagcgccaattgtttgagtcttcccagtccaactaccaaaactgctagtgaagaagccttccaagaagatcctatcaccagtcactaattaaaaccaaagctgagccccattacttcagatttgtgagcaaaatagatgatgctattatcttaagccattcctttgaggtggtttgctatatagcaacagatcattagaacgaagccaaaatttttaaaaaatgaagattaaactaaggtagtggcagctgcaatgaagcaatgtaagcacacaaattattaaggaggaaaacccactcatgtatagttcaggggcaggaaatattttcctagtcttggagtcagccaggcacatcgtggtggtatttgacacttgatctgtggatggcagcttatttaaaaattcaaattaagtaataaaatcccttgtttaaattccaagcttagcaagcaaatttagaaaatggctgaataactaaacctctagctattgtatttgtcattggagaccaatgcactaaaattctggtttcatctatcaatttaaatgtgataatataagagaccctgggccaggtgcagtggcgcacacctggaatcccagcactttgggaggccgaggcaggcggatcacctgaggtcaggggttcgagaccagcctgaccaacatggcgaaacctcgtgtctactaaaaatacaaaattagctggtgtggtggcacatgtctgtaatcctagctacttgggaggctgaggcaggagaatcgcttgaacctgggaggtggaggttgcaattagctgaagggcaacaacagtgaaacgccatctacacacacacacacacacacacacacacacacacacacacacacacaaagagagagagagagagaccctaaatcgaagaaatcagacctatctttatggtaaattccacctgttttcagattcaaatgcttgagtgggggagaaaaaaaagtatgtttggggcaattgagaaaatataaatataagctctatattagataatgttggaaaatattagtagtttttaaggtgtaataactattgtggttatggaggaacatgttcttattctcaggggggatataatttgtatattgggatggtgtcatgtttctaatttacttttttttttgagacggagtctcgctctgtcacccaggctggagtgcagtggcatgacctctactcaatgcaacctccgcctcccgggttcaagcgattctcctgcctcagcctcctaagtagctgggactataggtgcgcgccaccacacccggctaattttttgtatttttagtagagacggggtttcacagtgttagctaggatggtctcgatctcttgacctcgtgatccacccgcctcaggctcccaaaatgctgggattacaggcgtgagccaccgcgcccgtcctctaatttactttcaaacggaaaaaatctaggtgaaggttatagtggtgttcatcatactatttgtcaaaattctctacatgtttgaaaatattcataaaagattgaaaaaacttctaacccttgaaatcattttaaaaagtacaagaaacatcaaaaatgtatttgagaaaatgtgagctttttaatgtagtattttgattttggttaaataagacattttgaaatgttttactcgattgtgttaatttaaaatttactttcataggccggattacatctgtaatcccagcactttgggaggccgaggaaggtggatcacttgaggtcaggagttcgagaccatcctggccaacatggtgaaaccccgtctctactaaaaatacaaaaattagccgggagcggtggcaggcgcccatagtcccagctattcgggaggctgaggcaggagaatcccttgaatccgggaggaggaggttttagtcagccgagattgcgcccctacactccagcctggcgaaagagtgagattctgtctcaaaaataaataaataaataaaaataaatacaaaactcacccacaaaattaaagaaactaagtttcattactggcaccagaaaacgaatcacatagtcccacttcttcatgtatttttcttcatggcatctttcaatctttatgtataaaaattcatgagggcagggcgcggtggctagtacctgtaaccctagcactttgggaggccgagacgggcgaatcacctgaggtcaggagttcgagaccagcctggcagcatggcaaaacctcgtctctactaaaaatacaaaaaaattagctgggcgcggtggcgggcgccttgtaatcccagctactcaggaggacgaggccggagaaaattgcttgaatccaggaggcagaggttgcagagagcctagatggagccattgcactccagcctgggcgacaagagagaaactccatatcaaataaataaataaaataaataaaatccatgagttattttatcacattatatgtttataattttaagtcttactttcaaattgaaaacagtttaattttcagtcgctcatgttaggtttttttttttttttttagacagagtctagctctgtcgcccaggctggaatgcagtgacacgatcttggctcactgcaagctcccgctaccacgcccggctaatttttttgtatttttagtagaggcggggtttcacgtgctagccaggatggtctcgatctcctgacctcgtgatccacccacctccgcctcccaaagtgctgggattacagtcgtgagccactgcgcccggcctcattttagttttgatgcaaatatagttaaaccctcccgggttctcccttccgggttcaagtgattctcctgcctcaggctctcgagtagctggggactacaggcgagcgccaccaggctcagctaattttttctgtattattagtagagacggggtttcactcgtctcatgttggccaggatggtctctatctcttgacctcgtgatccacccaccttggcctcccaaagtgctgggattacaagcatgagccaacgcgcccggcctatttttatttatttattctttttgagacagagtcttgctctctctcccaggctggagtacagtgggcgatctcagctcactgcagccactgcctcccggattcaagcgattctcctgccttagcctccacagtagctgagactgtaggagcgcgccaccatgccttgttaatttttgttttttctgtagagacagggttttgccatgttacccaggctggtcttgaactcctgagctcaagcgatcctcggcctgggcctcccaaagtgctgggagaacagacgtgagccaccgcgcctggccccctgtgggtgtttttaaaattagagacactgagaccccgactgaagaagataggccacggggctgctgttatctaatatttatcagaactcacccgacttgtatgggcaacgcagccccttttcactgttctttttctttgcaaactccacagtcctccctgtcgctgccctacagtactggttggaaggtctttcttctttgactctaggtggggaaatccagaacgaggcttcgcctcacctgccctaatgcccaatcttctactagcattccaggcagcgctttctagtcacgtgagggatacctaaccactggaactaaataagatgtgggggaacaactgaggtcatcacctaaattgcttgatactctcttttccagaagacgagccccctttctgagtttatggcagaaagtgaatccctccctccctcccttcctttctttttctgtaagacggtgtttcgctcttgttgcccaggctggagtgcgacgccgtgatctccgctcgccgcaacctccgcctcccgggttagagcggttctcctgcctcagcctccagagtagctgggattacagccatgcgccaccacgcccagctaattttgtatttttagtagagacagggtttctccatgttggtcaggctggtctcgaactcctgacctcaggtgatccgcccgcctcggcctcctgggattacaggcgtgagccaccgcgcccggctagaaagtgaatcatttctatatttgattgtacgtgaagccctcggtagtccttactgacatcatgtctcctttagactttgattacactccgtgtccttcatctgactcctctcttcagattcctgagtcacgctctgtttatgttgctgttcaggagcgaactgcggcaccgcccaaacactgtgacgccagcgcgggaggagggccgcgggaggggcagcggaacgcgcagagggcacggtgcaagcacgggacagctctgcattggccaaagggatcccaggaggcctggccctcttttctcctgaggctggatcccaaccagcaggaaaaggctggattttcgccttttgtatttgttttggggcccaaccaagaaaaacagtggagggggaataaaacatgtttaaatcttttttttgtcttaaaaccatctttaatttcacagtcacaaaataaaacataactcgaatgttttgatgtttgcagtgacatcgattgtgaaaaaggttagccagaaaggaaacgcagtgagacagagcgctcggccaccccctgccctgggcgcctggcgcatggggggcggggcggggctcgcggggtgacgtcacagcccgacgcgccacccagctgtttttgtgctcccagctctagcgaaaagccgccggtatttctccatctggctctcctctacctccaggcaggctcacccgagatccccgccccgaaccccccctgcacactcggcccagcgctgttgcccccggagcggacgtttctgcagctattctgagcacaccttgacgtcggctgagggagcgggacagggtcagcggcgaaggaggcaggccccgcgcggggatctcggaagccctgcggtgcatcatgaagttccagtacaaggaggaccatccctttgagtatcggaaaaaggaaggagaaaagatccggaagaaatatccggacagggtccccgtgagtgtagaggagcggaggggatgggaggggaagggcccgcgggggcgggggcgggtagtcgagatggcttccctggggcgcccaggcggctctggagaagggaggttccgagaattacttaatcctgaacgcccttcagtgccagagccaatggacgtccagactgtagagcttttaaaaccccgtatgcctgggccccgaaccccacttcagggctgacggcgttttgggggccgagccgccgtcttcagtgactcagcaacccacacacggtctcagcagctgagaccgtgtgtgggttgcggtgcacaaaatagggcccctgtgggcgagactggttagatcggggccatggattggctgcctttaagaacgcagggacattgtgctgtgcggtgaggtttgcgcaaacccagtcgatttctgccttggctggttctcctttaatgaagttgactttggctctcatatcattggtcttgggacgaaaaggttcagaagctattcagtaattttcttgcattacagggggttaggggagcacaagacagtcctggcctggaaaacaaggtcacgttctctgcccaacagccctcttgcctcatcgttctaggctccggggcttgtgtggggacagccagcctcctcgtgttgatttctgatcacctggtacctggtcgcgataaggcaggactgagacgttttttctccgttttggacaccggcttaagtagttaaaactaccgcag

SEQ ID NO: 5821 - DNA, 6000 bp, Homo sapiens
ggcctacacccagtaatgatcaagtcagcttggaagtcagaagcaagattaaatcaactatgccagatttctctcactgtcataattttgcagaggtggcttcactcatagcatgagaacctttgtgtcagaagcactccgtcctgcttctctgacctcttttatctgcctactctcattcaccatttcacctttatgcttatcctcttttccttcatattaggggagtttttcttagtgttgggttccacaaaaatatgaaactcattgaagggctggatgattgacacttgaatggcatcctgaattccataaaggagtagggactggggtttattggagggggcttctgaaagagggacatgttgtgggagggtgaaggtgaggaaatacatgttgaataaagattttcttgctatgtaaatgagagtccttcaggggagaaattgttcaggagcagctcttttcctgatatagataattttactaatatagatttcctttacagatgtaattttcctttacaaaagggcagcttttcacatgacctactcttgtgtctgcagtttctcaaaataaccagcttgaaatatgccaacaaagataaatatttttaggggacatattttagtctcctgctatcatattttggggtgatatgtcctgagccccaacaacacatttctttttctggcatgcatccccaaatagcccctgcatataagataagcaaaataatttgggatatttatatatcaagtcctgagatccattggtatgagggtggcaaagttttgagcagatctagggggaaaagaagtcccaaggcctacagatgcaaaagtctgtttaagtaaaacaaaggttcctagatataagagaggggcaatgataacttgggctataagatgaaaggcaaggagtgtttgcttctatacatgtaattgtatgtatatttctcattatctatgtggacaaaacttaaccagttcttcaagaaggtaacataaaggattggattgtcaaatcagtatcacaagcatcctcagagatttcacccagtatcatgctttactcataatttcagttatacaataattgtgagatgcagacaaaacagtggaaaacccaggcctgcaaaagcacccactcattcttactttccccttaggacacactctggcccagacaaacagataaacatatgaggtctcttaatggtgtttgtggctgcaccgtttacacaaaaggagatgttttggttatgacacatctccattttatactcagatggttacatggttatggttacacatagcttatgtgacatttttccaggaagccagcctccataaacccacagattctagttttatgctttttttttatatagtgtgttttgctcttgtcacccaggctggagtgcaatggtgcgatctcagctcatcaagttcaagagactctaatgcctcagcctcccaagtagcaggggttacaggtgagtgccaccatgcccgactaattttgtatttttagtagagacagggtttctccatgttggccaggctggccttgaactcctgacctcaggtgatccacctgccttggcctccaaaagagctgagattacaggcgtgagccactatgcccagccttagttttatttttttatttgattttaccactaacaattttagacaatctaatacatcctgctaaaatcattccattgataaggattttgcaagcaaaacacactatatataagaaaccactatagctagtaggtttgttattagcatgtttacaatgagattttaccaggtcagtaacgtcttttgttttttctcagggagccctctctctctgttaaaagaataatttgcagcctgatgtgagcaattttctttccgctcaaagaatgcattttctaaaagcagtgagatcaaaataaatttttcccttggggatactagaacgtatactgttattttgttctgcaacattttagttatacatttttaggtagggaaaagacttcactgtttatatgttaagtgaacattagtttcttttccctggcttttgactaaggtttaaaagttgacttagctattgaagtcatcacttgctcttaccaagggcactagtaaattgcaggggaggaagagggcatcttcctgcaatggatactaggggatggaaagtcctgcaaagagagacgttcttttggcaggatacctaacttttcaaaagcaaatttatgtaagtgaagctggatatttcagcggaatttagtctggtttctctcggcagcacactcagagaatactttgagtagaaactttatttggaattgtgtatgcaataaatgtaggaaaggaaatgtaataggaaagggaaagtggaacgcaataaaggttattttcttaatctagcttctagaggaggtgactggaacataacactattgagtaattctgggaactgggcaaaacacaatgttcagaattacctgactttagggctgagactgctggactgtatagcaaatcacaagattcgtttgttgacgcccattctggtgatgattattcagcacttccggattagcatgtctgagaacagcaaggctttcagcagttattggagaaaaaaagaacccatagatacagctatacagataactagttggccatagttccccaaatattccaagggacataggcgaggcaatgataacttcaggaacaagtggagatgagtgggagagatacagtacatggaaatcattcacctgtctacgtacaaaaataaatagaaagaacagaggccgggcacggtggctcacgcctgtaatcccagcactttgggaggccgaggcgggcggatcacgaggtcaggagatcgagacaatcctggctaacacggtgaaaccccgtctctactaaaaaaaaaaaatacaaaaaattagctgggcgtggtggcgggagcctgtagccccagctactcggtaggccgaggcaggagaatggcgtgaacacgggaggcggagcttgcagtgagccgagtgagccactgcactccagcctgggtgacagagactccatctcaaaaaacaaacaaacaaaaacaaacaaaaaaagaacaatcagagttggcagctcagaaagagttaaagaggtatatacatatatgtttactgtgtgtgtgtatgtgtgtgtgtgtgtgtgtgtttaggtatcttaaatatttaagcctggagttcttgaagtaaacttgtatttgttggatttttatttctaagtcagtgaactaagatgaaaaaaaggacaatgactgatggacgtattctcaccaaacagggttctaaaaacttagaacctctaacttccaaataaaggtggttgtgttagtaatgaaagtgtagtaataatccctattgcacattctgtcataaatttgtactctctcaagagaaaaactaaaagcaaacccctaatctcctatattttgaggcaattttacatgggggaaaaatagtatcagacaggtttcttccagaccagctttttctaacactaaaaatgaatagatttcaagtaagcaaaggatttttaaataaatcacttcaactaagatttgcatacagtctggatgaagtagattttacgcttatattcttcagtgaggatttatagctcaacaaatttgttggtgcaatgaaagcagctctaggcacacaatgcaaactgaaaagatggaaagttttgacttcataaaaactgagaagtcaaagtagtcttttctttcatttttttctgttgttggttgaaagcccatcttttacaaaagggtttatctatagtaatattataatgcttgaacataaacaatatacaaaatataatacacaaaacgtttatttgagtgtctgcttttgtatgggggtgcatggtagattgtatttccagatactaaatcatggatcgaaatctctcctttcaagattcttattatagccaatctcttccacattggaaatttgacctgttccacatttgatattcctattaacaaggttactcttctgtagatgaaaaagtgtatatcgaagtatcagtatagtatctgaattagataacacactaaacaatataataatgtattagtaaaaataaggaaaataaagaagctgaagtcgtgcttaaagaactttaagaaaatgaaaattgaggtgttgaaaaaagcttttaaggctaacgtgaatgaggcgtccaagtgggaaacccatccagttctacttttttgaactttgcctgtcgtggccaggataattaggtagagatcagaagaacagagtgagacatggaaatcccaatttatgtgaccttgggcaaattacttagctctgtatgcctcagttttctctttgatagattgaagatatttatatatctttactatcaagccatttacagaaataaatgagctaagatatgccaagtgctttaaattgtgttaagtacaaggtaaataataaatgtttattattaaaagaggaaaattctgtaagtaattttgttatgctaagtaaatttacctttggtttgcccatcatttccttcattttccagataaccctttaaaatgaatttgattttcaaacaataaaaaacaaaacagcaacaaaactccctctgacctcctctcaccttctttagtccttgccaaagtgttaatattgcaaaagtactgtgagaatttcctgtattgtggttcctggaacacttcagaggcttgtgattctactgcttcttattcacactataatacatgtctcaccaatagatgattcaagaacatcatttaaatacacaatttttcattctctatttttgctaaatttcttcatactcaactttcagattctttaatctccagctcagcttcaacaattcaacgctgttctttctgaaaaagtacacatcgtgccttctctacttcgctcttggaacataatttctcatggcaggtatgtgtgatttcagtcactaaattaaaaataaccagaaaagctatttcttggattggctgattttggggtaatgctttaagagaaaaggacatgattaacagtggatgtttttaggattttcatgcattagcactttccacattcattatattttcctgattcttcattgtataacttagacatgatttcatgaagttttttccacaggtttgaagagtggtttctgacagggctacctttaaattctgagtgagaactgaactttagcctggttaaattgtgagcaacagtgttctagtatagcaatagaaaatgccaaatattaatgacacaatgctgaaaaggttttaattgactatttatgttgtgacatccaaaaattacacaaatgaacagtttgacacattgtactgttgttaatgacatcactctttgagagtgtgttcacgttagcacagaatctcctaatgttgaaatgttttaggtgaaaggcctaaaagcaagtaattttgagtatgaacaaatggaatgttctaggggaaaaaggattgtttatgtatgttcaatatactgtgaaatgaagccaggcctcaaagttgttacccatcaatttgttatcagttatcacaccaagtccagaatgttcctatgtcttcttttccctataatatctctacgaaccaatgagcagctagacatttatcagagcaaaacctgcactgagatgaggagagggcatactctcaactagtattattgtgacaatggtagactacgttgaatgaaagattcttgagctagacacactttcatgtgatttctgacttggatacttacttgctttgataccttgagaaaataacattattattggaccttatgttttctcatctatgtaatgagaaccatactatctatcttgtgattttgttgagagaataaaaataaatgcctgttatgta

SEQ ID NO: 5822 - DNA, 6000 bp, Homo sapiens
tacaaaagaaaaacatttattcagtatacctttaatatctgtcttctagtattacagctggcattggctggagaaaggatctcttcatttttcattttggctacaattgcttcttacttattttcttgttattcttctcccgccataaagctgtatccacactggaaatggctcagctccctttgtcagcgatttggatcagtcacgcatatcccaactgcctgaaaaaactgggttcagcaattagtatcaatctggtaactgtctaatgtggcaagggtggctcatttctcctgcaagtttagatgtcattgttgacatcaccacttctcctctctagccacatgccactttcctctctgttccaccaaaagtgtcaggccatggcccatattctagaaaggctcttggtatttcatcagtgttctctttcctaagcagtttaaggaccagctagctaagagaccagaaagtggggtactaggaggattttagagacttctcattttgtgaaactatattaaaattacatcttactgagaggaatttaagaaagtaagcaatacacgcctgtaatcccagcactttgggaggccaaggcgggtggatcacctgaggttgggagtttgagaccagcctgaccaacatggagaaacaccatctctactaaaaatacagaattagccgggcgttgtggtgcatgcctgtaatcccagctacgcgggaggttgaggcaggagaatcgcttgaatctaggaggcagaggttgtggtgagctgaagtcgcaccattgcactccagcctgggcaacaagggcaaaactccatcacaaaaaaaaaaaaaaaaaaaagaaagaaagaaagaaaaagaaaaagaaaaagaaagaaagcaataacagccagaagaaaatgggctgggtgtggtggctcacacctgtaatcccagcactttgggagactgagttgggcagattatctgagcccagctactctggtggttgaggtgggagaattgctggaacctgggaggcagaggcttcagtgagccaggattgtgccactgcataccatcctgggagacagaacgagactctgtctcaaaaacaaagcaaaacaaaaaattagccaggtgtggtggcacacgcctgtagtgctagctactcaggaggctgaagtgggaggaccgcttgggtccaggaggcggagattgcaataagtcgagcttgcaccacggcactccagcctgggtgacaaagcgagaccccgtctcaaaaaaacaaacaaaaacaaacaaaaaacccaaaaaacaacaaaaacacccccaaaaaccataaagaaagccagaagaaagcctgagagagaaatagagagaggagagttggagaaagaaagaaaggaaagggaaggaatacaacatttctggtaaattctcaaatttcaaagaggagttgtgaggaacaaacattcctttgacttgggaagatactgtgtaactttttcccccattctatttaccttccaagcagtgtgtgctaatattaatattgacatccctgttcatataatagctttggggaacatgttgcatagtttgggattcttttcggttaactgagtttgaacaaaaacaagttcaagctattattagttttcttttctgtgggctgtaggggccagacctgccttagtagacttcttgtatcagtcattaaaagccttcgtttcatgcattcattaaaatgtttacgccggttcaaacttgaaaatctgccccaaatggcaacgtgccagaagttgattcttgttgcttccgaaaaaggggaaaatatccctttgctggagtaacatttgcactgggtgagagagacattccctcccaagaatatatggctttattgagtgaggtcaaatgaaactttgtccggttctttgcccatgcagaaaatgaatgtgtctaatttaccttccaaatgggggaaatgggagcagaaaggcagcttactcgacattgtttggaaagaccatataaacgccaggggagctgtatctccagccccatgtggttttaggccctgaaccgtttactgtctgtagtctcaaaattgtctgctcatagccaaaggaacactcaggcttaacgagttaatcacatccagaggcacaaaaagctagaacttcagccagaacagatccaattgctttcccagactggataactttgttttataaaataagctcagtgatatttcaagggttaattataagtctttagaaatcctggacttgcattcatcttttaaaaatatttacacaacttggctttctatggcaccactctgtgtgtgcatgtgtgcatgtgtgtgtgcgtgcatgtgtttttgcatgtgtgcatgggtgtgttttcacagctcaatgcatttaatattttctctccaaacctagacatctccaaaagcacacaggaaggtgagatttatcagacccatttggaaggtgatgctgtctactcactttaaggtgaaatggaggcaggcagatgcctcgctcacagccactgccaggtagtaggcgtggaaactgggcctcctgctttctgggtcctgttttgaagcccgtccctgagcccagcgtctctctttgtgaaatccatggaaatccagatagactgaaggattcctctactcaagtactttaagaaaagttcctgatttttccccttgttaagcccgagaaggaggtgggagggagaatgcctcccctctgctattccttggctccaggtttctctttaagaaatgcaatcagaccacatactcctcagcatctgagaacacttcctctggagtccagttctcctttccaggcagctgagggaagagagactttaaaactggcagagggcatcaggggtgaaaggcaaccctgagagtaggaaaaggccagggagacaggccgattccagcaggggagactggcccatctggagcgccagcacatgcctggggatttcctggcctcacctgcagacaccctcccctccctgagggttgggatgctcagagatcacagggactctcaacccactgctgggagtggcccctctcagacaggcatttttattatcaaatgagcaatgagagaggggagaggtgaggaactctatgagaaacatgcagtcttttatcacgtcatcagttttcagtgagaaaatccagaccttcttacttttacagagatagaattcagttctcagggacttgtgaagatgcagcatcatcaaatcattgtgtgtgtgtgtgtgtgtgtgtgttgtgttttccttatcatccaccttagaaaatattctccacattcccatgttaaaatattttttcctaaaatccatccatccacatgccaacatcctaaagacagtaatataggttcattgcagaggatttggaaaatacagaattgtgaccagaacaaactaaactgcatccataattttatcatcgaatttgatcaacattttggtgaatagccaccagtctgttttctatctttttagggaatataagttccaagaggcagggatgtcattcacttctgtgactcagtgctctgaatcaggcccagtgaagactgacgtgcagcctgtattggcagaatgaatgaataaatactacacacgcatattttgaattgaaataagttgtcagggtgcagcagagaataacagaaatagaattgcttggatgtgctgacctagatccaagctgctactggtaacgtactgtatctccttgaataagtcacttcacctctctgggcctgagctgcttcttcagtaaaataatccttgtagctaagatttgttgagcgctcactatgcacactgccatgagcccctatatgtgtatttctcatcatagctctatgagttacatacctgccatctccattttatgcatgagaaaataggcatggagaagttaagtggtttgcctaaagtcacacagcaaatttgtggagagctgggcttgaactcaggcatctgggcttttactctctccagtggaatgcctgggctgtgggatgagatgacttcacaggcctctcccagctccagagttgagagagagagaggagtggtgcagggaggtagtagggatgattatgctactggccaagttcaagaaagtcaattgtagaacaaggtccagctgattattacagagagcaaagttcttaactagaggacttcctcctggaatgtggagagtccacacgggcactagcagagcataatgaaagaccaggaattctctgctgttcaatcagtgctccatcactcagaggcagggctgcaagagctcctagtgtgtccccttcgccttcagggcctccctgtacagccacccacaggacagtgcaccagggtcaggcagggaagtaaataaaaaaaggaatctgataattcctgacagtgagcagcagctgatgcttttaatgggggaggaagactgggaatctcgcttgatgatgacctaggacttcagtcagcaggacactggcccctttcctccccctcccaggctgaaaccttgtgttttgccttatgtccatggtaaccaagtctcctttttggtgaggaggaatgggcttcagtaaacagatctatttgtgtgatcctgttactcatttgaagcaatgtccctccttttttccactgtggtctgtgtgtctgagtcagagagagcctacaacagggttctttgaattgatggctcactcccagccactcttgactgactgccagcttagcagggcgtagcttaccaacaaatcttttttttttttttaaagccagactgattcatagaaactcctttaaaacacggtgaaaagaaaccgcccattacacaccccagtacaccagcagaggaaacttataacctcgggaggcaggtccttcccctcagtgcggtcacatacttccagaagagcggaccagggctgctgccagcacctgccactcagagcgcctctgtcgctgggacccttcaggtaggacagctcccaacgctgtggggactctcagcaaaacttctccttcctttccacggctctgcttcttctgacctcatcttagttttgctttttcttttcttccttcgctatttttctatgatcctctaagaaccaagtccttgaaacttttggctcaaagtggatacagagacaactttttctagaaagttcagaaaagtgtattttgaggacggagtctggggaaatcaatgggatggggctaaaatcgtgcctggcagtgaccgggttcttgttctaggatgtggagggagcagggactttgaaacaaactgggataggatcctgtttatggaggaaacaccacacaccttggaaatgacatcgggaactggccagatgtttttcacctcctccgttttgattccgattgcttcaggacttgaactgttactctgctcgctggttgttggttgggattttttgggtggtggtggatagataactggttttcagtttatttttgacattgcttttcctgcctgtttgcttccctattcacttctgtttaaatttaagtattttttttctcctcacaggatgggaagagggggattggtttgtttaaagaaaactgttggccgggcacggtggctcatgcctgtaatcctagcactttgggaggctgaggcgggcggatcacctgaggtcaggagttcaagacaagcctggccaacatggtgaaaccctgtctctactaaaatacaaaaagtagccaggcatgatggcaggtgcctgtaattctagctacttggtaggctgagacgggagaattgcttgaatccgggagatggtggttgcagtgaactgagattgcgccactacactccagcctgggcagctgagtgagactctgtctcaaaaaggaaaaaaaagaaaaagaaaaaaaatgaaaaaagaaaactgttag

SEQ ID NO: 5823 - DNA, 6000 bp, Homo sapiens
ttcatagtttttacatagcacctgaaatcaccatcaccaaatttttcataattagatattggtagctgtttttaagtggcacatatgtaggcactatgtgtgacactgagttgactgtaaatgttgcattgcacctttaatttgaggggaagtaaagaaggaagggaaggaagcatcagcagataccatttccacttagcaaacactatgtcttgctttagctataaattacactcaggttctattcttgcttttcatgccaagctaaagtgaatcactcagtgcagtgatgctaatactttaaattatagttagccaaaaaacctagttatgaagaaaagctaaattagtaaatgatagcaatgtctggaacattcagaaaaaatattttagaagttcattagtcaaggcatttcatataaataaaatatgagataaaatcatataacttaaggctaatgccttttattaaagttttagagcaattaaatgaaatgctagcaacaaacagaatcctagtatatgactgaatgaaggtataatatctaaaaacacgacaatctgcatttctaatgtagggctgtttatcctatagcctgtaatttgtgtccagtgatatatatctgcatatctgctcacactttctatgtatgtttccttatttctttaagtatataattttgtgttgtaagacatatcttgtaatgcaatattcttatttgattttctttaagacatgtaagagtcaagtacaagtaagataggtctcttaataggaatcttttgcggcgggagaggggaatataatgggaaaagactctccaagtaaaagcaaaaatgaccttctttagcgtatttccactgtttttcaagtgcagcaagagtaataagtcttggcagttggaacatgccattcacctgagggctgtcaatcgttctcattttgaaagacacaaaacttatgaattgtcaacacatcatttaggtgagaaaccagtgctcatcaagagaaaaaattaaaacaaatgctcaaataaatagaaaatcaaaatgcttcctggtcattttcttccaagagcttaatacagataatctacagttcatatgctataaaaattgtaacatgtgagatatggacaacaaactgaatggctattacttttccaatggaatagagtctagagaacaattgcttgaatttttctttctattccatataaagtaaattatttgtcattgagcatcccccataaatacaattatctaatactgaaactgctgacagccttgtaggctatttcagtagtggaagccaggactaaacacactcaactacattagaggttgtccctggaggacagaattgagcttcattggcaagggcaccgtaagagttccatttgactcctcattaaacctctcacagggattctagctgcttctctgtgtctgcgcttgcttttctatagaagagatagatgtgaaccacgtaggcaaagatacatttctacatatttaggaaaagatcgcttttcttggtaaaaactaagcctcctatagattttaaaaagaccttccagtttcatgatcattaaccacctttttataattttcaaaggaagtagagagctttatttcaatttgtgagaacttatttttcaatgcttgttttatggcatgtcagagatattattatttttctgtgtttattttttctccaggaaaagtagcattaggggaaaacagttggtgataatgatctcagccttctttacctaacaatgtggttgtcataatgaaatctggaccaatatgtagaagcaattggtgaaacataaattactatatgcactgtatgttgcccctggctgttttgttgatttggagtcttgaaaatagcataataagatttatcatactttggaagtattgtattgaaaaaccagtcaatagctcaaagaaacacaaaacatgctctatgaattgaaaaccccacactgtggatgacacagcattcacattctttatgagaatctcttctaggacactgttatggtttaagtgcaataaaaacaaatgaaagtattttatccagcaatagcaatgtaaaatacttttctctagagaggaaattttctgtgattataaaataatactttcagtcttcagcccatctaaccacaatgttactaataaaataacaacaatgccaattactaatgctttactacttactgtttactgttattgttcctccaaagtggtccacataatatatatatatatatatatatatatacatatatatatatatgcacaaagacagaaagagctgaacaaattgtgatgtatgactaagagaaaaacagaaagacgcagcagaatatgattatttaaaagggagcctcattgtgaaagttcttttagcatttacaagattaatttatgatcagaactgctttaaacgccctacgcacatcaggcaaggctatatccatgtatacacacagacatatgcatacacacaaatgaatatcatcatacagacccataattcacagacacattttaaaattaaatgctactccaaagagaaattgttggcatcctgtgagtgtgattgttgcccttggcctatatatatcttatgttctagagattagatcactttacagccacttctgagggcgagtgggaataaaatgctgcttcaggagcgtcaaaataaaaagaaaacatattaaaccaaagttcctataagtgcaatcccaaggattaaatgttcagatagcccgtaagtctaacccagagggagggaggagcagttaacattttctcaaaagaaagaaaatgtccaaaccaatgatgagtggacatgagggacctgaagagagcatgtgatgggaatgtgaaaacaaaagaagcttctaaaagaagacaccaaggataatattctcacaaaaattcagaccatcattctatattttcatgcatatgaattttggtacatatttcatgcatatgaaatttggtacatatatacatatatgtaccatgcatatacatatgcgtacatatacatatacgtatgcatacacatatgtatctatgtacacacatacacatatgtgtacacacatatgtacatgcacacacatatgtgtacacatatgtacatgcacacacatgtgtgtacacatatgtacatgtacacatatgtgtacatgtacacatgtgtatatatacatattcacacttatgtaaacatattcaatctaaagcttccttaagacacatacaaacaacaaccaaatgattagtgtttggccattgctcatgcagcaaaagctgagtaaacacagctctggatccttttctcaggccaccactccctagctgtgtgactgacaaagtctatgcctgaacacctacattcatgaccagggtggcctttcctgtctcctgttgcccaagcatgtctcaggtataaataagttccaatactgacagggcacagcaagggtaatttacatgacaataagaaatgatttctatctgaacagtgcataccagagttgatttcgacagacttatctttaaaaaaatacacataacaaaaaaggagacaagtagtagattggggacccacagcttgaaagtcgttgcttgtgattctaaaacatcccagtaaaattattcacagataattgtttaaaaatataactgtacataccgttgacacttggacaacacagagaatcacgtagttgaaaatccacatataactttgaactcatcaaaaccttaactactaatagcctactcttgaccggaaaccttactgataacataataaacagttgattaacacacattttgtgttgtatgtattgtatactgtattcttacaataaagtacgctagagaacagaaaatattattaagaaaaccataaagaggagaaaatacatttatattcattgagtggaagtgaattatcataaaagtctttaacgtcatccttttcaggctgagcaggcagaggaggaggaagagggtttggtcttgctgtctcaaggctggcaaaggtggaagaaaatctgcatataactggacccaacagttcaaacccgtgttgttcaagggtcatacatgtaaaatactgtgatttttcccccttctatattcagcttcaggtgacccgacacactttggtatcaaaagagaatctgaaatgtacaagaactgcggatttcaaatggaaaaggtgcataattgtgctatttgttcctgggtgagtgtgggacggagacggtgagagtgttgaaatgggatggagataatggaagcagtggggaaggagagaaaatacccttcctatcacacacactcacacactcacactacacactatttctacagtcacaactacccaactgttattgatcctttataactgcaattgagtacagatgtaggaagattgagagggaactgggatctggcgcctggattgctcaagagaggtcagggaaacccctcagaactcctgagacccagagattgagggaggggttgaggcggagtctgcaatgggggctgtccagcagtagcaagcagcgggccgatcctggtggagggttgggaggctgctgtcattttatgggtcggcagccagagtgagagtgtccctgctgccagaggactacggcgggctgggcgcggggtccccgcctctcgctcaccacacagaccccgcgcctcctctggcagccgcggtggtggcggcggcagagcctcgcccactccaatccccaccctctccatccttagtcattaaagaacagcagcgcctggcacgttcttggaggaccccgggcgcagaggaggaaagggagcaggcgcagggggactggaaaggcagcatgcgctcgccaggagcaacctcggcgcccagggtctgaggctgcagccccagttcgccattgtgagccgccgccgggggagtccgctagcgcagccgtgcccccgagtccccgtccgcgcagcgatggggcacctgcccacggggatacacggcgcccgccgcctcctgcctctgctctggctctttgtgctgttcaaggtaggggagctcctccacccctttttcccagcggtccgggcggcagccgcgctccggcgccctcgctctgccgttgggagcggcgcgccccagggcacgatggcccagccgcgggaagcgcctgccgtgcagcctgggcgcacgctttgttgtcctcgcgtgtgcgtgttcctggtggtcttgagaggtagggggcggggggaagaataagggaagtttgctccctccggctttcgccctttgtgctcttttatcgctgctgaaatccacatcaaaggtgggcttgttggatcgtgctttctcaggcaaaatgaggtcactttcttttctggtttccactgcaccccaacgctgcttaacctttccgccctccctcgcacagaatgctttgtcttaattttccttactgctggaattatacactggagagtggagggggactgagctccctggacacaaatggactgccagggctacgttagggcagaattttctttgaataaggagtgtcaggtagagagcttggtaaggattcctctccccaactcctatcaacatctttacaattccttttaaaaagtctccagactttctccactatatttacagatgatattacccctagatttaatggtggaaaaatatataataataaactttttcgtatcttctttggaatgtgctaccctgaggttttactttgagaaaaatgaaaagcaaaggagttgcttttgaaaaatcagtttgacaactatactgtacataaatttttttgaagaaatgtcagctagatgttttcttggacggcgatgtgaagttctgaagtgattgtctatcactcatgtcttcagtggatctactttagttctgttgtt

SEQ ID NO: 5824 - DNA, 6000 bp, Homo sapiens
ttccattgtgatcagaaaagataccaggaatgatttctacttgtttgaatttgttgagacttgttttgtggtctaagaaatggtctattttagagaactcatgtgctgatgaaaagactgtattctgcagcagttgggtgaaatgttctgtaaatgtcagttagacctacttagtctagagtatagtttaactttgatgtttctttgtcgattttctgtctggaagatctgtccattaatgacagtcaggtgttgaaatccctactattattgcattgcagtctatctctccatttatatctattaatgtttgttttatatgcttaggagtgccagtgttgggtgcatagatatttataattgttttatcttgctgaattgacccctttatcaatttacagtgacctctttgtctctgtttgtttttagtttgcagtctattttatctgatataagtatagttactggggagtgattaagtcatgaaggtggagctgtcgtgaatgggattaatacctttataaaagaggttgaagggagctcccctgccccctccgtcatgtgaggaagcagcaggaaggagcaatcttacaagcaaagagcagccctggcacacaccaaatctgctggtgccttgatcttggacttcccagcctgctgaactgggagaaataaattttctgttgtttataaattacccagtctaaggtattttgttatagcagcctgagcaaactaagccatgctcctttccagctaatcactgcccccaccccattagaaacaaccactattatcattttgattattatacattagttttgtttattttttaatttaatgtaaatgaaatcatactcttttgggtctggtttcttttgcttggtgtaatgttgaaatttagttagatatttttgtgtgtatcagtagtttcttacttttttatgtgatgtagttagcatttccttgtatgaatataccgcaacttgtctttgcactcttctgctgatgaacattatggtttttccagtttttggtaagtatgaataaagctattaaaatcattcttgaacaatctttttggtggccatatgctttcatttctcttgggtgaatactgtatttagaagcagaattgttggattataaaacagttctatgtttatttcataagaaactatgagacagttttactatttgattccattttataccctcactggcaatgtatgatggtttcatttgctccacagctttgccaatgtttgattttgtttgtctttaattcttgccttttcaatttttgggaagaagcaaatcgttgtggttttgatttgcctatctgtgaagactaatgacattgaataccttttcatgtgcttcttagtcattcatatatcttcttttgtgagtgttgaaatattttgaatattttcaatttttaattttctacttttgtctcaattattgtcataggtgttcttttgcatacaagttctttgtcagatacatggtattgggaatattttctctcagtctctggctttcctatttattttcttaataatgtcttttgatgaagttcaatttatcagtttttttttgttttatagataattttttgtttcctgcctaaaacgtctttaccgaccccaaggtcatgaagataatcgaggttttcttccagaggctttatagtattagccttgaggtctgtgattcagcttgaatttttgtgtatgatgtcagttaagggtcaaagttcaatttttttaccatgtggctattcagtggttccagccccttttgttgaaagctttcctttcttcagtgaattgtcttggcaccttgttgaaaatcaattgatcaattaaatatagttctatttctggattctattctattcttttgacctatttgtctatccttatacccttactatactctcttgattagcttcaagaatttttatcattttttagttctgttcctttcatcgtggctacttttgcctcttgacaatattagcttaagagtttatttcagaagttagcacagctttcaggctgctgtgtatctcagagtgtctgtctaaaaaataggaaaaataagaactcccttatagggttattgggagaaataaacaatctagtatacatgtttaaaatgtattataactctaaaataatccttaagtgttcagaatattgcttatttttgtttcactttttgctctcttgaccttaaaacatattcttatgcaagtttactgaaatcccccagtaagtttcagattgtggcagggcacctgttctgtggatttagggaaaaacaaaggccccaatataattgaggggagtgacaggcacctgttttcttcctatttacagcaagccttaacagaaggtgatggcaattctttctgccatttttactttgtctgttttaaaaacagacaaaggtattactggacttccaatgctttgctcttccagatatttctaatttgatcccctgaacagtctgctttttttttctttattgtggtaattcctttttcagatgaatgacctttgctctcctcaccccaaatcaatgaccttttaaactgttttaatatttactagggaattacttgttctgaggcttggattgagtttctctaaaagatggtattctagaatttaaatggtggtgagaggaagggttgaaaagctgaatccattcttttacccagacgaaactaagctgaataacaactctctctctttctcaatcatttaagagcttataacaaagatgaatataaagtgtcaattattttacaacttttacctgttaccgccctagttcacaccccaactgtcattcttatttctaaatggaaactttccttccacaagcttaatggcaactttttacctttttggcctttgtgtttactagattgtaaaatcctggaggacagctctttgacgttatttatcttagttttagattttagcatcaaaccaagtacattgcattcatttaataaatgtttattcaattaaaccaactgctaatattctacccaatacagtgtcatatatatatccgtatgtatatatataatattgcctgatacacacaaacacacacacacatatatatatgtatgtaacaggcaataattgttcgtgatttagtgatagtaggaactcagtatttattcattgatcaattaatagtttgaacacattctatatttagagcattagatgagtcaagtgctactttcttttttaaaaaaatgttagaaccagctggacgcagtggctcacgcctgtaatcccaacactttgggaggctgaggcaggtggatcacgaggtcaggagatcaagaccatcctggctaacacagagaaaccccgtctctactaaaaatacaaaaaattagccaggcgtgatggcaggtgcctgtgatcccagctacttgggatgctgaggcaggataacggtgtgaactcgggaggcggagcttgcagtgagctgagatcgcgccactgcactccagcctgggctacacaggcagactccgtctcaaaaaaaaaaaaaaaaaaatgttagaaccattcaactagcattctgtagaccaaattatctaaacagtagctctcctcttcctttttctgccatgttatccataagatttggcctgtatcaccttataataaatgaagagagtcttaaattcttataataccaaactcctttggagagaattcagaatagatttatgtcatctcaaattctatcctattccagttaatgttacagacagattctagtatactttacaaagataggtgaataagtagagttttgaaaagatacagacataaaagtgaagaacagatgccttctgatgctagattttccaaaactcctactgttatgcttatatagaaatcattctcagaccttccttggattaatttctgttcctagagcaaactggtagttatttctttctttaatagaacatgaacttgtccatcacatcctagaaagttagtcctagggatatcctttaaagcctaaaggagtaaattaagagcaaaaaaaggaagtagaccttgcaacaggtggtgagtgtctgagatatagcactaggagagaaataatatagattgaaaacagaaatccttaaacatttctcatataaacccatgaaagatagatccataaatattgtggggactatggggactaggaagcttggaagtatccctaatctagatagtgatggtaggctaaatatctacggcttccgtaaacgttcctctaaacctccctgtaaaaaacacactaagctgattgtgtaatgagctgatccagtacaattgcctccaatttcattctggaccctgaacaggaggggacatcgtgacaaagcaaattgtctggtatcatgaatttggaacaccgtaagtgatctttactgagggttacattctgtcattgtcagccttttaaggaggccttgccaccagcgcaggggaggtgaagtctaagggaaggtaatattgtcaatgcctgctaattagttctaccctggagattttaactttctgcgaagtttttaaaaacaacttccaaaactctgctgatcctgaaatgttcgagaattcagagttcctagacaatggctactgtcccccttcccactgattaggggagttggcatttcaggaaccagagtttctaagggcgccaaatagaagggctcaaagggaatcagcaggcgatggttactgtgggcgggtaaatcaggtgatttagaggaggggtttggcgaggttggggtcgggctttaaacgtgggagggctaattaacaggagattaactggagaggggcggtgcctgcgtccggcccgcgcggccacagtccctgcattgcgcgcgacccggcggcgggacaggcttgctgcttcctcctcctcggcctcaccgtgcgtactgggaggggagaaggggaccgcatgcaaagggtggcaggcagggagggccagggtgggtggcagatggaagacttgggggggtctctgccagctggaagtgcttggctccacttagcagctaaacttagcttttcaatcgatcgcttttgaaagggaattgtatttctgtccccgtgcgggtaagttttcccatttctcaaactccaggaatgaaacgagagagtcttttcatgcttgagtgatgatttccaaacttagccttttcaagtcaaagtaacctcctgtttgaaagggtcccttgaactctggggaaggaggaaaaggcacgtgtagtaatggaggaaatgcctgtagtttgaacgactgctgttctccccaagagtgcaaaagcctgcgatgtctcaggtttcatgggcatagtggcctttatgcctattgtaaggcaggatttgctcttctgagttcactttgataggagaaacatcagcaagttttaaaataatactaaataatactactgctaataatgctagctatcgaaacaagaggatgtgggttagatgataatatttttgtgtgatattatagccagtgacaagagagctaagggtgagccccttgggacggttctcacctgtgccccacttccccagtctggaggaggaagccatgtggaaggagaaaaggagaagggaactctctttttcgggaattaaggtgtcatatattgctctagctggcttgggacagaggagagaggagtgcatgtaaatcttctagtctctctgcttctcttgaaatgtggcagtctgagctccacgtttatattcccctatttcttctccctaatttcttacccagtgagtgctgagtgggtgcccgcaagcattgctgtatagcacccaggcctccagtgagcaatccttaaagcccagttttcctggggtcccagcctgctgtgagtcccagcctacacctaccttttgcatatgcttt

SEQ ID NO: 5825 - DNA, 6000 bp, Homo sapiens
cacttgaaaaagtcagaggcctatttactgccggccctccttttttagagtcacctctagcccgagtacgtattgtcacagaactttgcacaagaatcttcctcagcagttcacagaggttacgtgttcttctggcaagtaatctccctttttaaggattgcaaatgacagttttatgaaatgctttatcataaagtaatgagaattactaactttctagcctgcaatatctgtgttctctcccactctcaatccttagaccaaagcttcattttttttattatgctagagtacacttctagtaaccaagtcatgtttcatttaagattagatgtcattaaaacatagaaagagaccctaaaacacagcattttatactagataaaaatttatgtctcactaaatatcaagtggtaggttacttgttgttggcaggacaactcttccgttctcaatatgtcacttctgtctctggattcagggaaacagcttttgccatgcctgacacaactatcagaaagagggaaaggttccagaatattgcatgctttaatctttaaggacaaagccttaagtaccaaatatgttctgtttaaattccatggtctagagcttagacacatggtcctacctctcaaaagggaggttgaaaaaggaagtcttaagttggatgggcatgtgaccagttgaaactctattgtggaaacaggttaagaaaagatacggggtgacaattctcggtttgatgcaatactgttattcagaaacaaatctaaatatttaaagcaggaaagattcatttaacacagagaataaactactttttgcaataatgataggaagagccacagttgtgggctctaggctggaacacagcacaggagaactgacacacccagggactgagatcaccactgggactattgcagatgaacaatccactataaaagcaatctcagaattagaaagctgggaatcagctatcaccactacttttgccacagctgcttctcaacaccaagggaagtgaagaatagatactgcagtattgctttgaaaaacaagatcttccttgccagtacacgagagggaaagaaaaaaagaaaagaaaagaaagaaggaaagaaagaaagagagaaagaaagaagaaaaaagaaagaagacaaaggagacaggaaggtggaaggaaggagggagggaaggaaggaagaaggagggaggaaaaaaagaagaagaaaaagaaagaaagagaaagaaagaaaagaaagaaagaaggagaaagagaaagaaagagaaaggaaaagaaagagaaagaaagaaagaagatagaaaaagaaagaaagaaaagaaacagaaagagataaagaaatatactccttgcttgtaccttttacctgtacaaatacaacttcttggtagaaccaactctcatcctgactctcggctgcaaaggcatatgggaagtgtcatttttagattttcagaatctagagtaaggcatgtccacttggcagagggtcaaaacatccacctctgctcctgctgaacaatgggcaccacagaagagcatatattattaaagccttattttttccaaattaataatgaaaatgacagatgattgttcaatctactcttttatattgtatatatttatggtgtacaacatgatattttgacatatacattgtggagtggctaaataaagctaattactatatacattacttcccataccattttttttttgtagtgaaaacacttaaaatctgtcttacaaattttcaagtatacaatacattgctttaaccataatgactatgttgcacaatggacctcttgaacttagttctcctgtctacctgaaattttggtatcctttgaccaacatctccccagtctccctcccacagcttctggtgaccaccattttactctctgctcctattaatttaacttttttagatttcacacatgagtaagattatgtagtatttctttttctatgtctagcttattttactcaagataatgccctccggatcatccatgttggcgcaaatgtcaggatttccttttttttttttttaagggcgggagaggattctattatatatatgtactcattctacttatatagcagtagatgaatctctcatctatgttgattctttgataatgaatatcgtcttaaaatgattggttcaagtttagtacaaaatgttgaggctcaggttgtataagacttagaaaaatcgatataaatattttgtttatgctagacattaaatagtatttttggaatgtctaaaagctctatctttataaagaatttcatattctattgattcattttttccctcttaaagtgaatgaataagcaatttactttttaatagagcagcaatgcagttagcacttaatttctaaataacttgatcaaaacattttcctttctctggcagtttcctatatttgaaagagaaatattcaagtagctgcattattacctgtatctgccttcatttgtttttcacccaggtagtaactaggttcgggtcactctattaggcaacagggtgggaagttgctcttgtaatcttcatgatagcagaaatcttgtcggtctttttcaccacattataacctgtactaggtagctgctaagtacccagtagatactctatcagaacttttgacttaaaaagtgagatcctgctttaaaatgggtatatacaaataacattaaaaagagaatgagatggaaaatgtggagcatgtatgaaatatgcaggtagccagcttcggggtctgggtcacaactctttatattaaactttaaagacaactctgctaagttctacctactggcagagcgagtgttgaaaaatctttcccaggtttcgagcaagactacaggcagatgagtaaggacacttgtagaactcatcttgcagtgtgtgttctgaaaattgaggaattttgaacaaagaaatcacatttgctttagagtggggggaaataagcctatttagaaaaaaatagaaggttatatataatttgacattgatttcttaatgtaacaagcaagaaagttttagaaggctgttcaccatggaacttaaaattttgactcttacaataaaatgcataaacaaaataacctaattaatgttaacataatagacaggaaatcaaataaacttgcacgtaaacattgatttttaaataaaatttgcatttcattgttgaagcttgatcattctgtcttaaatactttgcctaaaaaacggagtagactactaccaggtaagacagaaggctttgtgtgtttaaattttagacataggacatagccatgaaaaaagtaaattttagaagaagcttaattgttctctggattttattttaattaaaagtgctactaaaataggtaagcgtacatgttaagcaaggaaagataaattattgaagaacatattttcaaaggaaacaaagtacaaggtacatttttgtaccctttcttgttaatgaataatgactatcaaactgttctaaccttaatctttgagttttatcaagattagattgttccttttcaacccagtccagctctcataagtcctcctgaaaaatgtatgagcctactttaatgtgtggtaagagatttgtagatccaaaatgtttcaatttttgaagggactatttttcttaaatagtggctcattttaggaattaatttaaagagatttttaagggtttagcataaatgtatttggaaaaaatcactacatgtaaagttatttttaaagtcatctatctccccagagttccaaagctaagaattgcagctcaggttattattaaaatataaaggtatgattgttttcctgtgtgacatcaccctccacttctaggtcaagctcccatttttctgtgacctctcacacctttgtagctttagaacagaaggggtacaagggtcaggggatggtgttgtacaattgtgaaccttcaatactataaatatctttccatgagtagccctgaaagtgatataattctcaactttctcttctctacccttccatgtaagaaatcattcttacagaaaactactataaatctaaaaagaagaaaaaagaagagaaaaaaacagcaacaacaaaaggatcctacgacatattttggaaacaagagtaatccaatttatttttatttcctaaaactttctcccagtaaagcaggcctacttctggcagatcctattttacctggatttaattatataatttcttgtgttgtctcagagtctccacacattgttcaatttcaagagcagtataccaaaacaataaaccacccacatctacttgctaatcttataaatattgttttattttgctgttccttttcagatgttattaaaaatatttaaattgaaatttactatgcatcctaaggctaaactaaaaattaatatctttctaaattagaaaaaaatgaacttattaaattctaattaaataaagaaaatacctcgataggtgaaactcacagaatggctagaatacctttttcaagggctcacctctgctcctgcaaattgagaccactggtttcaccacatccaaccacctccacgtttaaatgcataataaccttagctgtaatttgaggggaaatatgcccaccttacacatttttaaaaaatatattttcgtttgtatattgctgatcagtatctttggcccgaattctgtttagcacagagaagctcatttatggttgggtttttggcttaaatcctctattcattatgtcaatgcaaaccttttttctttttttttccatataacccttcagggtttgatggaaaatagatttccaaacacgcccaacctgccaaacaggaataaaagcttccagtggaagcatcacgttcccttgaaatagaagtgttttagcttgtgtgagcgtatttgactcttgaaaagaaatgagatcgtgtttcatttcaggaagatatatgcgtcaggtaagaaactaaaacaaataaacttcctatacttaactacatagcatgatatttcgactcaaatatattattgaggcaaaatagctctttaattatactgtgatacaaaaatggtagatgaatttaaaatcagagtgagtttgtgccatattttgaaacagagatatccagcttgtaaatattccccaaaatctacaaccagaagatagatctttcctgaataaacttattctttctctctttcccccctccctctgcctctttctttctctctctctccagctagctgacaccacagattgcatttgataacataccatttcatcagagccttgagctaattatttcattcatgtctactggtagatttttcttagtgtacacttttagtgtcttgaatctcgtgccactagcttgtagacggcatccccatgatggctcccagaggaaattcttgttaaatggaaggtggaatttcttaacatatgggatccaaactagaagcaactcctgctagggagaagctctgttctatttccatttcctccctctgtgctgcggtccgtctctgctgtttgcctacctctttattcgtagctcactgaggccaatgtgaacctattgtgtgtcccagttgcccccttatgttcttgtctgatgaacaattctatttctgaagcttaggattaaagttagagataagatataccccattctttcaaactaatcataatatataacttgtacatagtgatctcctttttaaatgcattagctaatgtaattattgcatcttaggaaacagactcagagagcgaggttaaagaacacatacccctcatgtcattaataatgttattaagagcttggattttaatcaaggttttcttattccaactcaagggctctttccatgacatgttatttattctccacgcatgtctatctgccatctgaaccag

SEQ ID NO: 5826 - DNA, 6000 bp, Homo sapiens
cagttcatttcttaagttaaaatatacaatttctccctcctctccttttttccttgtggtttttggttggaaaaaatattgacttatttgtcctaaatagattctttactttcaattttgctgattgtatcttttgtggtgtcatttaacttgctcttctcttccctatatttcttatggactggtacttaaatctaatctgagatttgataagattagttttctttggaagtaaaaaggaggactatttcaaaggtggtgtttcaagcttttaacttccatcaggatgttgaaaatggcttgagatttttggtgatattattggtcattgattacctttcgctaaattcattaattcattagaggtttgaaaattataatactctcacttataagtgaggctaaacattaggtacacatggacataaaaatgggaacaatagacatggcacattacttgagggggagatggaggagaaaggcaagggctgaaaaactacctattgggtaccatgctcactatctagttgatggaatcattttaccccaaaactcagtgtctcacaatatacccatgtaaaaaatctgcacatatactctctgaatctaaaattaaaaattataaaattaaatatctaatagcttaattctactagaaattaatctacttatttataatatagaattataaaaactttatagcgagggtctgaactgatcatattaacagaaatttttcaaaatggttaggaatcatccttatacaataactactttctcaatttctctactgtgccacaaaaaccaagctatgcaaataaaatccattagagctctaccaatctaaaagcaattgaaaattagtatattttctacatttttttctttaacctttgcatttgactcaaatgagtttaaggattttgtatttttaatattgtttttattaaatctgttctagaaataaatttatcatctctggagaatagtctctattttcagactatttgttggactaaaccaaggttgcactggtattatttcagtaaaacttcaaaaccttaccaaaatcctttcaggatactttaagattgaattacatttcaataaatattaattaccctaagaaagaaaagaaaattataatattcttattctctcatccttttttgtttattagttggaattctatgaagagaaatttgtctttactctgtaataactctaaggaaagaatggaatagaaaagctaggataaacacacaatttctccctaaataccactagttttaaatctattaatatttaagttgtgtttagaattactccaaagtgaccatgtgatgttttaatagtgtttttaactcataaattttgtgattttatatgtttcaaccattactattttatatgtttcaaccattacaattattcttaccaatgctcaaactttcctatatttgattagcagaaacctgttcaggctggcttctgaatcctattggcacaatgtagtcttcaaggcatcccagctcttttttatgacaagatattccaggcctatcttatatctttacacctggtattagtcacatatcaaggatccatggtgcttttatttatggtgctagttgcacttattactacttagttgatcattgtttctagaccttttcagtggagagagctaatacacacacacgtagatatctatatctatctatatctatatctgtatctacatatctcctgtatatatgtatacatttttccagactgaaaaactcaactcaaatttgggtatacaaaatattccctaacctcattggatcttatattatagattatatttaaagccatgacaccagataaggtcattaaggaagtaaatatagacagcaaagaagatattccacagactgaattttggaatattctagcaatgaagactaagagcaaatgaccactgaagtaggaggaaaaccaggggtgtgtggtgaaaccaagtgaataaaatgtatcaaagagaagggcacattaatgacatacaattctgctaatacatcaattaaaatgaggtctggatattgatcactggatttattagtgtgaatgcctttaatgttcttgatgaaaatatttgcattggagtggtaaaggcaaaacctgattagagttggtgaaaaatgaactggaggagaggaaatatatacaaggaatgtgactaaagtttgggcttagaaacatggactgtaggagcaagaaggaagacagctaatagcaatgtacatttgggtagagagtagatgtcatgaggacagagtataatatttctcctgatatttctgtttagttagtgaatttcctagacaagatcatcagctaataatcagggtgcagccagaaatgaagatttgagagaggtaaagtgattgggtcattaaaaagtattacgtctagcaatgcctctatgactcagtgagtttagtggttataaatataaaataagccctaagggcatgttactgagttgttcttcaatcacttaaaacagtgcggatgcaaatactaagaagaaagaaagtggatttatctgaggtgagctttgcctgggaagatcaataaattgaaagagaaacaggagaattgagggtatacagaaggaagtgattaaaataattgcatgaaaaaattcaagtaaggaggaaaatgaaaatatgagtgtactggcttgaattgtgtctcccaaaaagatatgaggaagtcctaacccccggtacctgtgaatgtcacctttcctgaaaagagagtcttagcagaccttatcaagttaagatgaggtcatgagggtggtccccagccaaagatgactagcgtttttttaagtacagaggacagagacataaagggagaagatggccatgtggtaacagaagcagctgttggagtgatacacctataaaacaaggagttcaggctgtcagcaaacaccaggaggtggaagaggtaaggaggattcttccctacaggtctcagagggagcatggctctgctgacaccttgatttttgacttctggcctccaaaagtgtgagacaataaagttctgttttaggtcactcagcttgtagtactttgttagtgcagtcttaggaaatgcattcatttatatgttgtctgtggttaatttaccaccagaatggcagaggtgagtggttgtgatagagattgcatggtcctacaaaacctaaaatatttcttatttgtccctttatagaagtttgttaactccctcatctagagtttggaaatgggaatgaaaggctgaagtaggctacaatccaatgcaaggttgcacataagaagctctgaataagtgtaaacattatgtgcattcaaaacagtaacattaactgtggactctggaaataagaaaaggaatcgtgttggagagtgagactgagccagttgggaatagacaaaattacattctcaagggagaatttcatttcttggtgaggaaaattatgccctttgggctggtaaatactgtctcctcttgaataaaacagtggtctggccacctgttagacactgagaagtctagactaacactcaatgtattcggatgtttgctcactatttccgatggaaaagtctggtttgattgttaaagtaaaatatttggcctttcagagtgtgaaaacaccattgcttcattgcaaggtttaatataaacccatttttcttgcattttcttttctttcttttgtagtaaaatgtgcttgaataatattaactattctgaccattatgtgaactaaatatatatatatataaaatgatgataccttccgctcatttgcaatgtgcttttgaatacattatataatttaatccttaaaacagccctataaatctgttttttttttttttaaacaaaaaaattctgctttacaaaggaagaagttgagactcagtaaaattaagtgaccatcccagagtctcagccacttaagagtagggtgaatcttggataattctggtagcaaatttatttattggtagaaaataaatgcaaactactactgcttaagatcctctaaagtttttctcttggaaaaagaatgtattagaattgtggactttctcagtgcaaggatttatttatccttggaattaggcagaataaacaattgaatgccaaaaattcaacgtgtttcttttctgttttcaaaactcatagaaattgtaaatatgagcaactgatcatgtctctgagaattaactctttttgtacagagcgctgcagagctttgattgtgacctgatacttggtccttaaagattctagaacaccaatggaaaagaaaaccatgtagcaaattagcccaagaaccgttaaagacaaaacaaaacaaaccaaaaccaaaacacacaaacaaagaaaacacaaggatcccagtgatgtccctaaggaatagttggcttaaaaactttctggaaggaggaggggtctctgttataaacttccgccctcctctggcttctgttccttaccctctgccccctgcggagttgtgttttctgggaatcagcaagtaagatcacaagtggtcttttcttttattcactctctcccataaagaaagctttatcacgtgtggccttaaacttgcagcaaattgcaaagaaatggctcaaaagcttcagctctttctgtgccctgggagctgagatgcacgtcagtggccttgccagcgtggccaattctctgctgactgccagaaaaaagaggccaggaagaaagaggaaagagaagagatcgctcaggggtgagaccatgcccttcatcttttcttttccctaatctcctctgcttgtgtccacccacactctccccacctggcaaaattgttcaaaattgctgtggagtttacctcagtttcctctttcagtctgtggtgtgtggtccatcctcttgctgagcacattgaaaggaactggctatctttgatctcttcctccaggtaagacttggttctctcattttatattttgtgactaatacatcagattcttatgggagattaacccttaatttctgtgcgatttatgttttatccataaaaatatcagtgaaaggtgatgatcccctcattagtttgatggaaataagagagaagattggttaaagaaatcagataaactcaaatttgagttcaaattttgagtctcatgcttataaattgtttagcttttgacaagtcacttaattgctttgggccatctaatttaaaaaatggaattctaatattacgtttgttgggttgttttaaggattagaaaaagtacgtacattactcaacacaaaaatagtacttattaaatctgaatctgacacagataatttgtattaggtgagaaattagtttctaaacaacacacactcctctgcagcaagtgccgtgaggctattttttagtttgtctgaagggaggcatcctggtgtccagaagtcaagccaggacagaggttttcctcacaggagatggccaagagaagagagggaggagcgtggttgcctttaggactttctctgtggcagtccttggggactgattgctggacagagtccgagtcagttgcagagcagaggggttgagtacatctgcgggatctaactacaaccttcctaagccacttgctctctccatttaaaatctggagggctgattttgaaactaatgaggactgattattcaatgtttttgaaccaaaggaagagaaactgcttggcttgtttttctttggcctccagaataagttatgctccaaacccagggtattggatgaaaactgtcgtatgtcttttcctggaagaatctattcaagtggccagagatcaattaaggatttgccaaatgcaaataattctgaataactgtgtactcttgctctacttctgcagttgcaaatgaagagagagagcctgcaggcc

SEQ ID NO: 5827 - DNA, 6000 bp, Homo sapiens
ttccttgaaactgatattaaggagggcttgctgttattgatgtggtgatgtctatgatatgtccataggagtgaggagaatgcaagatcattggagaaaagagggttaaaagaaaaccaagaagctagagaattaaaacaactattttcatgatcgttgaaatcaccaataattaaaacagaagtagtattttgacagatttcctttgacccaagcactaaaattgttgtgaagggtgtgggagtgactgagggtttgtgcatgatctcaagaataataaatggtagagtcttttgatatgagattcaaaactataaattctgagggtaaagggtaggaaaatgagaacaaagtagtaaagtaaggcaaacaggaaaccagtccatctggtttggagcaatatggaagataaagcaacccacattgatcacggctgcagaagagacaggaagggccaagttatagctagaaaaaaaagagaaacagaaaaattcttacaagaggctgaaagtatggagaatttcatttattattagctatgcactccagaaagctcaagaaaagagttttggttcaggattgggagagagataggagatgggggcaaaagcaaaaatgtgcatagccacactgggattagacaagaggtaatgagtgatcaggaagtacctacttttttttttttttttttgagacggagtcttgctctgtcacccaggctggagtgcagtggtgcgatctctgctcactgcaacctctgcctcccaggttcaagccattctcctgcctcagcctcccgagcagctgggcttacaggcacatgccactagtgtccgtaattggggggttcttggtctcactgacttcaagaataaagccgcagaccctcacggtgagtgttactgttcttaaaggcggcatgtctggagtttgttccttctgatgtttggatgtgttcattcctccccgtgggttcgtggtcccgttggctcaagagtgaagctgcagacctttgcggtgagtgatacagctcataaagacagtgccaacccagagagtgagcagcagcaagattcattgcaaagagcgaaacaacaaagcatccacagcgtggaaggggacccaagcagatttcaatgctggcttgggcagcctgctttcattcccttatctggccccacccacatcgtgctgattggtcccttttacagagagctgattggtccattttgacagggtgctgattggtgcgtttacaatccctgagctagactcaaaagtactccaagtccccactagattagctagacacagagcactgattggtgcattcaaaaaccctgagctagacacagggtgctgactggtgcatttacaaaccttgagctagacacagagtgctgattggtgtatttacaatcccttagctagacataaaggttctccaagtccccaccagatcagctagacacagagcactgattggtgcatttacaaaccttgagctagacacagagtgctgattggtgtatttataatcccttacctagacataaaggttctccaagtcctggctagactcaggagcccagctggcttcacccagaggctgcctcacctggggctgcaggtggaactgcccgccagtcccgcatgccctgcgccccgccctcctcagcccttgggcggtctatgggaccaggtgctcctggagcagggggcggcgctcctcgggcaggctccagctggcgcaggagcccgtggtgcgttgccgtgtgtggggcggcggggggaggaggggcggcagggggagagggggaggctcaggcatggcaggctgcaggtccccagccctgccccagggggaggcagctgaggcctggcgagaattccagcgcagcgctggccggccggcactgctgggacacctggcgcactttccgcagctgctggcccaggtgctaaggccctcactgcccggcgcggcccgccgctctgggtgcagggcttgccgagcccacgcccaccgggaactggcgctggctcgcaagcgccgcacgcagcccgggttccgcccgcgcctctccctccacaccttccagcaagctgagggagccggctccggtctcggccagcccagaaaggggctcccacagtgcagaggggggctgaagggctcctcaagcacggccagagtgggcgccaaggcggaggaggtgccgcggagagggagcaagggctgccaggacgctgtcacctctaaccactacgcccagctaattttttgtatttttagtagagagggagttttaccgtgttagccaggatggtctccatctcctgacctcgtgatccgcctgcctcggcctcccaaagtgctggaattacaggtatgagccaccgcgccttgcccctaccttcttatggtggtgactgacattaagagagagaattgccataagattagtcataatgataccagagctttgacccttagtgggtatggagacatgggggttctttccagggagtgcagctttctgtaattacgtcttgaccagctaaggaaggtggggtgggtaggcaatggcaggtctgctttgagcctgaagtttccttctgggaatacgcacccagtacccatctgagaactcagactaaaaactattaggaaaaattgctggggacgtgtttcagagacttgacttttactcttgtaatatgaattaactgctttaaaaatggacaatatgcaaatgccatacaatgactctatttaggtatggaatctataatgtgccaggtactgggtgaggcagtttacacagagcaaatctttattacaactatagccttcccacttaatggatgaaagcatagatacttagaatggtgaaacaacttaggaaatttatactgctgtcaagtagcagagacattggtatcaaagtttatcaaacttcaaagcccataatatttcatcagaactgtgatgattattgcggcaacaaacagcagattgttttaagcaaatttggagttgtattgatccacagctgttagcataatatttatcttgaaaaaaagtgttgcaatgtgtttcctctgaccactcttattttttccacaagtcccacaaaaagggaagtctaattacttacataggaagaaaaaagggcacagagaatgctctttgacttctgaaaacattccagaattttaccactgatagcgttagtttagggattagaaagtttctcagtgcatttgtactattttatcttcattctatgcatgtatttgtcccaaatgaaattgatgtgtcttgaatgaaatggatgtgtgaggagaaaaccattagcatgagaatatccaaactgtcttcccattctgaataaaagaaaagccataaaactgataattaatgtttagtatctctgctatgatggttctcaaaagctgacagtatgtaaaaattattctaagtgcttatttaaaaagcataatctccgaactcgtgaatcagaatctcttgggtgtggggctggatcgcacttttgacaaaggctccccagtagattttgactcaacagaggggtgtttgggagcctatatctaattttccctgccccaggtctacacttcagtgttccccacattttctaatccttctctccctccacactccggttcctttcattattctaatacttccatgaattaaccaggtatagaactaatctaggctgggcgcagtggctcacgcctgtaatcctagcactttgggaggccgaggtgggcagatcacgaggtcaggagatcgagaccatcctggctaacatggtgaaaccccgtctctactaaaaatacgaaaaaattagccgggcgtggtggcgggcgcttgtagtgccagctactcgggagactgaggcaggagaatggcgtgaacccgggaggcggagcttgcagtgagccgagatcgtgccgctgcactccagcctgggtgacagagcaagactccgtctcaaaaaaaaaaaaaaaaactagtttatcaaataactgtgatatagaaattaaatacatattgctgcaactgtatcaacaactgtcctgtcagtgataaggggtaacaatgttttcatacatgcattctctctttgctatatacatacacacatacacataaatacatatatacatacactcatgcatgtgtgtgtatatatacatgtgagagaagactccgtttattatttatatttttatagtacacttctaaaacacagccatgtgcctgagatatagtagggagtcaaatatgtttgagttactgaattaattaatttgacttcatccttactcaagaaaagtttcaactgagtgaaggtcttccattctctaaagagcaagtcaatagaaggagatcattcttcctttacacattgatgtaaggaatatatcatacaaactagtcttgatttttgtcatttagaagactagtcttgtaattaattggcaatttagtattccatgtgagatatccagtgtccatgtacgtcatattagatccatacacatgtaacaagcaaagagggtatgttttattttttgaatgctaatgtaacatgtagggacattttaaaaaatcgccttgacatattttctatttggaatagttttaaatactttggataatgtgttgtatttgtatttctaaagaagaaaatcttatgcaaccaacttaattgaataagaaataaatcattcccagaaataatttattttctaatgttaacataatgtgtacattctgagaaattattaataaaatgtttaaaagataggcttctggggtgaactcctagaattagctaggtatgttttttctgtttgcctaggacaatgacctaataagatggttaatcatcattggactcataaaaacaaacaaataaaaagccaactaaccatttaaagtgagactttaacatcagaaaaaggatggacttgttgcagttgctgtagcattcaaagtcaaggtaagaaccgtcgaggttgtctaattaaaacatttcttttatgtaagaaattttaacaaatttcagtgaaaatgtttttggtagttatgataaatattacagattttatgctctgtgtcttctccacacttttgttctgagcccttaaagccttgtaaatatcccttctagaaatagaagagcctcagatttatatactcaaaaataagagtaaatcatacctttataaagtgaaaaataaagtttggagtcctatttctattgctttctaaacaaatgaaacatgaagtctgaaaggatggacttctagttactctcttaaaatatactataagataattatttgtataaactgtattgaattactataccaggctccctatttctttgatttcactttaactggataagtaggagtgggcgggtggaggggtggaaaatatgtttcaaagtcacttaatcacctcactttcctccattcaactcgtttgatttagggtgaggggaaagagattttctagataacttttttatctctgttcaaataagagaaaaaaatcttctgggcacagctcttggaaagaattaacagctcaataaataatggtccccttcacccattcaggaaggtggcttccctgataagacagttatttttattgtgaaagtaaggtggggatgcagaaattctctcctctgaacaatctaagaagttaggaaatgctgttttcccttttatcctcctcagttccataggtacatgctagaaactgggtcacttggcctgcactggttttctataaccccttaaatatgaaaagctaaacagaaataagcagaggctggtaagattctgccctctacttcagcccaatcaaactgtgaagaactgacctgttctgttcagggaagagttgcaatgctgcatacaaatgcctgtggctctgtctataaacatatt

SEQ ID NO: 5828 - DNA, 6000 bp, Homo sapiens
cttcatggtttttgaggcaaaggaaggctggcagtaaacaaaatatgtgagtaaaatttatagtatgatggtgagagaataaaaattgagtgtcaaagggagtaatattaaaaaattgttagagaagacttcgctgggaaagtgtcatttgtttgggtactagaatatggtgagggagtaagttatgcagctatagggaaagaacattccagacagaaagaaaaataggaacaaagattctcagtagaggatctataacttataaggccttaaagctgttctttggatttttgagtgatatgtgaagccaatgggggatttgagcagagctatgacatggtatgaccctcacttatatgttaagatttacacaggggaaggaggttggggaagaggggctgtgagtggtcaggaggaaagctgagatacaagtatgagggtattgcaataattcaggaccagcctgaaagttgtggaggaggtaagaaatcatcagattctgggtatatttggaaattagagcctaatgtgagtgtgagaaatagagaagaatgattctaatattgtatgtggctgtgcatgtgcacgcatgtgtgcaactggaatgacagaattacaatgtatggggattattgtcttccctggacaataatccctggaaatggggattattacaagaggagaggttggggaaggaaagacaaagataccatgttagaaaatattaagtgtaagatgcctattagagatatataggaagatggtgagaagtcaatggataaatctagagttcatgagtaacttggctagagaaaaaattttggaattatcaacgtatggataagatttaaagacatgagaatagatgaggtcacaaacacacacagtaaggttattgtctgacatgcttcaatttagaagacaaagataaagaatttagagtaaatgaagtgtaaataagtaagtcagtgagttagaaggcaaaccacaaagggtagtgtcctgcaaagttttgcttagggagggaattctcagttctgaaaaatgctgctaatagttcaagtcagatgaggactattagatgtagcatttaggtaatttatgacttaggaaaagtagtttcagtggaaatttgggggcaaaagcctgataagagtgtgctcaagagagaatgtagagagagagattgaaagcaataattagacaagctatttctctgtaaaaatagcacagaaatagggcaatattaggaaaaaatgggatcaaaagagagatttttggaagatgaaaaagtgacagcattcttacatgctgatggaaacatttaaaaagaggatagtgctatccttaaaaacacaaggggaggagtcaatgtcatatgcaagtggagattggccttagcttaaacttgggtagttcactaaggcagaccatgtggtggtactggggctttacatagataaatgtggtcaagggagcttttgaagtttcttctttatttatttattttttcagtaaaataattcatcagctgaaggtggggaagggatgtattagaatttcaaaaaaaaaaaaaaaagatgaaggcacaaaatgctcagagtgcaaaatggcgtgaatgatttcttggcaaaatgaaaggtccatttgggcttcctaatcatacgtttaaagtcagcatggttgagagattttcctcagttacatttagcttcataagggaaatgtgcagagttatttgagagttaaatttaatcaagattgtggctttgacatgcaattaaaataatgcaaaacagtcaaaattatatgaagttatatagaagagagtgattaccgtgaccattaaattaacccagatgtatagataaggaacaccgaaatctctggcaaaatcaaattgtaggttatacatcctggtcagtggaagcatgtggatctagggtgttactgagtgtgagctaggagtgataaagagtggtgctccaatctttgatattatggagagattacagtggtgtgaaaagcataggatatgcccatagcagtaggtagaagccaagatcattgaggagaaggctaaaaaataaaaagaaaataaaaagaaaacagagaattaaaaagattctcttcatggtcattaccatcatgaataattaaaatagtagtagcattttgagagaatggctttggatcgagagctaaaattgtcatgaaatgagtgggagtgactgagcgttgatagatgatttcaacaagaggaataagtgatagagtctttcaatatgagatccaaaactatggattatgagtgtaaagggtggggaaatgtaaagaaactagcaaagtgaggcacattggaaaccagcccatctggtttgcagcaatatgggggataaggcaacccctatgtatcactgctgcaggagagggagtgtctcagggaagaccaatttttaagttcaaggcagaagtgaagcagaataactcagagaagaggtaaaggtaaggggagtttcagtcatgactagtgatgggttccagaaaactcaagagaagaatttcagtccaggattgggagaaagagagaagatgggggcaaacataggaatgtgcagagccctgtggggattagagaagaggtgatgagtcatcagggaatccctaccttcttatggtggtcactaccataagagcgataattgccatggtaatattagtcttgatgatgccagagctttgatcattggtgggtatagaaacatgtttggagaataatatgtagaataggagttctttccaggagagtgtagctttctggagctgtctcttaatcagcaccaacagaagtgaaatgttcgggtaagggcggatctgcttggagcctgacggttccctcttgaggtgtgcctgtggtacacacctgagaactctggggctaaaacctattggacataggttttacagatctacaggatacagatctcagagattttatttgtattcatttaatataaattaactgctctaaaatttataatatgcaaatatcatacaattaatctaattaggtgttgaatctataatgtgccaggcattatgtaaggcactttacatacactaaatctttattccaaatatagacttcttactttatagatgagtgcactgatgctcagaaatggtaaataacctactgatgtttatactgctggcaggtagcagagacatatcggcatttaagtctttcagacttcaaaggccatgatatttcatcagagctgtgatagccgttcctgaaaaaaatatcagctgattctttaaatcaatttttgtcatctaactgatgcgtggctgttagcataatattgatcttgaaagatgttttgcaacatctttcccctggtgtactcttgtttttccatgatcccacaaaatgagcagtctaattatttacacaattaggaagagaaaaggggcacagagaatgctctttgacctctgaaaatattggagaattttacaactggcacctttagctcaggattataaaggttgttagttagtttgtactgttttatcttcattgtatataatatatatattagtctccaaacatgttgatgtgttttcaatgaaatggatgtctgaggagaaaaccattagcctgagaaaacccaaactgtattcccattgtgaataaaaggaagtccataaaaatgatggaaaatgttctgcattcctgttatgatatcaaaatctggcagtacatgaaaatttttcaaagtgcttatttaacaggcataatctttggtctcctgagccagaatctgctgggtatgggactggattgctattttgacaactcgccagtagattcttactcagcagagtatttggaagccttactctaatattttggccttgggtctacatttctcagttctgcacagtcattcttcccctctacactactctttagtttgtctcatgattccaatactctcaataattaaccaagaatagaactaatcaatcagataactgtggcacagacatcaaatacattttgctgcaaccatatcaacaaatgtcccatgaatgataaggggtaaccatattctcatatatgcatcctcacattaccacatatatatatgtgcatatgtgtatacaggtaaaagtgtgtatatatgtatacatgtatgtttgtgtgtatatacatacatatatcttcacacttttctgaaatatatatatttatgtgagagaagggtctgtactttatttcagaagagagcttaatgtccaaggtataattgagagtctaaaatgtttgagttattgaattaattaaacttcatctctactcaagaaaacttttaactgagttaagctcttcctttctccacaagtcaagtcaataaaaggaaactgtgatattaataattctttcctgttttgatgtaaagaatctatcgcataaagcagtcttaattttcatcattcagaaaaatggtcttgcagttaattgggactctcttattccaggtggtatctccagtctccatacataccacgttagaaccatacttatgtaccaagcaaagagggtatattttaatttttaaatgccaatgtaacctgtaggcatattttttatttgtcttaaattatttcctatttggaagttttaaatacctggaataatttattgtactcatatttttaaagaaaaaaatcttatgccaccaacttaattgaataaacaagtaaaagccattcccaaaagtaaggtttacttgttaagattaacaaaaaataatgtgagaattctgagaaatataatctttaaatattggcaactggagtgaactcttaaaactaactaggttttatatgtttgactagagcaatgacataataaggtggttaatcatcactggacttgttttcaaaaagccaactactttaagaggaataaagggtggacttgttgcagttgctgtaggattctaaatccaggtaagaaccattgagattctctaatttttacatatattttatgtaagaaattttcacggaagaagattttgatggtcttgaaaaatattacgaattttatgctctgtgtcttccacacgcttacattctgagcccttaaaacatagtaaatattccttctgggagtagaagagcctcaggtttatatactgttaaaaataaagtagagaaaataatacctttatatatttaaatataaagtttcaaatcttggtcttattaatttccaaacaaataaaaatcaagtctcaaaaatgaagctctagttaccttcttaaaatatgctacaggataattatttttgtcaactacattgactgatcacactagactccttatttctttgatgtcttcttaactggatgaaggcagccaagggtgggagtagagggaagagttaattggcaaacataaaaaacaggtgtctcaaagtcacataaccacctcagtttccttgtttcaactcaagtttgatacagggtgaagggaaatatattttctagataatttatctccaattaaataagcaaaaagtcttctcagtacagtttttttctttttttatttcattattattatactttaagttttagggtacatgtgcacaacatgcaggtttgttacatatgtatacatgtgccatgttggtgtgctgcacccattaactcatcatttaacattgggcatatctcctaatgctatccctcccctctcccccaccccacaacagtccccggtgtgtgatgttccctttcctgtgtccatgtgttctcattgttcagttcccacctatgagtgagaacatgcggtgtttggttttttgtccttgcgatagtttgttgagaatgatggtttccagtttcatccatgtccctacaaaggacataaactcatcatttttatggctgcatagtattccatggtgtatgtgtgcca

SEQ ID NO: 5829 - DNA, 6000 bp, Homo sapiens; identical to SEQ ID NO: 2754

SEQ ID NO: 5830 - DNA, 6000 bp, Homo sapiens
ctgcgtagtattccatggtgtacatgtatcacattttcgttatccagtctatcactgatgggcattttggttgactccatgtctttgctattatgaatagtgctgcaatgaacatacgcttgcatgtatctttataatagaatgatttatattccttgggtatatactcagtaatgggattgctgggtcaaatggtatttctacctctatttagatctttgaggaattaccacactgccttccacaatggaggaactaatttataccccaccaacagtataaaagcatacctttttctctgcaacctcaccagcatctgttgtttctgggatttttaataattgccattctggctggcatgaggtggtatcttattgtgattttgcatttctctaatgatcagtgatgttgagctttttttcatgtttgttggccatgtgaatgtcttattttgagaagtgtctgttcctgtcctttgcccactttttatttttttatttttttgagacagtctctctctgttgctcaggctggagtgcaatggcggggtctcgatctcggctcactgcaacctccacctcccaggttcaagcgattcctctgcctcagcctcccgagtagctgggactacaggcacacaccaccacacccagctaatttttgtatttttagtagagatgggctttcaccacgttggccaggctggtctcaaactcctgacctcaagcaatccacccgcctcagcctcccaaagtgctgggattacaggtgtgagccactgagcctggcttgaccactttgtaatattttttttcttgtaaatttgttaaagttccttgcagactctggatattaaacctttgtccaatggatagattgcaaaaatgttctcccattctctaggttgtctgttgactctgatgatagtttattttgctgtgcagaaactctttagtttaattagatcctacttgtcaatttttgcttttgttgcaattgcttctggtgcttttgttgtgaaatctttgcctgtgcctatgtcctcaattttactgcctggattttcttccagggtttttatagttttgggttttacacttagtctttaatctatattgagttaatttttgtataaggattgaggaaggggaccagtttcaattttctgcatgtagctagccagttctcccagcaccatttattcccattgcttgtttttgtcaggtttgtcaaagatcagatggttgctggtgtacagtcctatttctgagttctctattctgttccattggtctatgtatctgtttttgtaccagtaccatgctatttggctactgtagccttgtagtatagtttaaagtcgggtagcgtgatgcctccagttttgttctcttttcttaggattgtcttggctatttgggttcttttttgattccatatgaatttttaaatagtttattctaattctgtgaagaatgccaatggcagtttaatgggaatagcattgaatctataaattactttgggcagtatggctattttcatgatattgattcttcctatccatgagcatggaatgtttttccatttgtttgtgtcctctctgatttccttaagcagtggtttgtagttctccttgaagaggtccttcacttatggggttaatatttagaaaatataagaaacccctacaactccagaacaacaataaaaaaacacaaataactagatttaaaaatagacaaaagacttgaataggcatttctcaaaagaagacgataaatggtcaaacaggtgtacaaacatactcaacataactaatcattaggaaaatgcaagttaagactataattagatattgtatcatacctgttaggatggctattattttaaaagacggccggatgcggtggctcacgcctgtaatcccagcactttgggaggctgaggcggatcacgaggtcaggagatcgagaccatcctggctaacaaggtgaaaccctgtctctactaaaaatacaaaaaaattagccaggcatagtggcaggcgcctgtagtcctagctacccgggaggctgaggcaggagaatggtgggaacccgggaggcggagcttgcagtgagccaagattgtgccactgcactccaacctgggcaacacagcgaaactgtgtctcaaaaaaaaaaaaaaaaaaaaaaaaaagctactcgggaggccgaggcaggagaatggcgttagcttgggaggtggagcttgcagtgagccgagattgcgccactgcactccatccagcctgggtgacagagtgagactccgtctcaaaaaaacaaaaacaaaaaacaaataaaaaaaagtgttggtgaggatgtagagatattggagtcctagtgcacagttgggggaatggaaagtggtgcaggcactatagaaaatgttatggagggccgggtgcggtggctcatgcctgtaatcccagcactttcggaggccgagacaggcggatctcgaggtcaggaaatcgagaccatcctggccaacatggtgaaaccccgtctctactaaaatacaaaaaattagccgggcatggtggtgcgtgcctgtagtcccagctacccgggaggctgaggcaggggaatcgcttcaacccgggagccaaaggttgcagtgagctgagatcgcgccagtgcactccagcctggagacagagcgagactccgtctcaaaaaaaacaaacaaacaaacaaacaaaaaaaaacagttacagagttttctcaaaatattaaaaattaaactaccatctgatctaggaaccccacttctgggtatttatccaaaataattaaaatcagcacctggaagagctatttgcattcccatattcactgcggcattattctcaatagccaagatttggaaacaacctgaatgtccacggatgattggataaagaaaatttggtatataaatacaagggaatattatccaacctttaaaaagaaggaaattctgccacatatgacaacatagataaacctggaggacactatcccaagtaaaataagtgagtcacagaacaacaaatactgcacgatcccacttctctgaggtatctaaaatagttaaactaatagaaagagagagaatagtggttgccaggagctaggggaggggaaatgaggagttgctactcaataggtataaagtttcagttatgcaagatgaagatgttctagagatctgctgtacaacattatgcctgtagttaataatactgtattgtacacttaaaaatttgttaagtgggtaaatctcctgttaaatgttcctgccacagttaaagaaaaagagagaaaaagagagtgagagagacaacgataagctattgaaggacgctcagtggaaagtgtggtgatgtaggcagtttttatttttgcttaggattttgtttgcttgtttaccagtatggtaagcattctgtgagaccattcttgcctctcatgtggtccttcgtgtaaccagggctggatttgtgccagtgtgcagtggcattctgactaaatgttaacgtttgagaggcatgcacaaggcctacggctgacaatgtcttccttgctgttttgcaactcccgacatttatcaccactttgagttaaggtccatattcaagtcagattgtttccagataatcattgaggtactggcatgtaacacacattaaataatctcatctgctaacagagagtaagtgcatttttacatgttttagagattagaattggatccaaatgaggtgtaacgtaatggcaccatgagatctgtggtggggaagggtgatggggagaaaagcttcagcaaaaagaggactaaagtagaaatatcaaccgccagctttcatctgtgcctgggggcggtccttcctgtgctcgtggcacgtgtttatactatgattgacaacccttaaggagaaaggctaaggtcatgaaacaaagctctctttccttttcttttccctccccctacctttaccccattcctttctttttctgtaaaagctagctgtgatgtgtaaatgttgcacctgtcaccctgacctcattgtagagccatcttctgagtaactggcaactggcaactgatgctaagtgctatgaatgcagctggtgggaactgaacacaccagtgtaaaagatgaaactagaagtccttatctgtaaagtgagggtgtcaggctaagcgaccaataagctttgcttaagattttatatttgtgaagcatttatatgtaaatactttcactttttcctctgatctctaaggaagtggtgttaagtttgagtttgtcataatttcacagggtgactcttagttgaaatgtcactgacagcttgcggtttggacttttttttttttttttttttttaactccagtcagaaacaactagaagccattaaacaactacaggaagatgctgtcaaccaggaaggcatccttaggaagaggctccaagaaaccagccaacggctggaggatgtggaggagcaggtagggtggctcatggctacattagattcaggggacatctcctcagatgccctgcaaaccatgaaataaaaatggaggaggaacaacaacaacaaacaaaaaaaaaaagcaaagaggaactgcaagttcagtccctagcgactaacagtgagcagaggaagtaaagggggagttgtaagagaggcggtatcaacagcctgctgatgaaagaggcgactctgcagaaagaggcaacttgacatatcaggactttaaccgctgtagaaatagctcaggcataccaagcccatgcaaacacagaattgcagaagttcaggagaggcttatcacttccctgagaagaaaaacacattttcagttttgcctgcatcataagagtgagcactccattgctttctttcctggccacactgctacaatccagcactaactatccatgtccagggtaaggatcgagatcgagaagcccacactgccagtgaaaaagctacgtctttactgcataaattagaggaagcaatttcggaacaacggaaccttcaaactataaatactgaattatcgaacacttgccaggcacttcagcagaagacaaggaaactgaagagtgagtagcaaatattcatttatgacccagtttttgtccaccctcaggcggggcataggactacagacatttttctagattacagctaggatattattcctgagtttatgacaatgaaatggtttgagaaggcaatattgtggggctttcagagaggtttgctgagtggctaggtgcatgcatgggtttaaccattaacttccctttttgcctttttattataagctggttttgtctgtggctgtttttttcttttaaaattaattaaaacttctcaaaatttctaaaagtaaacaaggagaaaaatctagtatgcatggtatatttgaacttgcaagttgttatatattatactctgattttattagctagtttttttcctctcatatggtagaaaaggccttgctcgtctattttctttggaaattttagggggttgggcaaaataattatgaattcagtgtatatcaaaatatcaaatgtgtgaaaattcttttaaagttttaatgcattctctacatacatctacatacatattttgcattttaaaaattggaatatttgtcatttttctgtattacccaaaagtatataaacagttaccagagatttatgtgagaagacagttgtcacattacagatgtcagattagctataaaattgtttcattctagaaacctaatatggtaaaaataaaccttacttatttagccatttatcagacaattgcttttgttcagccagtttcttgttctagcagtataaatattctttttatagaaagttacttggtttgagaaataaacattgtttatttgttaattgttatataattataaataattatata

SEQ ID NO: 5831 - DNA, 6000 bp, Homo sapiens
atcctacaaaggatgtaaagatgaaataaattagcattctgttcttgaggactgtaagaaacttggagccagaaaggaacataaggcacctataaaaattatagtacaattgttttatgttgtaggaaaaaggaaaatatgtttgcttatcacctatgatgtgtcaggcaaggtgctctgtcatcttgcatatgacatcttgtcagatccttgcaacaacactgtgaggtagatttttgtagaaacaggcaaaaatcacagtgaggatgtattattaggaaatatgggtgcaaagtcatgcagtgcatgcagtgtgggcatatgaagaagagtcgaaaataagttcagaaaggtaagttgggggcaaggatgtgaaggcttttggacaccagtcaagaaagtttgatgagttttgttccttggtaaagggagactcatttaagtgtttagagtcaggagtgatcagggttgtgctttagagagctgcagctggaagcctgtaaagaccagacaggcaaatgctgtggatttgatgagtagggtgagcctcttctggtacctgcatccaaagaaagggaggtgtcctcaagcctgctcagatttggggatggtgtaactaaagagtcagcttgttctgttactgcaaagggcagaagtgagagtgtaaattgtggacaatcaatgcttcagacacagaaagacaaaataggtttggaatcaaatagaccttggtttcaatcccagttctgggggaatctggagcaatttacttgtataaccctggagagtgattcctcatgtcaaaatgatgctaataacacttaccttacaggatgtttgtgaggattaaatgagacacaagacagatgtctttggggagaaagtcagtaaagcaggatccagatggatatgagaaagatccctttttttttttttttgagatggagttttgctcttgttgcccaggctggagtgcaatggtgcgatctcggctcaccgcaacctcagcctcccaggttcaagcaattctcccacctcagcctcccgagtagctgggattacaggcatgcgccatcacgcctggcgaattttttttctatttttagtagagacggggtttctccatgttggtcaggctggtctcgaactcctgacctcaggtgatccgcccacctcggcctcccaaagtgctgggattacaagcgtgagccaccacgcccaaccgagaaagatctttaatggtgggctgcttgcttattttgtgtgttactggttgccagataagttcaagcaggggttggaagctacctgtaaggaatgctgaagaagggtttcttgcattttaatagtggttgcatcaaatgacttttaggatccatttcaagttctaattgagcaggtgttctcctgctctgcagtgtctcttgctccctaccccgcaatagtgatactctttggcaaaaagttaccaaaggtaaggttagtcataggaataactaggcagaaaatatctagacctacagaataaattagcgttgaaatcataggaatcataaatgatcatttgcactaagccagccaggagccgggatagtgaggagtaagttctggctacctgctcatcaggcatcctgtcttgcttctgctgcactatcctgatttttttggagtttccccaagacacccagaggccagtgatttcagtatgtttatttaagggttacactgtcttcaaaaaatgaagtatcatggtgaagcctaaatgtagagcagataaaagagctgtaactctggttaaagggaggtagaaggaggctgaaatctcaaccattggttcctccctcacccactctgtaacctctagcttgaatgttactgctccagacctggcccgttttcagccttccctttgagtcttttgttttctggattctggatggcagctgttatcactccagctgcagaaaggatgggaggcgacttcctgtttttctatcctgccatctctgtgggggtgggacattccctcccccatctcctgtggctggctgtagttttggaaaaatgtgagcctggctgcagccgtcctgactagggctggaggaatggctggtagccacccagcctccgtttgaaggcatctgggagcaaggcaggcaacagacactgatggacaagttgtgtccctgactgtgggacagggaagggtcagtagttaattaagagacaggtgaagtagttggtccagaagtgatctgaggaagttaagggtgttgaacgaacggtgggtaggggtgtgggagaacagaagggctctggcccttctggcataaaaagagagaaagagagaggaaaaaaagaacaagaagaaacagttaaagtttttgtctgagagattatttggggatagactgcatttaaagaatggaagagaatagaaatgatacaatgatctattttctcatgccctatatttttattgagccttttccttgaattgggtataaggaatataaagaggtcctataagcaagatgcttgctcttcagagtttgggaaggcaggaaaggcatttaactggacatgtataaccacatgtttacacatctgtacaatctcaatccttataacaacctttaacataggtattgtcagccctattttaaagaggaggtaactgagattcgggatggatgttttagtgacttgcccaaagttacccaatagctaagtggcagagccaggccaagaaccttgagtccttttctctgtccactgtaacacacagctaagtcttggcagaggacaaggactttaatttaattaggctttgagagaagggtgggacttaacccacagaggagtggggatttcggttaggctgaaaggtgagaacgaagcagggatctgtgagtagacctgtttgactacagagagggtttcctgggagcgaagtgggagataagctgggaaaggtaagaagcaggataagagagagttttaaatggctagataagaattgcagggaaagggggacctgatttagaggggaagatgttgatgacaaaaccaaacattttagaaaactcatcggtagtgagtggtacagagaaataattagaactgggggaaactggagtcagaaattcaagtcaggagtttggaatactgcaggtctgacaagcaacaagatggtaattatataaagtaggtctgtgagagcagtggcccaagcctgtggatttcttgtagcattctattgtttgaaaaagtataaattatggacactcaatacttgagatatagaaagaaaatcaatggctttggagtcaaatagacctcggtttcaatccaagttctagctgatttggagaaatttacttacataactttgctgagcctttgattccttacgttaaaatagggctagtaacactcaatttacaggatgattgagaagattaaacaagacacaatgctggattctgtgcatccctctacaatttttggcagatcggtaaatgtatggcatgtcatcaatcaaaaaacaatgaggcctggtgtggtggctcacgcctgtaatcccagcagtttgggaggccgaagagggtggatcacctgaggtcaggatttcgagaccagtctggccaatatggcggaaaccccgtctctactgaaaatacaaaaatcagccgggtgtggtggtgggcgcctgtagtctcagctactcggaggctgaggcagtagaatcacttgaacccaggagaaggaggttgcagtgagccagatcatgccactgcactccagcctgggtggcagagtgacctgtttaaaaaaagaagaaaaaaaagagaaagttattaattcactatatttttagaagatggtgggttatatgctacctatatctcatacaaataaagctgcttttcaccattcaggtctgcctgtaagcagcatctgccttgaaagaaccattttctgagaatctttttcttctgtcagccaaggggattataccgcatgatatctgtcaaggataaacgttagttaattcttaattgagagctcagccactacaattggttccattctacagtaattattctcatgtggtttgtggaactcaattgtgaggtccctccttcctccacccttttcagtgtgtgcattgaaacagcagccttaaggtctttaaacggggaaatacatttttcttgcttcagagattcaattttacttgcccgagaagcttgtgtggtgtgattttcatcgctaaaagcaacagcagccacatggctgacaacaccaccacttaacaattcaaagctcggtcaccgttttcaggagtctcttccaaatctttctgaagtgcttttgaagttctacattccccgtctaagggaacacccagcagtcccaggataaaagggcagaagggtgagctgacgttttcctttatttgcatggcttaaagctagccattttctacaccacgcgccgccgggcttgtacatgcccgtgtgcctgtgacaccgaggcaattgtttctccttaaaaagggggttcgcgtgggttagtttcgtttctgatctggaatctcagtaactacaacaagaaaagtttaaaactcgacccgccaggttcttccccatcggattatctccgttccttagagatagcaggaagggcagcattttcttccatccacccacttccagccctagtctggctcagcgaggaatgcataaaattagtggactcctctgagtgacgttccccggctccaatcagcgggcgcgcaggcgcccccggccccgccccactgctgactctctttggctgattcctgcagggagggaggagagaagggcggcagtgggagggggaggtacctggaactgggagtgatgtcagctcccagctcggtgcctgcccggattcctgacatggtgtagtgcaggcagggtggggaaaggacggggaaggactcgtgtgctgcgagctggcggccgggccggagtgctggggctttgaactccgagaggaggtggaccagaacttttggaactagtgccggcggctctccaccccccaggtaagggcgttttgctccactcccagacgggagggaagtggcaccgttgtgtggctgcagctggctgttgcagctgctcctcctcttccccgggtcgatttccttgtgcaactcactcctgtttcccaatgggaacgggcactttttgggggtggtgggggtggaggggtagggcttaactcctggggcttggaccgagcttgtacgtgaagaatactccaggattggacgtttaggtcttgtctgtatccttagacccccacaccctaggctcccggtaatacctgagaaccccaaccagaggggcgtgtgtgtctctctgtctgtgtgtattgaggcatttaaaaatgccacaaaaaattatggatcatcgactcaaaaattatgctcgttgaaaagaaaaaaaaagttttgtatttttttgtctccttgtggcctattatatattaaaagaatatcaatgttagtcttatatatcaatgtaaaatatccttttgtgtaatccagtcaggatgtgagaaattcacttggggtgtttattaattatgagcttgcgggaaaactcgtctcttgggggcacacttctaaaactgcaactagtattcactcattttaaccgagaaatcccttcagctgccagctttatatctggagaggttaggatggctgctgagaatcttcagatctgtttcctgtggctgcttgaggggcgagctggtagttgtgttttcagggatcttttttagagaagggagttttaacagggaaacgcggtggaaggcgtggcatataaactcttaattatagggacgtgaagttttcaacatgtgggaccaaaacaaatccttgctttcagtaagaactgcggagagcaatagaaaaagaacttgatttcaaagtcc

SEQ ID NO: 5832 - DNA, 6000 bp, Homo sapiens
acttaactaatattcagtaccagtgagggtaagtagaaaaatcaagctctgtattaatttgacctaaaagctgccataacagaagaaaccagtagattaaaaggaaggaggcagaaaagtgtttatttaaaaccttcacagtttactgtttatgtccttcttcttatatacaaagttataaatctttgcttatttgatcagggttccagcttttttattttcttggttacaagatgactgccctcagtaacaagaaccacatgctttctcatttatcaagggagagaaaggagccacagcccacaattttggggctaaagtcctgtaattggtgccaatttgctcaaccctgaacaacatcttgtggccaggggaacaacgtaggttgggattgggttatcttaactggactaactttggagataaaggtgaggttaatttcacctcaatttcttaggtgtactatgcacaatgtgggaagagtggaataaatgttgggattgcaactacagtgtccatgataatcactttcaaagcatatatatatgtaacaactatattgttagttgcagttaaactagatctaagaatatgtaattgtgtctgacataattttttatgtttgattcttaacaagttttaagtccggctcctcacctgttcccttttgtatgatatctgaatctaggcaacttgatgagaaagcttgcctagatccaaatatggtgcaaaataggtatttcctattttggtgctggtggaaaatttgagccatacagtccctgccctgtgtgggctttttcacccaagcgccatgtcctagccatgaaaaaaatcccaatagctttttctcctactctctcaagtcattttaaaacctgcttaggaggtctgctgtactcttcctagaaaggctcattatgtgagtaataaacctttttataccctgttggtgcatatgtggtatgctaagtcttgaaataggagccaaagtttgggtgagggttcatctcatttctgtgggtgactgcaacagcacataaacttcaatggcagtttaaattcctgcaacctatctgctgtggtctgaatgtttttgtccccccacaattcatatgttaaacttaatcaccaatgagatagcgttaggaggtggggcctttgggaggtgattaaatcatgaggacacaagcctcatgactaggattactgcccttataaaagaggctccagagagccgccctgtctcttccaccacatgaggacacagctagaaggcacaatctatgacccagaaagcagggccccactagacatccaatctgctggtgtcttaatcttgaacttcttagactccagacctgtgagaaataaatttgcattcataagctacccagtatttttctatagcagcctgaacaaactaagataccatcattgtagtgtttcattattcttatcaccaagtgcccaatcttcctcttgatgactacagccagaaacctggaatatatcttcaattctttcttcttcttcttactcctccttttttttttttttttgaaagggtcttgctctgtcatccagctggaatgcagtggcacaatcacagctcactgcagcctccacctcccaggctccagtgatcctcctacctcagcctcccacattgctggggttacacgtataagccaccgtgactggcttctttcctccttttttgttggccatgtgcctttaaaatcctttctgccaatttcatgggtaccatctcggctcaggcagtcattaattcctcattttagttattttatgtcttctatctggtttgtttgtttttctagtcttggccccgtctctcctacccaataatccttcctctatactgctgctgaagtaattcttctccaaccttgcttaactaattcagcaatttcccattaccttcaggatacagttcaaactccttaacacagtttacaaaactcttcatcatcttacatctacatttcccatttctcctgctgcatacctgcataccacaatgtttgcttctatggtatgcttacctgcaaaatatacttacctccacagttcatagacaaggaaatatatacaaaggtatatgttcctttttctggagcatactcatgtctttccttagcttggtcaattccaatagattcttcaggactaatcctgagctttgatacattctatgagaagtacttcctgtttaacctaggctgagtgaggtgttctttctccaccttttagcaataacctttatttcagtgtttattatcactgtaatatctgatttgattgtatatttttctagatgtgattctcttaagggcaggcaccatgtttttcatctcagaaggtcacaaactattaggaaaatgggcttgcagatacatgtacaacaaagaataataattgaagatggctcatggaaaaagtattctgaaaagtaagagaggcacatgttctagagagacaagaaaaggcacaatagagaaattagagccctcatacattgctggtgagaaagtaaaatggtacagccactttggaaaacagtgtggtagttccacaaggggttaaacatagagttaccatatgaccccgcaattccactcttaggtatatatccaagagaaatgagaacatatgttgacacgaaaacttgtacatgaatgtcaacaggagcattattcataatattcaaaaagctgaaacaacccaaccgatgaagggactttgaaaacatgttaagtgaaagaagccagtcacaaaagaccacacattgcatgattccatttatatgaaatgttcaagatagacaaatgcatacagacggaaagtggattactggttgcctagggctggggagaggagggagaagttggggccaaagggtatggggtttctttttggggctgtgaaaatactctaaaatcgaatgtggtaaagcatgcataactctgtgaatatactaaaatcactgaattgtttataaagaaaaagattactgtggggaaggaagaaagatttcatggagttggtaggatttgaattcactgataaataagtgatataaaaagcaaagtgatgtgctatagtgaataaacaagcccttctgttgggcagatctggctttaaatccacttggtcaatttacacttcctaaatctgtaacctcatctaaagtgtaaatatattaatatacctactttgtaaaattattgtggtaagttatatatgggatttaaaatatttaatctaatgccaggcacatagcaaatattaataataaatattagttacttattataaatctgtttagtatggaatacagtttagtattgaatatcgggacagagtgaacatgtaagtacatcaatgggaaggaactcccagaaactaatctggtttccagcagaaagagatatgagagacaaaataatataaaggtaaccttactaagtttaagaaatatttatgaataccttttttctaactactagacactttgctagactgctggatacacaaagacaaatgagaagtgagtagattgctggatatacaagtgagaagtggtccttgacttggtagtctagtagacagataaaaaaatatgtgtaagaaagcattacatttcttacaatagaaatgttttttgtatgcataaagaagggggtgggctggaaaaagaatgtagtcaaggtgacttgctcaatactgaaactgctcattaactacttaggccagcacttatggcagacttgtcaggatgccttgctaatattttccacttccagtacagaacagagattacaggtttaagccaattttgttcaacagatgagaaacccagtgtccaaggatgaaagaatacttgttatacaaggaatgtgaatattccagagatttatgctcaaagtccccaggttagtgtctttctttctcactagactgtaagcttcttgaagacaaatatcttgagtgttaccttgctcactcttgaattgtcaaaacttggcccaggactaggtatgtggtatacaatcaataaaaatttgttgaatgaatgttcttcaaaatccttccatggcaaaaacagaagaaacattcacgagtggactgctagttgactgtttctctcatcgctattgacagtctgaaatggacaaagacatctatataatcattccttcctttcaaataaataatctgtgaattacgctattcttttcctattgcttcaggacaagctatttgacagaaagcttttaagaaaggctttgcaagaaaactctgcaacagagatggcacgtatgaattgctgtgatctggagttgaagacaagaacaaaagtaactctagagcagaattctttgaccaaagtcatcttactggttggcggaggctctcagtctacttgcatccggtgcttgagagttcagacaggcaaagatgagaggtagcatctagtcaacatccatttcttgagcacttactacatgtcagccactttgcttagtccccggttttactgtgctctgctaggaagtggtgaagagattcggcgggatcttcttaggaccaatcctacaaagttccagatggaactcattttgatttgggggacggtttacttgcagggattaggtggagaaacagggcctgctactcaagaggaatgagaaactgtaactaacaggaggtagactgggaaggagcatggcaaagtcaccccttttcacagggcaacgctccaaagaccacgctcaagctggggtggcagggctctgaacatggggccccgacccgggcctcggcctggggccacgtgacgcgcgtgtttacgttgagtgacgggcgctgtgttgggcgggccttggcggaaatcaacttccgggggcagaggtgttcgaagccgggtggtgcgtgggctaccccaacctgtgtggctgggccgcggtctcccctcaagggcctggggccgtgcctcgggtgtacgcgtaggggtctgtgtgctgggggtggctcaccgggcagcgtgggtgagcggcgcagcggcggcagcggagagcgagagaggggagcaggtaagtgaacgctcgccttccggggcctgggtcttggggtcggggccgcgcgaggcgagcggagagcgccccaccgggggaggagcgcggacgagcttccgccgcctgcagcccgcctgctgcggcctcgcccttggctgtcgcagcgaccaggagtcagggggcgtgaccaacctcctgcgggaacggagccagctcccgggggtgggagtgcccactcgttcctgcgctcgccggtgggtaccggtatctgcacgtcccagaatcgagtgttttcgaaagtctacgcccacgaacacgtgattattgtgtcaccgaagcgcctaccgaacggagaccttgattcttgcttagattacacagaacgcgcctggtttatgtatccccttttactttgccaagtacattggggtaaaagctctacagcgtctgccagccacatttccttagagtttcttgggccacatgttgcaataaaagtggcatttcagggtcaaggcaggagccagtaactttgccaagtggtgaggtatccttcgtccccgttagcacgcctccctttcccaacaataaagatattttctccatctgcgcgtgtcgcctactgcggaggaaagctttggacatgaaacctatttttggcttcactttaaggagtggaactctattaaaagctgcgctggtgtttttttggtaggatgatgttgctgctgctactctcacttgcttccttgatgagagttggggcagagctcgatttcctggagggtaaagtcttggccacaattttaggtgactcagcggccccttatgaattctgactctttccttccctcccctctcagctgtgcggatactgatgccacctttctctccaaat

SEQ ID NO: 5833 - DNA, 6000 bp, Homo sapiens
ggaatgcagggggcccctaacaaaggcaaggaggtgaattccctgctagaggctttaggagggtttgcagccctggtgacaccttgattttagtccagtgagacctgtgtgagactactgaactatagaactgtaaaacaatactttttttttttttttgacatggagtctcactgtgttgcccaggctggagtgcagtggcgtgatcttggctcactgcaagctctgcctcccaggttcacgccattctcctgcctcggcctcccgggtagctgggactacaggtacccgccaccacgcccggttaattttttgtatttttactagagacagggcttcaccatgttagccaggatggtctcaatctcctgaactcgtgatccgcccgcctcggcctcccaaagtgctgggattacagaagtgagccattgcgcctggccacatttttgttgttttaagccactaaaattgtggtaatttgttaaggcagcaatagggaactaatatactagagaagcaaggcagaaaccaggttcctaggtttcagttcctccccagttctctctgcctcatctgctgtgagacagcttgctgaatgagatcccctacaccctcccccacagcacactcacctcattccacaggagtaaactgcgtgagagaatgaaatagacgatgtagtgataagatgtagagctctgattctgcctgagctcctagttccagtcatttttttttttgaggtggagtgtcactgtgtcacccaggctggaatgcggtgacgtgattttggctcactgaaacttccgcctcccgggttcaagcaattctcctgcctcagcctcccgagtggctgggattacaggctctcaccaccacccccagctaatttttgtgtttttagtagagacgaggtttcaccatgttggccaggctggtcttgaactcctgaccccaactgatccacccatctcggcctcccaaagtgcttggattacaggctagagccactgcgcccagacattcagtcatttttgaggcaagttagctcagaattaaatttctgtccttacaattagctatcctgcctaaatcataaagctatggtgagagagggatggttgcaggagaagaggtgttttttgttgttgttgttttttttttttgagatagagtctcactctgttgcccaggctgtagtgcagtggcgcgatcttggcttgctgcaacctctgcctcccaggttcaaacaattctcctgcctcagcctccccagtagctaggactacaggcgcgtgccagcacgcctggctaattttttgtatttttagtagagacggggtttcaccgtgttagccaggatggtctccatctcctgacctcgtgatccacccacttcggcctcccaaagtgctgggattacaggtgtgaggcaccgcacctggccgagaagaggtttttttaaaggccttttgatatccgataatggtttaatgtgattcccacaggaagccactgaagaacacattattcttagatgcacaaagactcttttttgtgggaaatccatttagccacttattagttaaattgatttcccacaaacaagagtgttctgaacttaaaacatgaaagccgaaattggttttttttcttctttttttttttttttagttggagttttgctcttgccgcccaggctggagtgcagtggcgcgatctcggctcactgcaacctctgcctcccgggttcaagcgattctcctgcctcagcctcccgagtagctgggattacaggcacgcgccacaccaggctaattttttttttgtattcttagtagagatggggtttcaccatgtttgtcaggctggtcttgaactcctgacctcaggtgacccgcccacctcggccttccaaagtgctgggattacaggcgtgagccaccgggcctggctctttttttttttttttttttttgagacggagttttgctcctgttgccaaggctggaatgcaatggtgcaatctcggctcaccgcaacctctgcctcccgggttcaagcaattctcctgcctcagcctcccgagtagctgggattacaggcgtgcaccatcacgcccagctaatttttgtatttttagtagagatggggtttctccatgttggtcaggctggtcttgaactcccgacatcaggtgatatgcccaccttggcctcctgaagtactgggattacaggcatgagccaccgtgcccggccttctgttttctttagaagaaaacaaaagctccatcaacagaggggtgagaagcaaagtgggtaatatctgactattatgtaatattatctttggtagaaagtcaagagacttggaataaaactgttttttggagttctgaaatttttgtcttattttatctctgaaaaattttttttttgaaaataatcaaagaggagatgttcacaaaacctgtcaagatgccaaaacaccactaatggatctttaggtcttggcttacttcatccatttgttcacagatatttattaagcacctgccatttgtcctgctgaacaaatcaagcatgttccccgcagccattgtgtacagctaagcaggtgaatggcacccactggagttgcgtagtgcacaacttccactactgctggtggttcttgtcctcatggagattaaatttagtaacttctaggaagtctttctcgaatctctatcctcttgctcagactggaaaaagtgctcttattatgttttcttttctcttttctctttttttttttttgacacagggcctcactctgtcacttaggctggagtgcggtggcacgatcacagttcactgcagtccccacctcccaagcttaggtgatcctcctactgcagcctcccaagtagttggggccacaggtatgcaccaccacgacaggcaagctaatttttttgtattttttgtagagactgggttttgccgtgttgcccaggctggccttgaactcctgacctcaagtgatctgcccgtctcctgcctcagcctcctgagtagctgggattacaggaatgcaccaccacgcccggttaatttttgtatttttagtagagacggggtttctccatgttggtcaggctggtcttgaactcctgacctcaagtgatccgcctgccttggcctcccaaagtgctggaattacaggcgtgagccacggtgcctggcctctcctcacctgctttaattctttactcaaatgtcacctttttactttgaggtttacttttacctttggaggtttggagtagaggagggatactatctgtctaaaaagaaaaacaacatttagaaatataacagtatgggccgggcatggtggctcaggcctgtaatcccaggactgtgggaggccaagatgggcggatcacttgaggtcaggagttcgagaccagcctggctaacatggtgaaaccccgccccccacccgtctctactaaaaatacaaaaattttcccagggtggtggcgggtgcctgtaataacagctacttggggggctgaggcaggagaatcacttcagcctgggaggaggaggctgcagtgagccgagattgcgccactgcattccagcctgggcgacagagtcagactctgtctcaaaaaaaaaaaagaacggtatgagcaaagagtgagtaaggcagttatcagatgtctactttgccaggaatcaggctacagcaaataaaggtttatacataatattgataataaatgcccagctcttcccctgtaaaactccaatactctaagatttttttcatgaacaccgccccccgctgctccgacccctgcttttttatttatttatttatttatttggtagagatgaggtctcactatgttgaccaggctggtctcgaactcccagctcaagcgatcctcctgcttctgcttcctaaagtgctgggattacaccgcgctcggtcctgaacacacattttgtttgtttgtttgtttgtttacaaaacccctggagaacccgcgtattctaacctgggctggtttttgtatttttgcaaaataacaccccacacattctcgtatcagcgtgcagatttttttgcacccagtttggttgtttgcggccataagcttttctttaagcctttccaacccgtccttctagagaaagtgtcttcataaggaagtcacactgctcacgcctgtaatcccaacactttgggaggccgaggcgggtggatcactaggtccggagatcgagaccatcctggaaaacacagtgaaaccccgtctctactaaaaatacaaaaaattagccgggcgtagtggtgggtgcctgtagtcccagctactccgaaggctgaggcaggagaatggcgtgaacccgggaggcggaatttgcagtgggccgagatcgcgccactgcactccagcctgggcgacagagtgagactccgtctcaaaaaaaaaaaaaaaataaataaataaaaaataaataaaaggaagtgacactggataattaagagacacaccattgcgcctttaacacatattcacacccagcactgtcacatccatcgtgccttgaggacaggcataaatttacggccttcctcctgcgctcccggcctgctcctagcctttgactagagcctgcgcagcatcccagtcccaggctagggcccaccggtgccgcgcagcctcctggaagctgtggggagtagcgttcctccgctccagaactacaactcccagcaggccttgctcctctccacctccctcgcagcgcatggcctgccgggagggggcaggtagccggcgggcccggtccaatgggtgccggcttccgaggagagggcggaggagaggaggaaggaggcgaactgtgggccccggccccattcattgccgtggccggcgggcactggggccccgtgttttcagagtcatggaggcgctaattcctgtcataaacaagctccaggacgtcttcaacacggtgggcgccgacatcatccagctgcctcaaatcgtcgtagtgggaacgcaggtgagagcagcaggcggcgttcgctcgggccagaccccggccgcaggcctggtcggtgctgcggcagtgcccactcccgcgccagcgcccactcccgcgccagcctttggggcctgtgggaggagggccttgctgggggccccagggctctccgggctctgccgcacccgccctcccggggcagcgttgcatcaaggcggagaatccggggcccggccaggggcggagccggcgcggcgggcctggctagcccggcgggtcccggggacaggagagggaaggatggggccggcgggcggaactggagtccgctgggaccgggcgcggcctcgtccgcgtgccgctgcctccaagggcacctgggggacgcgcggggcactcgggtctcgctgggctcggtgggctggctgttcccatcactgttggctttcgtgagacgggtgttttatttccctccttgccttgcccagggactgcggagttagttttggaatcgctctgttgaggctgagagacgctacggtgcgtgagcgccagtgttttcctgcagtataattccaccaggtttcgagaacgccgaagcagcattttaaaaaaagaaaaacaaaacgtgtatctagagttctgcgggtgttgggaaggaatatccgatttttctgcgtaggctgtgctttttgtcttccacagttttgtgatcgtgacctaaattgggcatcagtttctctggtcttctcatagctaactcatttttttttgaatgcagaaatgttggcaaaataactgttatttctagagtgacagaggagaagtataattttccttttctctgctacttcgattagagttcagagaaacggattttagaaattagtatattgatattaagtgctttcatttcttaatagtatcttttctattgagaagg

SEQ ID NO: 5834 - DNA, 6000 bp, Homo sapiens
gtgcagggtacctaatgctcataaggatgcccacttgttttactctgcttctaaagccaaaagggaattaaccagaaaccctcctcaatatttcacaaaacctccctcttttcagtaataacaattgtatcataaatctcactctaacgtctgaaattttaaaattagtaagatcatattactgcgtctcttaaactgtgaaattatttaagaattaaagttaattcaatgtcttctcttctaactttttactttggttgatttaatagtactgtaatttcatcagtataatagcccagttcatttaataatcaatttatgattctctttcttttcctagaatgtttcttatctaactggcagcaatagctgtaggactatggtgtttcagctgcttattttagcaaaaagcaaagttccccttcacatagtcttttgaaagaaaagacatctgtctgaatataaatatatgtaactaaaagccattaaattgtaagtatttaagttcctcttcttcagctgctgaggaggaacatcgtctatatgttcattggcaatgaactttgtttcttggtagggtgaagcctggagatgaagaatcagagaagccaggggacaaagcagcatgagtgatcagaaaagcaagggaaatgtagaggacagcagtattctcaaactttcaggtccatcaggtccacttggtaatctaagggaatcataattgattacaaaatgaatgttaaaacacgtattacttggctccctctgctatcagatttgttttccggtaggtctaaggcaagacttgattatttgcacttctaacaggttcccaggtgatactaatgctgtggtactttaggaaccactgttataaaaaaatatttaggaagttttgctttgggttgtatggtatatctttctaaatgaccaagtgtattagtcctttttcacactgctataaagaactgctgaagactgggtaatttataaaggaaagaggtttaactgactcacagttcagcatggctggggaggcctaggaaacttacaatcatggcggaaggcgaaggggaagcaaggcaccttctttacaagatggcaggaaggagaatgaatgcaggaggaactatcaaacacttacaataccatcagatgagaacgcactcagtatcatgacaacagcaccggggaaactgccccaaggattcaattacctccatctggtctctctgttgacacatggggatcatggagattatggggattataattcaaggtgagattttgggtggggacatagccaaaccatatcaccaaccattctctttgtctgatactacagaatttacctggcctgagactttcaagggtaaaactggaaagtctgccacaaaccagaaagatttgttctatgaaagttatcagaatcaaaatggggccacttgcataaaaaccctgaaaaatggagctaaggaagaccagaaagggagggtttatatgcgtgtatgcctgacaacaggaactacgacaaaagactgcacaaaccacaactttgcacaaaggccaccacaatctcacaaaaaattacttctgtgaggacatttgcccagcaactgcctgtccaacctcaaactggtgccaccctttctaccagtccttgtaaccaaggataattgtctcaaagcaatttatgtaaccctcttcatttttcttttaaaatcccttgtcttcttttacctccctatgttcattgtattctaactgtaatgctcaatcccaaataaatattattgttttttagaagggtctctccgtgtgtgtgttacttaggtttaaccagtcccctatacaatgtcttcaagacattttcagtagagctaaaatacttgctaatgcttttgtactaaaatgtgtgtgttttttttaattgattcattaattttaaaatatagattttaaattgatatgttaagattgacctcaagggtatagttgcattttagagcttatcatctgtgatttttggcccagggtgcagtactctgctgtagctagaacgaattgtcacctagaaaggagtaaaccgtcactctgattagcaagtggccaatgttttcattcagcaacaagtgaaaaggggtgcaataagaggcagggtgtttcttggactaatacttcaaagttattacagttacagcctttggggaaattcactgttcagatatggctgtttcaaacagttaagtatatgcaatgttatgcgagttcatcaaattaggaatgtcttaattgatcaaagtaagctaggttatacaggagaaataaagtcaaaatcttaatggcttataaacaaaaaagatttatttcttgctaaaacaacctatccttagaaccccaacagaaattgcccatttttctgccataacttacttatcataattcaagtagcacaaataaatagttgatgtgcaatgacaatgggattgctcatcctaatgactctttttcacaaacatctatggaaaatggcagttggaattctgaatggaaaatgtaagttgaaattaatgctgatctagttttaaatgataggtctaataatatgtaatctatttcattaaaaccccagaggtagctattttaataggtcttgatttaggagcagagctttggaaagcatttcaagattatcaaagatgttgtaatctaagagtagaaaagtgacaacagcttcatcgatttgcagatagtaaaaataactaacaaacgagtgaagtactctacaaagaactctactgggcccatggagcttcttagcattctcaggtaatatgttttacatcaatcgtttccaaatatgaagattattattcagtgatttgagatggctctctacaatctagtttttcacaatgttcccccagcagattttgatgtaattagtctgtaacatgaacatttttttaaaagatgaaacttgtatttcaacttggtgtatggaaacagaggagagtggaatgtaaatgtaaagttattgggactagtgaaacattcagttcagtatacattgtagattattttaacctataaggctatgaagttattttattactcttggtctgattttctaattcctacacttggttctgacactaattttttatgtaattttaggtaaatcattcatttttttaaaaccaacttcttttataacatgaagtcaagtagattattaataaagatccctacccattctagaaccccatatttccttgaaactttccattttatgtaaagggatgtgtgcagcatgtataggagtcaaatgtttaacataaactattggtggcaattgttatgaagaaaaatggagagcataaatgtctagtcttgttctactccctttaaaaacgacccactatttctagggtgggtcagtaagctgcagagtatatataacacgatttagcaggtcaacaggtcaggagctaattacttgtagatcacatcaacctcttgaagactgaatcatctggagatgtgttacaagtgacttaaacagataagtacagcatggactcaacaataaaatgggagataatggttaaaacaaagctaagcatcacatcagagtaggatcctcacatgactttattccagtaatgtaaatgttcccatcccagccctcattcaccactacttcctcttatcattgaggaaacaggcagagacagaatggaaaggcagtcagcttaatttaagaaactttcttaagtttagaaatactgaattagttttaacccagaaaaagagctcaattgagaactctgaggtttgcaaccttaaatcccgcctaaattctgatatattcctgccaaaggcaacctgattgaggttacctgagaaatagtttttctacaaaacatggccaaccatgctcaagacaaaattacaacacataatttatcttcggcattcttcaaattatttacctcatctcctgcccccagcacctaatcccagaatacaggaatttgatgatgtctacacagcctataaaagtccacaaatttaagtgcctactgtgtgaaagccattttggggactacaaacataaaggatgtataatgccacccactaagatgttcacgcttatgatttagtaggaaaaacagaaggctgccttacagatattaacaaccaaatttacaggcacacctaaaacatcccgaattctaaaatatatatgtattttccaaatcctacagggtaatatgactatgaaagtgcactaggaatgtcaatttaactaaatcctctgagagcatccacattttgaaagagttctcttttaacctaaacaaacaaacgaacaaacactcctctcactgaagttcattcggcattgacgggtctctggttcttcaagttttcatctaaaactctcagtctttgctatcacaaccaacgcacccttcctacactccaaagttgatggaatgaaatgtcttggaattgagggtttaattaattcggatcactggagagaaataacagaaataacgggggaaaaaatgtgtccattttagggcttggaattggaaacgtggggaaacgtcgccaccttctggtaagtgatggaagtgagcaggaaaaaagatccaagctaagaagcggcttttttttttttttttttttttttttttttctaagcagcaagccacgcacctcccgcgctggcgaaatccgagacccgccccttccggaagttttgacactttgtgcgccccgggcaatgcgattgagagggtaatcatccggtccgttatctaaacccgtcactccgggaaacagcgacccgatctttccggatccgcgctctcccagcatcctttgccttccggtatgtggccccgtctggctagtcccgcctagcgcgcccatttcgagcccaagtttccagctcgggtttccaggctcagaattttccaggagtaggttcttgggcagtggctgtgggagctggaatggcgcagctggaaggttactatttctcggccgccttgagctgtacctttttagtatcctgcctcctcttctccgccttcagccgggcgttgcgagagccctacatggacgagatcttccacctgcctcaggcgcagcgctactgtgagggccatttctccctttcccaggtggggtccccaacctgtccccaccccaggagaggcctgagaggtcccagcgtccccacgtcctcccatccttagacttcactcgtcctgttccaccccctcaagcctcagaacatgaaagaaactgggtatagtcttttgttcctgtctctgagatctgtgaaatatttattaaatgaatgaataaacagcagatctgtcctccaggaaggagtgatctgggagaatactcaacggggaactgagccctcctcttggcagctgacgatatcgatcccactttgtctttccttgttttaggattaaaggcattcgggtgctccttggaaataccagaaaactttcctttagctcacctgtcaagcacctcactgtgcattttaggggtgggatagggtggactggagggatcttcagctaccaaaaagtgacaatttataatcacaaattccttccctgggtatttttagtgaactgttaactggataaactggcaaccagtcaagtcacatcatttttgagtatatatttgactgtgcaagtatgtacatataaatatcaaaataagcatcccctgcttctctggtgacacaatatagggtactggctagaaatataaagtctgttttagagaaagatctgatcttaaatcttggtgctgtgatttactagttttgtgatcttggagatgttctgagtttcagaaattcaggttactcatctgcaaaatgacaataatctttactatagggcatattgtaacgttaatacagagggtttggcaacaatttctgtctca

SEQ ID NO: 5835 - DNA, 6000 bp, Homo sapiens
tctaacgtctgaaattttaaaattagtaagatcatattactgtgtctcttaaactgtaaaattatttaagaattaaaattaattcaatgtcttctcttctaactttttactttggttgatttaatagtactgtaatttcatcagtataatagtgcaattcatttaataatcaatttatgattctcttaaattttatgcagtttaaaggaaaaggaattcatgaagtttcttttcctggaatgtttcttatctaactggcagcaatagctgtaggactatggtttttaagctacttattttagcaaaaagcacagttccccttcgcatagttttttgaaagaaaagccatctgtctgaatataaatatatgtaactaaaagccattaaattgtaagtatttaagttcctcttcttcagctgctgaggaggaacatcgtctatatgttcattggcaatgaactttgttccttggcagggtgaagcctggagatgaagaattggagaaaccaggggacaaagcagcatgagtgatcagaaaagcaaggggaatgtagaggacagcagtattctcaaactttcatgtccatcaggtccacttgggaatctaagggaatcataagtgattacaaaatgaacgttaaaacatgtattacttggctccctctgctatcagaatttgttttccggtaggtctaaggcaagacttaattatttgcacttctaacaggttcccaggtgatactaatgctgtggtacagggaccacactttaagaaccactgttataaaaaaaaaacatttaggaagttttgctttgggttgtatggtatatctttctaaatgaccaagtgtattaggcctttttcacactgctataaagaactgcagaagactgggtaatttataagggaaagaggtttaactgactcacagttcagcatggttgcagaggcctaggaaacttacaatcatggtggaaggcgaaggggaagcaagtcaccttctttacaagatggtaggaaagagaatgaatgcaggaggaactatcaaacacttataataccatcagatgagaactcactcagtatcatgagaacatcataggggaaactgccccaaggattcaattatctccgtctggtctctccgttgacacgtggggatcgtggagattatggggatcataattcaaggtgagattttgggtggggacacagccaaaccatatcaccaaccattctctttgtctgatactacagaatttacctggcctgagactttcaagggtaaaactggaaagtctgccacaaaccagaaagatttgttctatgaaagttatcagaatcaaaatggggccacttgcataaaaaccctgaaaaatggagctaaggaagaccagaaagggagggtttatatgcgtgtatgcctgacaacaggaactacgacaaaagactgcacaaaccacaactttgcacaaaggccaccacaatctcacaaaaaattacttctgtgaggacatttgcccagcaactgcctgtccaacctcaaactggtgccaccctttctaccagtccttgtaaccaaggataattgtctcaaagcaatttatgtaaccctcttcatttttcttttaaaatcccttgtcttcttttacctccctatgttcattgtattctcaccaaataaatattactgttttttagaagggtctctccgtgtgtgtgttacttaggtttaaccagtcccctatacaatgtcttcaagacattttcagtagagctaaaatacttgctaatgcttttgtactaaaatgttgtgtgtttttttaattgattcattaattttaaaatttagattttaaattgatatgttaagattgacctcaagggtagagttgcattttagaggttatcatctgtgatttttggcccagggtgcagtactctgctgtagctagaacgaattgtcacctagaaaggagtaaaccgtcactctgattagcaagtggccaatgttttcattcagcaacaagtgaaaaggggtgcaataagaggcagggtgtttcttggactaatacttcaaagttattacagttacagcctttggggaaattcactgttcagatatggctgtttcaaacagttaagtatatgctatgttgtctgagttcatcaaattaggaatgtcttaattgatcaaagtcagctaggttataccagagaaataaagtcaaaatcttaatggcttataaaccaaaaaagatgtatttcttgctaaaacaacctatccttagaaccccaacagaaattgcccatttttctgccgtaacttatttatcataattcaagtagcacaaataaatagttgatgtgcaattataatgggattgctcatcctaatgactctttttcacaaacatctatggaaaatggcagttggaattctgaatggaaaatataagttgaaatcaatgctgatctagttttaaatgataggtctaataaaatgtagtctatttcattaaaaccccagaggtagctattttactaggtcttgatttaggagcagagctttggaaagcatttcaagattatcaaagatgctgtaatctaagagtagaaaagtgacaacagcttcatcgatttgcagatagtaaaagtaactcactaacaaatgagtgaagtactctatgaagaactctactgggcccatggagcttcttagcattcttaggtaatatgttttacatcaatcgtttccaaatatgaagatcagtattcagtgatttgagatggctctctagaatctagtttttcacaatgatcccccagcagattttgatgtaattagtctgtaagacgaacatttttttaaaagatgaaacttgtatttcaaattggtgtatggaaacagagaatagtggaatgtaaatgtaaagttattgggactagtgaaacattcaattcagtatatattgtagattattttaacctataaggctgtgaagttattttattactcttggtctgatgttctaattcctacacttggttctgacactaattttttatgtaattttaggtaaattattcattttttaaaaatcagcttcttttataaaatgaagtcaagtagattattaataaagatccctagccatcctaaaaccctatatttccttgaaactttccattttatgtaaagcgatgtgtgcagcatgtataggagtcaaatgtttaacataaactattggtggcaattgttatgaagaaaaatggagagcataaatgtctagtcttgttctactccctttaaaaacggcccactatttctagggtgggtcagtaagctgcagagtatatataacacgatttagcaggtcaataggtcaggggctaattactcgtagatcacatcaacctcttgaagactgaatcatctggagatgtgttacaagtgacttaaacagataagtacagcatggaatcaataataaaatgggagatgatggttaaagcaaagctaagcatcacatcagagtagaatcctgacatgattttattccagtaatgtaaatattcccgtcccagccctcattcaccactacctcctcttatcattgaggaaacaggcagagacagactggaaaggcagtcagcttgatttaagaaactttcttaagttcagaaatactgaattatttttaacccagaaaaagagctcaattgagaactctgaggtttgcaaccttaaatcccgactcaatctgatatatgcctgccaaaggcaacctgactgaggttacctgagagaaagtttttctacaaaacatggccaaccatgctcaagacaaaattccaacacataatttatcttcggcattcttcaaattatttaccacatctcctgcccccaacacctaatcccagaatacaggaatttgatgatgtctacacagcctataaaagtccacaaatttaagtgcctactgtgtgaaagccatttgggggactacaaacataaaggatgtataatgccacccactaagatgttcacgcttatgatttagtaggaaaaacagaaggctgccttataaatattaacaacctaatttacaggcacacctaaaacatcccaaattctaaaatatatattttcttccaaatcctacagggtaatatggctatgagagtgcactaggagtgtcaattttactaaatcctctgagagcatccacattttgaaagagttctctcttaacctaaacaaacaaacaaacgaacaaacactcctctcactgaagttcattcggcattgacgggtctctggttcttcaagttttcatctgaaagtctcagtctttgctatcacaaccaacgcccccttcctacactccaaggttgatggaatgaaatgtcttggaattgagggtttaattaattcggatcactggagagaaagaaaagaaataacgggggaaaaaaatgtgttaattttagggcttggaattggaaacgtggggaaacgtcgccaccttctggtaagtgatggaaatgagcaggaaaaaagatccaagctaagaagcggcttttttttttttccaaagcagcaagccacgcccctcccgcgctcgcgaaatccgagacccgccctttccggaagttttgacactgtgcgccccgagtaatgtgatggagagggtaatcatccggtccgttatctaaacccgtcactccaggaaacagcgacccgctgttttccggatccgcgctctcccagcatcctttgccttccggtatgtggccccgtctggctagtcctgtctagcgcgcccatttcgagcccaagtttccagctcgggtttccgggctcagaattttccaggagtgggttcttgggcagtggctgtgggagcaggaatggcgcagctagagggttactgtttctcggccgccttgagctgtacctttttagtgtcctgcctcctcttctccgccttcagccgggcgctgcgagagccctacatggacgagatcttccacctgcctcaggcgcagcgctactgtgagggccatttctccctttcccaggtggggtgcccaacctgtccccaccccaggagaggcctgaaaggtcccagcgtccccagctccttctcccatctttagacttaactcgtccctttccaccccaccccagcctcagaacatgaaagaaactgggtatagtcttttgttcctgtctctgagatctgtgaaatatttattaaatgaatgaataaacagcagatctgatccccagggaggagtgatctgggagaatacttagtggggaactgagcgctcctcttggcagctgacaatatcgatcccactttgtttttccttgtctcaggattaaaggcattcgggtgctccttggaaatatcagaaaacttccctttagctcacctgttaagcacctcactgtgcattttaggggtgggatagggtggactggagggatcttcggctaccaaaaagtgacaatttataatcacaaattccttccctgggtatttttagtgaactatctgttgactggataaactggcaaccagtcaagtcacatcatttttgaatatatatttgactgtgcaagtatgtacatataaatatcaaaataaacatcccctgcttttctggtgacacaatatagggtactggctagaaatataaagtctgttttagagaaagatctgatcttaaatcttggtgctgtgatttactagttttgtgatcttggagatgttctgagtttcagaaattcaggttactcatctgcaaaatgacaataatctttactatagggcatattgtaatgttacaatacagagggtttggcacaatttctgtctcagtttatgtcagctgtcatcatggagcctgtggtccaaatgttttcctaaacttagagtcccaaacaatgtttccatgcttttaaaaactggagcatttgcagt

SEQ ID NO: 5836 - DNA, 6000 bp, Homo sapiens
aggaaataaatttctgttcttcatatattacccagtctcaggtattctgtcatagcagcacaaaacagactaagataaaaggtcttctaacgtccagtctttcatccacttcagagggtgaaggtatccattatttcaaagagctattcagaaaataggattttcagtgtctataatgagagttggtaatgaaaggaaaggacatattaattaaggttgagagtgggagttcactaataatatctgactgctgactttccatgaataaggagactaaagctacaatttaaacaactgaattgagcattggccactccccatgagttgtatgagttgaaagaatttgaggacacagtggctatgaactaaggagtaacacatccttttgttacattatacattgattcctattatataaatggggcaacatgaaagataaattagaggactccattgtgaaacaatagatgtgaagatgtccttgcaatattagcatgtgtccttttctgtaaatttgctcttttggtgcatagcagttactgctaaagctaagagattcaaatattactcttaatccctaaaaagattacagtggctctgcatgagtagcaagttgctgccgtttaatatatatgcagtatttagtattcaaaaactttcccgtcctggtctccccaccacgtggcactgatagtgtgtgtgtgtgtgtgtgtgcatgcaagcttggtgcactgtgcatccatcccattgcctggattcccagttggctatgtaaaagctaggtcagtgagctgacgtgatctctgagatgctgcagactgggtttagcatgactctctttaaaccagcaggcagaaccttggttacctttctgctgtggtaattgcagcttaaaatattaattggaaaaggcccgttttccttactctcctgcttttttgccatatcgagtatgttagaaattgttctgggaagcctggagaagtgaggaaacggtgggcggagcagaggagaaagaaagggagtacatgctgtggaaagctgcactgttgctgtagtttcctttcccttcactgaggtttaatcactagttggaggaaattggaatgtttgaagaaggagggccagtgcagggtggaaaaaggaggggaagacaggagaattcaataaggccaagggcagtttagcaaagcaatgcccagtaaattgtactatggaactctgtaagtgactagggagtcagagccatccagggcacatgacaaaattgtcctactgtttcttttgaagatctgcagacaggttctataccagactgccagattggaagccttcagactattgtttctataattcccttcttcctaattttagggacagaagtgccagctggccattcattttccaacagctttcttcatacctcgacaccagtcctgatgactctgatcccatactcatgaagccgacctcaaacttacaagcacgttgaatctgagctgaatttatagttaaagtggcatgctttcacatatttttatagacgctggaagatgagtacaccagctggatcagtcctgaaaacatcaaaaggctggatgatacagggaggaaaaagagaaggaactctgctgaaagaaataccaaaactcttattgttcatgtggtagaaaaagtaatgaatgaagtcttaagacctggggtctagctgcagctttcccctaactagtcacatgaccttaagcaaattctgtccctccctcacagaataatgagtggaattcaacaattctttctttttcttttctttttttttttttttttgagacagagttttgctcccattgctgcccaggctggagtgcaatggtgccatctcggcttaccgcaaccacctccgtctcccaggttcaagagattctcctgcctcagcctcctgagtagctaggattacaggcatgggccagcatgcccagctaattttgtatttttagtagacactgggtttcttcatgttggtcaggctggtctcgaactcccaacctccgatgatctgcctgcctcggcctcccaaagtgctggcattacaaggagttcaatactttctaagatccttcaaactttcatattttcaaaaccatatatttgtcagcaaatacatattagatgtctgcaatatgccaagcattatatacccacctataatagtttactgcctttgtttttgaaggaccacatttctctttggttactcaatttcctcatggtgaaatgcgactaatgatgactctcctgcttattttagaacacagagggaaattgtatctgaaagtgatttggaaaatctaaaatgttctgcagcagcagatacctttgacatattcatttgtattgtgggaacatatgtacaggtttttctctttgagataataagcaataacctgaaaatgctctgttttacttgaaaatgtgtgagatgcctgatccagagagaaattatcttaatactgttccagagttgtgtttgcatgtacacacaaagctgctaattagatcacagtaaatgcacaaagtaacattgtctgcttgaagaataaagaatgtgttccatgagagcttgcctattttattcaccatcacatttataatagtaatatttgttgaaggaatgaatgagtgaagcaatgaaagaacgcagatagcagagatgtctttagttttcttttcattaccaatttcaattcttgtgttgtcttcaatatttaggtattttctttgatactttttcttctcctctgattacctctagaggagagtatgttgaagctcattttgactcaaaataatttatgcttaggaatcaaaagatgttcgtgttgcaaacacacattccttagaaatattactattgtaattgcttcctgagatcatctttaatgtgtccaatacattattctgctttagttctgtagcacctaacacagggtatggcattgaaaaagtactcagtaattcatgaatgatttggccaatccaatggaataactggtgtgagtacctgggacagaggtgcatgactaataggagtattgtgtaagaaatgacacaggggttctgaaattttgccacggcatatttagtcatttccattcagtgttaagatggttgtcaccacacaaataatatctatttgttcactgtaaattttctccagggtcccttcccaccttcaaatgcattattttattttattttattattttattttattttattttattttattttattttattttattttattttattttattttattttattttttgaggcggagtctcgctctgtcgcccaggctggagtgcggtggcgcaatctccgctcactgcaaactccgcctcctgggttcacgccattctcctgcctcagctttctgagtagctgggactgcaggcgcccaacaccatgcccggctaattttttgtattttttgtatttttttttttttttttttttttgagtagagacgaggtttcaccgtgttagccaggatggtctcgatctcctgaccttgtgatccgcctgcctcgcctgccaaagtgctgggattacaggcatgagccacctcgcccggcccccaccttcaaatgcattaatcggattccttcagtattatgaagaaaacattatgaagagccttacctgatgatagtaataacaaccgtaaccactaagtagagtctatatttattaatagcaatgtcatcttctctaacagttgtccagtgtcccaagcctgtcataagctctttgaagctctgtgagaatgagagttgtgtcttatgctcagcacttaagatggctacttaattcagatagaagaagaatgtggctatttgcaggcagaaggcaacttgattcctcacatggtactatatactaagacaccctacactcccagttttacacgtggtagttctagcacgttccttcatttaaggagtctcttgaattccaaaatttccagattccacctgaataaatggcagagatggcaactggacacaaagttattttaccctgttcccttcacataaaaggcaggcttgggatcacttaggtttgggggcataaacatcctctcagtgtctgagtactaaagaaatgataaactactatcaatagaaaagtaacagatcacttaattatcaatcagtctaatggtgattattttaagacttttgccacaaactgaactgccccaaagcaaatctctcatgcagtttggccttaatttcttttaccctttttttttttttgagaggttattatgcagtgctttcccgtttaaaacactgtttctaccagggaatattagggggtcttctgcattacagactaagcaattccgtcttttctcaagaaaaactgccatgttacatctggacaaaaatggaaactttaaaaaaaaacctcacatcgttttattttcctttctgtgtgtgtattttttcccacataagtatcttattatttcctaatcgaagctcattcttctctatgaggcgctggcttggtattttcgcctgacaaatctcccggagcagatggtcccttcagggaagcttcaggaaagtgctgggtgtctagttatgcctggaccctccctccctcttggggccccaaatgacaagtcatcaaaccagtttctctccagcaagggtccttgatccggtagcagcaggtttgggtttcaggcactgcagagaccctttgcagttgggtttagcagctacccaagtctgcagcctgcgctggtcctgggggtgagagtgatatccctgttgtccaatcagagaagcgggtttccctgtggtccccgccccactttccctgctgccccaataaccgccctaaaaggccgggcttctgctgtcaagtagccagggtgggctccgccgaggcgaggaggggcgccggtggggagatgcgctcccaggtgtttgcagcggaagtgggaaacctgtagggtatggtccagctgtgccgcaccgaggcgagcaggagcagggaacaggtaggaagctggacttttccttctttgcagataaaataaagaatgcgcatttccatgctgttgcttcccttcccccagccccgcccagccctcgtcacccccaaatctcctgtggtccctgcagctctcgccgtgcggcgcgggaaggactggggcggaggtggctggggtgcggggaagcaggggtgcgggatgccggagccctggggtgccgggcaaggcaggacggcagtgccctagaagagggctccgagctcggggtctgtgtctcgtcaactttcctttcggaggctgccgccgccagcgccgggaactcgccccagggatgccatatcgcctcggcaggggaggggtggggaagcagagaggtcggcagcccggggcctgcaggtctttttctcccgacgccggcccgcacctgctcatctttcccatcccacctgggcgcctggctagcgcatcccggaaaacctgggagcggttgcggagaggggaggaagcgacttgtttgtcccctgacccctctgttaagatctagctcccttcaggagatgggggtggggaagaatccctgcaactcgaagggcacgttccgattaattacgtctccgttgagaaggcaccggcccttctccacgatctgcggcaggtgggagggagagaccgcggagccacggccccttccctcctagcctggcgctgtctacgggaaccaccttcacacctagtttctgaaaggtggatttggcttcagggatttccagggagtcaagtgattgtgcccggatgggctccgagcggctgcgaggctgcctccctaggtgaccgcatctgggtagtaggtgttggcccagtgccggttcctgcaggagtcagattgctgggagcagtaggcagaagaattgcagagagatccgacgc

SEQ ID NO: 5837 - DNA, 6000 bp, Homo sapiens
aaataaaataactaaaataaaataaaataaataaaataacaaagctagaacaaagaacaaataacatcacagtgcctgacttcaaaccaaaggctatagtaaccaaaagagcatgatgtgtacaaaaacagacatatagaccaatggaataggatacagaaccccaaaatgaagccacatatctacaatcacctgatctttaaaaagtcaataataacaaacaatgaggaaaggactccctattcaataaatggtgctgggataactggctagtcatatgcggaaagttgaaactggaccatttcttttcgccacataaaaaagttaactcaagacagattcaagacttaaatgtaagacctagaacaataaaaaccctggaagaaaacctagaaagtaccatactggacattggtcttgacaaagtatttatgactaagtcccagaaaacaatggcaacaaaaacaaaaattgacaagtgggacctactaaagagctttggcatggcaaaagaaactatcgacagagtatatagacaatttacagaatgggagaaattatttacaaactatgcatcagacaaaggtctaatatctagaatctgtaaggaacttaattcaacagacaaaaaagaaacaatcccattaaaacatgcaaaaggaaatcaacggacacttctcaaaagaagatatacacgtggccaacaaatatatgaaaaaaatgcttatcatcactaatcattagagaaatgcaaatcaaaactgcaatgagataccatctcacaccagtcagaatggacattactgaaaagtcaaaaacaacagatgctgttgaggttgtagagaaaaggtaatgcttatacaccgctggtgggaatgtaaattagttcagccactatggaaagcagtttggagatttttcaaagaactcaaaactaccattcaacccagcaatcccactactggttaaacacccaaagaaaaataaatcgtcctactaaaaagatgaacatgcactggtatgttcactgcagcactattcacaacagcaaagacatggaatcaaccaagacactcatcaatgatggactagataaagaaaatgtggtatatatatataccatgaaataccatgcagccatagaaaagaaccaaatcatgtcctttacagcaacatggatgcagctggaggccattatcctaagcagattaatgcagggacagaaaaaccaaatactgcacattaccacttgtaagtaggaactaaacatttaatacacatggatacaaagatggagacaatagacactggagactgcttaagcggggagagtgggagtggggtgggttggaaagctatttattgggtactacgctcaatacctgggtgacaggatcattcatacaccaaacctcagcaacatacaatttacccataacaaaactgcacatgtacccccagaacctaaaataaaagtagaagaagaaaagaaaagaatttcaggatggcaaccacagaatcttttttaaaaaattattttaagttctgggatacatgtgcaggatgagcaggtttgttacataggtaaacgtgtgccgtggtagtttgctgaacctaccaactcatcacctaggtattaagccccacatgcattagctatttatcctgatgccctccctccccccaccccaccccccgacagtgtgtgttgttcccctccctgtatccatgtgttctctttgttcagctcccgcttatgagtgagaacatgtggtgtttggttttctgttcctgtgttagtttgctgaggataatggcttccagcttcatccatgtccctgcaaaggacatgatctcattcctttttgtggctgcatagtatggtgtatatgtaccacattttctttatctagtctatcattgatgggcattaaccacagaacatttaaatcccaagtgttaggcccataagagtgtagggctctgtgtgaatacactgtttgaatgcccatcaagctgaccctgcctggattagatagtaaagttataggactgaatgagttctatagggaaagatgagaagaaaagagacccaagacctgaagctagaaaagcaacaacttttacaggatgggcagagaaagaatatcctggtggccaaaagttgtatttaatcagatgaatgaatgagaaaataattgttctgcgatccctgacttgaaaaagctttgcaaatacaaataacctggctgtatattaatattttatttcacaaattattattgtatggatgataattcttcagggttaaatgtgtggttcttacataggcctattatcctatttctgaggcatatattgattgctcaactgaaaaaaaatgcagaagagaagtggtaggaaataaaatggattagaggaaagaatggaatttactaataatagagttcccttctagcaacagttacctttacatataaggccaacaatgtttcgctgcaacatttatcaaagaagaaaaatgtaaactcttaaaaatctgtgaagaattctaaatgactaattaaaacttgttgcaaagtcaacttcgataattttttaactacaaagtaactttgaccgaagtcttagtccataaaaatgagaacaaggccgggcgcggtggctcacgcctgtaatcccagcactttgggaggcagaggcgggcggatcacgaggtcgggagatctagaccatcctggctaacacggtgaaaccccgtccctactaaaaatacaaaaaattagctgggcgtggtggtgggcgcctgtagtcccagctactccggaggctgaggcaggagaatggcgtgaccctgggaggtggagcttgcagtgagccgagatctagccactgcactacagcctgggtgacagagcgcgactctgtcttaaaaaaaaaaagagagaacatttggttaaagaactatggcagggagttgatgagactttgaattttgaattggtgggggaaaaagtgatctgaaaaaaaaatggattgggacatgtctctggaggtggtttatgaagaggctatgagcactgattctgaaacaagctgttgaggtttcaatcctggctccactatttattccctgtgtgattttggacaagttgctcaagttgcctcacacctgaagaaaaatgataacactttctagggttgttatgagggttgaatgactggatgcttataaaacatgtaaaacttttcctagcacataaaaagtactacacaaaaatttgttaaaagaaaattgtaaaaattgatcatgtaaccaaaacacttttgaagtttctacttttagtgagtttcacaagctcaggggagagtgttcagtgaaaggaaacaatctcttctcatctttcttctcccatcatttttttctcctatcttcagagtactgtattgttgtctctttatactaaaaacaattctgtttattcaaaaaaagtacctcaagaagcaagtatagtgtttcccaggtattttcttaaaagtaatttcatcatgtcttttcatgtatatattcatgtctattttcccacttaagattggtcccaatgttttctttctttcagagagaacattaaaaatgttaggaaactgaggtgcaaggattgctggaggccaggagttcgaaaccagcctgggcaacatagtgagacacccatctctacaaaaaaatttaagaataagccccacatggtggtgtgctccgcttgtagttctagttactgaactcccacctcggcaacagagcgagaccgtcttaaaaaaagtatgtggaagaaaaaacatgcacagtagatttagtgttattgtgataaccctagcacttcagtggaaaaaatataaacaatttcaatgagtagacaataacacatataaccaagatttcaaatataccttctagcccttttgagaagtcaaaattgaacaacctgaatgtaccagcttttttgaaaaaagttttgtagacacgcgatccccaaaacctgccgttcaaacaactccaagggtctttaaagtactaaatccctttgtatttgtcctatcggtccctttggtttccaggaaagcattaaaaataaaaataaaaactctctgccttaattttatttcacgactttcttttctcttattatagctttccacattgctttagaagagtttacatctaactctagtggtcttcggcttcttctccctctttgacacagaggactagtttcaattgtacaaataggctggacgcttcagcgattatcttccgaccactccctgtgtgctcgcgcgggcggagtagggggcgcttctccactctccgcgacctcaatgtatgcggaaatcctcctgcctttgtgcacacgtttatttagaaaattctctccacccccactcccgtccgtcccgccccttcttcttttgcttattctctgagttttgcctctcctcccaccccgactccaccgtaatcttaacctacccgtacagattccactttcccacttcggagctagagtaatttaagatccccccattattagctccacgtcgcctttaaaagccattcaaacgagttcgccttccagggttctgcagttgtgctgcagcagcatttccctcctctccagtatcagacgttaaaacaaagcaagccacagtgtgtgtccacagacgaccttggaacgaaaagctgccctgtttgggatcaatgctcagggaacccagtccactcccgcactcacgtgttcccgccttgccctccagctagttcccccgcgcgcaggatcgcactactccctctgcagtctcgcctgccgacttccttctgcgcgcctcgtaaaaccggggaagttcaatcattccgcagcgagccgcggcggccgcactgggcatgctcagtctccgggctccgctcggcaggcgagaggcgtcctccggctctgggctccggtcggtgggtgcctcggctcggctttccccggcgctggctgggctcagcggcccctgagcccaagcgacacacgccccgcggtccccgatccggcccctgggagagccgcgccgttctggaacccgggagcccccaacttcgcgccaagttcggagccgccttctgagggagacatgaaaaagatgagcaggaatgttttgctacaaatggaggaggaggaggacgacgacgatggggatatcggtgagcgaggggtccccgcgtccccacccgagagcccgagccgacgcgggaagaagttcggggactgcgcgggggcgctgtgctctccgcgggggaggttggccgagacgctcggccgctccgggcaggggaggaagcccgctgtccccggctgcttgcagactgaggccccggtgcggcccctgcggggctgaggcgcggggcgcgtggtggccccgaggacaggctcctgacgggcgggggatgctgcccctgaaaagcctggcagctgcggggacgcctctgcgtgcggaagtctccactcagaagcaactttggggtcacttccccgactcgcagagtgctagggttgcccaggagcctcggcactggggcgagccccctgggcggggtccggggagcaggcccgcatttggaggacagggtgtgacccatctgaatcctcgttaaagtaaaagccgaccgacggctctgggaggtttgaggcctggcggggcggccccgggaagtgatttgtggccgctaggcgcgcgctggaaaccctttcccatctgcggagcccaccggagctgtgatcggaggaggaattcccccaggcagggaggaccgcagggcctttttcactcgtcctgaggggccctggggcttggggagcaaacctggggtgacccatttctagttagagttaaaaatgcatggaagtgacaagacgaacggagggagagctgttttaagagcaaaaaaagaaaaaaagggca

SEQ ID NO: 5838 - DNA, 6000 bp, Homo sapiens
agagattggttgtggtggttgttgttgttgttgttgttgttgttgttgttgttgttgttgagacagagtctggctctgtcgcccaggctggagtgtagtagcacgatctcagtttactgcaacctccacctcctgggttcaagcaactctcctgcctcagcctccggagtagctgggattacaggcgtgtaccaccatgccctgttaatttttgtatttttagtagagatggggtttcaccatgttggccaggctggccttgaacacctgatctcaagtgatccgcccacctcggcctcccaaagtgttgggattataggcgtgaaccactgtgcccggccaggccagggctttttaaaaataacagctggctaaggttcatttcacaaatcaaaagacccgatgctctgcaagataaagtacctctgcacaccctgggtctcccagctggccagtggcagagctagattggaaccccaactagtctgacttgaaagcccaagattttcccaccatacaacacaccttagaagcagagcctggccttgctggctgagagccaggctcaggcctggggacctccagagaggaaggtggagagagtgggaagagacggggagaggggaggggcccctgggctctgttcctcgacagccgcctattcccactccctgagcacagtgtctgactccgcctgcgctttgtggttgcggggtagggggactttttccatcctttgtgtcttgagcggttttttccttgctttgcgcttccctactgtctctccatattcctttttgtagctaatactcccacaggcctcccacggcagctccaaaatgcagcctcccgagtttcttgttgacagaggctttgagcatctctgaacagggatcctcctcaacattcccctccctgtgactccccaccacggccaaatgcgtcaagagctggcggaaggggagaggaaaaggagttacagtgaggaggactatggtgcccatctcccagggccctgctcaattttcaactccccaatgcccgtcttactctctcctaaatgtgggtccctgccctttgtgcatgtgggttgggggctggaggaaagatggaaggaaaagatagggaattaaaagaataaaagaggaccaagcaaggtggctcatgcctgtaatcccagcattttgggaggccgaggcaggtggatcacctgaggtcaggagttcaagaccagcctggcaacccaggtgaaacctcgtctctactaaaaatacaaaaactagctgggcatggtggcaggcacctgtaatcacagctactcgggaggctgaggcaggagaatcatttgaacccaggatgcagatgttgcagtgagccgagatcatgccattgcactccagcctgggtgacagagcaagactccgttcaaaaaaaaggaataaaagaaaaaacataaaaattaaaaaagaatagaaaaaaaagatagggaattgtgactaagagctgggggaatccatacaaacaaaagccaggtctggcaggaagatctgagggactgggtaaaggtgaagagagaggatagtgggctgagatcctgtgcctgatcacgctcatctaaaacaggccacataaaggaaagggtcagtggcggtaccccctcccagtacgcattcacatgagttctttgaggggcaatgggggaaggggtttaaaggcccaaacaggcctttgacttttcactctgcaataagaatggtaataacattccataaatattagtgtattttcttctcctggaagtgggaaccagggcagcaaagggtgacatgggcattgtgcctggagctgctggaggaggcagtgcacctcagactagggacttgacctcgctgccccaagtttttcatccgtgaattggcagttatagctaataactagctcatagcgttattatgaagattaatgggacgatccaagtaaagcactttgcacagtgcctggcacaaagttaatgctcaataagtgtaagctgctgtaatcctcaggggcaccccacacattccatctcaccctgatcaccctaacccaaggtgtctggtttggcttaatgcccaaaaccagccccagcaggtgagctggaagcctgaaagtctaaacacttaggccttacagggataagtgtaaggccacccagacatgctacacaagcccagatgaccagtcctctgagtgcccacacagttaggctagagagaggtagacccaacgacctagggctgggagactgtcagggttctaaccctggctgtgtcatttatcaactctgttaccttgagcaagtctctctctccctcctcctccccctcctcctcttctccctctccctcccctcctcctcctcctccacctcttcttcttcttaacttcttccttcttcttccttcctcctttctccttcctcctttctctcttctccttcttctccttctcctccttcttcttctttcttctttcttcttcttcctctctccctctctctcagctctggttcctcctttgtgaaatggagcataaggagcccccaccctggctgtttcacagggctcctaggagactcaaaatcagacaacaaacatttacatgttgcaggtgtcacacactgttctagatcctctacacatactcactcattgaatcctcattacgaccctctgatgttattattagcatccgcattttacagatgagagaactgagtcagagaagggttaataacttgcctttaaaaatcacacagacaggccaggtgtggtggctctcgcctgtaatcccagcactttgagaggctgaggcgggcagatcacctgaagtcaagagttcgagatgagcctggccaacatggtgaaacccaatctctactaaaaatacaaacattagcggggcgtggtggcgcatgcctgtggtcccaactacttgggaggctgaggcaggataattgcttgaacttggtcggcataggttgcagtgagcagagatagctccaatgcactccagcctgggcgacagagggagactccgtcacaaaaaaaaaaaaaaaaaaaaaaaaattcacacagaccaaaattaaaaaaaaaatttaatcacagggacagcaagtggcagacctggttcccaagtgggtgggtgatttcaattgtggccttatcctgtctcaaagtgaactgactcctaaaatgtccttctttttagtagacagctggaccgccgcctggagaggaagccttgaacggctgggggaggggattactttacagccaggatccagccaaggctggggatgagatgggagtaggatctcccgactccttagggtcactcctcagggtcactcctcgtcctggggaccagattccaggcttcacaggaccggagaaggaggagcgcgtcctcccttcccaaagcgccagctcatttagatacaggtgcctggggctttggctctcgtcgctgatgaggggtagcatctttctgatgctggtgactgtgagtgcgtctcgagggatgggggtgctgagcctaccgcttcgctcgttagggaacaaattgctgttttggccccggcggctcctctgggcgcgggcggcagccgcgctcgctggcaaatcgtgggagggaggaggagcggcgctggcaggcaagtccgggggaccgtcgcagcgcgggaggccaagaaaagacggccgccccgggcccggctccgccccgccgggaaggggctccctgcagccgccccagggcagcaccccgcgcggcgccgcgcggagctctccaggacgagctgcgtgaggcgcggggctcggccttcctcgctctcctggtgccaggacccgcacgcacaaggttcggaagttttttcgcagtgtctgacccctgccggtcccctgtatttaccacctgaccctctagcgcgcttaggagaggcaagaggtgacaaatgccagagggaaatggaggggcaggacaaggggtctggcgctcccctccccaccacacaccctttccgcccacggggtcacacggaggacgtctgacccttactcctagggctacccaccctctggtttccaggcagctcctgcttgcggagacacctcataggagcagctggatccattttccagagcgtcaagttgaggatgagaaagtctcgagggccgggcagctgtgcgcgcagaacccccgccccatctgcttttagatttcccgggtgcggctggagcccctctagagcgccggcctccgctggccgcagggccttcacctgcgcctgtcgccctgtccccttgcccactgcattttcctcggggagagcatcttccacagcatgcgtcccctgccccccacgccccgagcccccctcccattccgccgggggaggagaggctgctaggaggctctcggagagcccccgggctgcagagaaagacgcctcccctctgcggctgaggccgagtgagccaaagggggccggccgctcgccagtggttctccgaggtacgggcggggaggcccgcggggtgggatcagggcggccgccacctccccgcccccgccgaggtcccgaagggaggggagccctccgcgggaggcctgtccctttaaggaggcggccctggctgggtgtgccccgtctccatggttaccccggtgcaggcggcgggcgcgggagggagggagggaggctgcagcttctccccgacagacggagggagctgccgagagccggcgccgagcgaagccgagcggaagcccacccgcagccgacacgcgagccgctgccgcggcgggaggtgctgagagcgcggcggccgcggggcctggagcccgggatttgtgggcggcgagggcgcgaggggccgcgcgccatgctccgggccccgacggcgcggacgccccctcgcgcgccagcgtccggcgcgaccccggatcccggtctgcgcattgccccccgacggctgcgctagggagcgcggggcccggcggggggcggccgagctgggcgccctcccccggcgcggagtccccgcaccccggagggatggggcgggcagccgcgggcgcctaagatgccggccatgcggggcctcctggcgccgcagaacaccttcctggacaccatcgctacgcgcttcgacggcacgcgtgagtccgaccctcgcccacttgcacccgggccgccggaccctcgccagggctcccgccttccccgaacccccagcagcccagcttggcgccagcctattctcaccctctcctccctacccgcccctcttgaggctggggccatcgtctcctgctaggcgctgtttccccgaaggttcgaaggttcggggtcaacactgcttcaggcgaggcaacagggccagaagtccctgggtgtgggtcctgggatgctctctgttagccgggtctcgaacccgaacctagtcagtctgacccatcccacccctgcgtctggcgctgtcgcagcaactaccctcggactggtggggtaaggcgaggcgggtgaacagtgctcagggacagctgagagggctcaaaacacagatttagaaaagagatttgcaaacggagataagagtaggcggcactcgggagagcaccgtgtgtccaagccccgtgtctcatagcctgaaccccctagacttggggaggccatctagccccaagaagatggtttggggactcccatcaggactggggaagtttggagaaggcgccccgagctctggatccccggttctgggggctctgagcacaggggaagtgatgaaagcccctccctcctcctctccctcacatcccccgtggggcttcccagctctctgcctaggtcctccttggtctccggttcctgatagggggtgggagcccagccctgcgctctccccactccgggctcctccatctgctttgccagtgtgcttggctcctgcagcc

SEQ ID NO: 5839 - DNA, 6000 bp, Homo sapiens; identical to SEQ ID NO: 618

SEQ ID NO: 5840 - DNA, 6000 bp, Homo sapiens
cagccacggctcaacccggcctagctcccagacaccctccttccaccgcctgttttccaccgtccccgcctgctctttcaagccagcagcaaacaacaccctaatccgtgtctttattattcaaagaccttaagcactctttcccacctcgttcccatcttgattatttcagggaatgaattagggattcacctttacaatcaaaaaagttctctcaaagccaggctactggagttctaattctgccttcccacttttactagctgtgaaatctcaggaaagttacttaacctctctctgtctcattttcctcatctttaaaaaacaggatgataatatttagctcctaagatggttgtgaggatttaagtgagctgatatatccaagaatgtctagaacagcgcgtggcagaatgggcattgcatatgggtttaatcttgtaactgccatgtttcaccaattctaaggtgtatctcgtttctcatcataagagctcttccgctcgtgtggcagctgggagtggccgtcattgcctgcgcatacctaaacttggtcaggtgagttccgtgccttcagcttaattgctgtttaaaatgtcttcaaaaaggttacactgtggtttagcatttaaacccagttactgtgtatgcagaaaggcgggcaaacagaagagtgtagcaagaattttatattagtgaagcagttatcattgaagaatgaccacagtttcatattttcttgcaaaacagcagccaagtgttttgtgagacctaagaaaggaagagccccataagtaaatggaactgttgtgttgttttattaccgagaaaagggcagaatgattgctagtcacacgtgaagcaagaaaaccccggcaataaagcttgcagaatgagtggctgaggcttgaaaataaatggtggaaacaatagtggacaatcttttaaagaatggcacattgccaatgctcctgatggcacagaaggtgacaccatgcagaaaatcaaggctctgagtcaaagagggtttcagaaaaattggactctgaatgtgaagaaatctggggactattttagccaatttgttttgcctataatttccttttatgcatgcaaaagagcaattctgactttaaagactgatatctaaataaatctaaaatatcttttttgtgtgtgtgtctgtgatacagtgtctcgccctttcacccaggctggagtgcagtagtgcaatctcagctcactgcaacttctgcctcccagtctcaagcaatcctcccacatcagccggactacaggtgcacaccaccatgcctagctaattttttgtgagtattttttgtaaagatagggtttcaccatgttgccagactggtctcaaactcctgggctcaagtgatccgcccaccttggcctctcaaagtgctgggattacaggcatgagccaccaagcccagcctataaaatacgcataacataaaatttaccatcttaactttttttttttttttgagacggattttcgctcttgttgcccaggctggagtgcagtggcatgatctcagctcactgcaacctccacctcctgggttcaagtgattctcctgcctcagcctccgagtagctgggattacaggcatgtgccaccacacccagctaattttgtatttttagtagagatggtgtttctccatgttggtcaggctggtctcaaacttccgacctcaggtgatccacccacctcggcctcccaaagtgctgggattacaggcgtgagccaccacgcctggccctcatcttaaccatttttaagtgcacagttcagtggcattaagcacattcacattgctgtgaattcatcagcaatttttgtcatgttctaattaatagtgcatgatagatgcatagacttcctaagaaacagtgtagtggccattgtagaaaaaatgcagccatccctgcaggtgagcagagctgccagccagaagcacagccaagccccgccagctttgatgagaacaccttcttcctccctggcatgaagggaaagtcaaatgcaaacacaggcatgagccgtgtcatcgttggccccttcccctcctcccagactaggggccagatcagaatgtgagtcctgactactattgtaagctgtgcggcaggtcatactctctctggaattcatgttctcatcatggaaactgaaatccacaggcaagatgatctctaagatcccattagcttctaaatgtatgattgtgtaactgaacaaccacacaagacacacaccacaaacatatgcaaattcgggttgggtctttgtgggctccaaggagaagctgtcacacctatcctggtgtattgggaagcaagagatttttacccgactgggttaggagtggttcttcccagaatcaagggtcagtaggccactctgtcaagatcgtgaataccttgaccaaaggagagaccagaaagggtgtgtggcccatccgagagcacacagcaactaaatggttgggtgtggatttagaagccactgtcacagcttcagttcacatgaggcccaaggagaaggttttccaggaacccctgagactcagtcctgaacttggccagttggggtggacagtatatccgaaggtcaggagaagtgatacatgaaaccacaaaagaaaggagtaggccaggcacggtggctcacgcctgtaatcccagcactttgggaggtcgaggcaggtggatcacaaggtcaggagtttgagaccagcctggccaatatggtgaaatcccatgtctactaaaaaaaaatacaaaaagtagtcgggcatggtggcatgtgcctgtaatcccagctactcaggaagctgaggcgacagaattgcttgaacctgggaggtggaagttgcagtgagctgagccactgcactccagcagtggggaaggcatgttccctgggtgggggcagaggcacaccccagccagacccctctgagtccttgtctcttcctatgtgcagagtctggaggtgggccccagatgccctttatatgacaggggttggggtccccctctccgtcgatcttctcccggaggacccagaatgcctgaagttgggagggatggctgagggaagagtgccagggcaccaggtgtctatgtgtcaggccaggagttaggcactggaaatacacaggagaacaaaccccacaggaatccctgctcttttggaacatcacttctgtatgggtaatttttattctttcttcctccccttcctcttccgctttctcttcctcctccttcataatagcaggagtcacgagtccccatatatatatgtatatgatacattctcagttgcaaaataccttcccgttcattatcttactgcattctcaaaacaactttatggggtaggcatccacactcccattgtccagacaaggaaactgaggcgcagaatgtggctcggtagtgtggggtgtggcagaaagctccagaccaggctccagtcccagctcagccactaacctgctggagcaccctagataagtcactcccctccctgggcctatactcacccctcctgcccaccccacatccccatgatacaacacaaagcgctccactccagtctccaatctctcccagatttctgttcctgcgactgtgacttgcccagggacctgctggacaggagctagggcagggtgcagaagcccgtccttctgtccccactctgagcctgaccctgctgtgaatccccaggagagggagcgaggctggagggattagggaagggccagtgagtggggctggggaaacttctagacttgaacgcctccaggaccccagtggccacagcagcactgatagcaggaggcagcactgcccagatgctgagctgagtgggcaccaaggccagagagctgcttatcaggcatcacagccgccccgagcctgcacagctcactgccccacagaaatgtctttctcctgtggccagagcggccctgagctcctcagggtttctaggacctgtcacagcttctgggaccccaacaaatgagtgtgcaaagacctgttctcctcaaagtgcaaataatactgtaagtaagggctgatattcattgaccacctactgtggacgaggcgctgctctgagcacttgacatacattgtttcattcaatccaaaccccaatccactaggtcagttttattctccccattttacagagaaagacaagaaaggttaagtcacatagatggaacaggctgatgccagaatggacaccctcagcttcctcagccgccccaggttgactccatcaccaagggccagggtcccagtgcccccaggctctaggagctgctgtttggctggggctcccaggagaaggtgaagcttaatgatttatgggtgattagctgcaagaatgcaagcacagaagacacaaacctttatgccttggaaatttgtcacaagccaaccagttgttttccatccctgtgaagcaggaataattggaggtctgacagaagaacttcccagttaccagaaggagcagcactcatgttctctcttagttttgtgtgaggtgttgcccctgccttggtcaacagtttgagtcagagagatgggggccgggcacaatccccaccagacgttcccattcacaagaccctgtgggggctgggagacgccctggggcagcagccctggggtaaccaagggaacaaacacggaaaaccagggacgtcagtccttatctggagctcattaaatggggaacattagtcagctgtgaaggccaagatagggtgataggcctgtgggtgggctgggatggggcatgggggcagaggccgccatggaggagaagaggtattggcctcaacgactccacctccccgccacgtgcccagatccgggatggaaggaccctataaatgcccacaacccagcctccccagaggccttgagaaagagagcgatagagtgcgagagcgagtgcccggagcatcctggccctgagacagctgggccagccccgcagggctctgcagcatgtgggagctccgctccatagccttctccagggctgtgttcgcagagttcctggccacactcctcttcgtcttctttggcctcggctctgccctcaactggccacaggccctgccctctgtgctacagattgccatggcgtttggcttgggtattggcaccctggtacaggctctgggccacataagcggggcccacatcaaccctgccgtgactgtggcctgcctggtgggctgccacgtctccgttctccgagccgccttctacgtggctgcccagctgctgggggctgtggccggagccgctctgctccatgagatcacgccagcagacatccgcggggacctggctgtcaatgctgtgagtagccacaactttgccatccacaaggggcaggtcctggggaatcccttgtaaaggatgagatgggagggatgggctctgggtgatgtagggagagagatggagacagaggcagagagagaggctggagccaggaacacagccaccataggagggtcaggatgaaaggagcaatgataccagagcaaagcaggatgcagacagactgctggcttcttccaccctgaccgtcgtgcaggaagagcctcatccaggtttctgttggactcaacgcctacattacagtgaagacagggctatacctcagcaggggttggtgtcccgagcagacatgctttccaagctgcggggagccttggagtgatcatcacagggttctcaagagagaagaggggcccagcatttcttctgctttgagggtttgcaggtcccgtggcaggtgctccttacaggccaggcacggacacaccacagccctgcaagcagcaatgggcatactcacttctccaaaccttgaggaggtccccggagcccataagctggctgctgattacatgatacagg

SEQ ID NO: 5841 - DNA, 6000 bp, Homo sapiens
cagaggcagatctgagtctagaacccaggcttctaaatttctaggccagtactactgctctcaaaagagattaactgggattaagtgagatgacgcatgtaaagatgctgtgtaaactgtaattcttaataccattatcacgcattactagaatcatttcattatttctgcttcctgggggaaggatgcagaaggagtctgatgctcaacatcccttacctcctttcgttgatggccaaagcaaaggagagtcctgggagcccacaagatccaggcagaaggagatgggtttggggctggccccatcctggcccagcctcttaacctcttcttaccctgaatgtgtgccctatcttttctcccacctccttcctcctaccacccagccctatccattctctccttccctctccagcctgctgtataagtaacatgtgggtcataccttgaacccccctccgcccccatgctctctgtggcctccatgccttcaagacttctgtctgtatctatctcacactgcaccaagcacccactgtgcaccaggcactaagtctctagcctctttctcccttctgctcccatccaagaaagacagtgtataaggaacatctctgtaattgtgtcccctctcatctatgctctttcctgtcttccttgaccaaagctctctttgaggtccaaaaaaggctgccctgggccatatgtgctatggagaggactctcccaaacccccaatagctagtgacagccacttggcctcactaccagaagaagggtggagtcagaaaccaaagtgacctccagagctgtcctcctggcacctgagtgtccttgctctagaggttcaaaggcagcaaggcagtgagctatgagcccagcatggatgtgtctcaggcacctcatccccaccccacctcaccccaacaaactcctctagaagaagccaagaatttctctctatgtctgtttcactttttggattgcatctccccaaaaactaaatgtgaaatccctaccatttctagcctctattgcccagattggagtcagaggtcaaaaaaggattccaagtgatggaactccaggggtggagggaaattggcagttcctggcatctcttgtgtaccagctgctgtgctgggtgccttgcatgcacggacttatctgatcttcctcaaacttcagataggttagggaaggacaaaggcccccagccatgaagggttttgctatttccaaagcttccccttatcgtcccctgtgattatctcccaaccccgtgacaaaggtagagcaaatattgttcttcccattttacagattcagaaaccaaggctaagggactggtctaaagtctcacaggtagtatatggtggagccaacacttgaactcagacctttttacacaaaatcccatgatttttccactgagacaaatcctaggctcctgggaggccctggcagaagccagaacacatggctgggcctttccagcccaacccactgtcttgcagtggacggagagccttggcgagggcagcagggtagagaggacaaagaatgtggggctggtttctgccctttaagagcacccggtcagtcagagaacagagatcacacacaccaaaccagacagaggcagggcagcatggagacaggtagacagacctccaggtccctaagctggggacagagaaggttctgagctgtcccatactcccactttgtgccaaatgactttgcacctgcaaatggtgcttcaatgtcgttttgtatctttaagctgtgatgttgtatatatacaatgcctcccagctagactgtaagccctttggggacaagggctgcttccagttcttggatggcgttctcctatctaccttccttcaactgctctgcatataataagcactcaataaatgctcatttgccaataagtactgtttcttccacaacttggcagtggtaatagaaatacagcccaaggtaccagaagacaggcggagctccctaccacttctaccccagccctcaacttctcccagggaactcagaagtccccatatcaggagaggaggggaagggctctccctaagacattcaaattccccctgccacaaatggggagacccatcactcagctcacaaaggtcccgggcattcctctggagctgccagggcagggcctgagtgcttgggcaaagagaattccgagacataatgggagtttactgtgatgacttgaggacagagggactctagtggttagagagatggaagagcctaagacacaggccctaggaaacagaatcagctgccctgtgtgagtaaccttgacagatgaaatctccttctttggcctcaccaggcccactcctgatgaccaagtctatgtggcgacctgtggttcccatctcaggtcactgtgtgaccctaggcaagtgacctctgagtctgggtttcttcatgggtagcttggaatcaaatcacacagtggaggccaattataatctctaactttgtagattatattctgaatctctaaaatggcaagaacaaggtcttggcctttatagtccctcattagttcaaatcttcaggtcggagcttcccctggcagccaagcctcttgtgagcacttgtgaatcctttcattctgagatgctggagtttgagacctgtggactatgaagacagtgcctggggagagaggatgagaaagcaagtgaaagggtgcgaactggaggcaagttcagcagcaaaggagcctggcccccaatggcctctggggtcatcagggtcattgtccagcccaagtcccaggcccagaagaaaatcctgcgtacaactggcatgtacagctggcatgattggctggggacaaagcgctgggacccatggaagaaaggacagactgacctccggccttaagaggagagacctgggggaggagctgctccagcaggaaatgccagagctgggcaggaacaatagcggggtttctttagcccttgttttctttggcatcttagctgccacagagcccagagcccgctcctccaagtccttagcattcctgcaggctcctcccctcagccctgcctgacaaactgacagaggaggcacctgttctctacttcctctgcaccctcccgctggactcttccccctagcttagcaccacactaaaccctcaaggggcttttaaaattaacagtcacaacgtaaggagactttactgagccttactctgtgccaggcactgtgctaagggcttctctaacacacatggggatgggagtctttaatgcagctcctctcccgggatcctgggggtgggtcctccccctctaagccctagagagccctccagcctcgttctccacatgcccgacctggagtgggtgggaagagggagagggtggtgtgcgaggaggcagcaggtcacaaaggggttacaagctcagagggaagggggatgggaactggaagaaagtgtcacccagaccaggggtagaagaacttgactttggggagactgagaaagaccacatgtaagagagagagacatggaaaatgaggtagaaacagacagaaacaaagaaaggcacaaaaattaagaggcagaggaaaggtgaaaatagccaggagacagaaactgcaggatgagagaaatgaatagagagagacagagagactaagacagcaaaaggcaggaaggaaaaacagaaaatgagaaggtgtgagagagagagagatggagaggtggagaacagagagactgaaatgagaaagagacctctcggagagagaccgagaggaagaggctggcagagggagagggtcagagaccaaagacagagacaaaaagagaaatagggttttgcaaagactgactgacagaaacagatttcgaggggagagagatcaagaccaagtgagggtttgaaggagacttaggggaggtggaggaagagaaggagagtcttagatccagggtgaggggcttctagcaggaagagggaagacgccaagaccgcgcttgggaggtcagtggtgcgtctctaccccccctgctcccccactccaactcccagagtctcaaggcctcacgtcacacccccgtcccgtcccgtcgacaaggggaaccccggcctgggagagggcgcctccggggatccgttgcctagtccaggtactgcccagctaccgggcgtcgaggattgcgaagcgtcggggcaggctggcacggtgcccacttttcccaaaacgccagccttccaagcccagaagctcgcccggcccaggccgggagcggcccacgtcggacggccggaccgccctgcaggacccagcccggccgcccgcccccgccgccggcggtgagggaggtgagcggcgccgacctgcgggacgagcatcactccgacccagccgggggtgaggcgggtcaggatgctccggtcgcaggaggaaaaggaggagctggaccaaaagcccgaagagaagaaaaggggaaggccgcgcacggagcgcggtaaaggccggcggagctagacgccccgaggtcggagtgaagcgccgggaccgagccccgtctcccagggagtccggggcgcacggcaccgaggagagcgcgggagccaacctgggcgcatcatgcgcagggcccgggacgctgggccggtctacaccgccgcctgggtcacgtggcccggacgggccggcggctgccccggccggggggcgggggtcgcgccggggttgcgctggacgacggagagcggcgggcccgcagcggcctggagcctcccaacccgcgcgccgcgctggcccccgagcgtaggagccgccccctgcccccccgcgccggccccgcgcccggccgcccgccccctatatagcgcgccccagcagggcccgcgccaggccgccagcctcggagtgggcgcgggacagtgcgcggcgccccgcagccaggcccccgcccccgccgcatccacctcctccgccgcctgcgacccaacgggcgccccccgccgcggcagctgccgccgggcccccgcggccaccatgaagaaggaggtgtgctccgtggccttcctcaaggccgtgttcgcagagttcttggccaccctcatcttcgtcttctttggcctgggctcggccctcaagtggccgtcggcgctgcctaccatcctgcagatcgcgctggcgtttggcctggccataggcacgctggcccaggccctgggacccgtgagcggcggccacatcaaccccgccatcaccctggccctcttggtgggcaaccagatctcgctgctccgggctttcttctacgtggcggcccagctggtgggcgccattgccggggctggcatcctctacggtgtggcaccgctcaatgcccggggcaatctggccgtcaacgcggtgagtgccctggggggggggtgggagcctcgaccctggggtgggctcaggaccaggcctcttaccccacctggaaaaaaggggtgccgcagagtgggccagcccacacccttcaccaggaaggcaagagcctcccaaggccaggaaggcaactctccaggctgatatgtgctcccttcctgcccacctcctctccccctcccctcatgctggcccaccctggtctctctccaatgcctgctacccctcctctcctgccagaaacttctgcctcctcctgtctcacctttgagctccaccttcctcctgggcccctcacctctcccatcacctcagtggagcggttgagtagaaccaccagagaaaagcgggctgtcatcacggctttgggtgaccctggcctgtctgtgcttcattgttctcagcgcctccatggggatggttgtgtctgccacagcaggtgtcaaggggctcacatttagaaaccgtagataggaaccccctaatgtggggccagtgcagagcagtttctgttgagtattggttccctctttccccaac

SEQ ID NO: 5842 - DNA, 6000 bp, Homo sapiens
ctggccctcttggtgggcaaccagatctcgctgctccgggctttcttctacgtggcggcccagctggtgggcgccattgccggggctggcatcctctacggtgtggcaccgctcaatgcccggggcaatctggccgtcaacgcggtgagtgccctggggggggggtgggagcctcgaccctggggtgggctcaggaccaggcctcttaccccacctggaaaaaaggggtgccgcagagtgggccagcccacacccttcaccaggaaggcaagagcctcccaaggccaggaaggcaactctccaggctgatatgtgctcccttcctgcccacctcctctccccctcccctcatgctggcccaccctggtctctctccaatgcctgctacccctcctctcctgccagaaacttctgcctcctcctgtctcacctttgagctccaccttcctcctgggcccctcacctctcccatcacctcagtggagcggttgagtagaaccaccagagaaaagcgggctgtcatcacggctttgggtgaccctggcctgtctgtgcttcattgttctcagcgcctccatggggatggttgtgtctgccacagcaggtgtcaaggggctcacatttagaaaccgtagataggaaccccctaatgtggggccagtgcagagcagtttctgttgagtattggttccctctttccccaacctgtgctcctcccctcaaccccgcacccctgcctccctcccacctcctgcagccccagagtcagcccccaaccccatgcaaactgggttcattaatcaaacacagaggaggatttgcttggccattgtcaagctgtgagtcagccgcactggagagacgggtttaaggctggcactggcatggggccaggcacgggcaggaggccgggatggggtgtgaggcaggcaaaccgggcagctgcccacaggatggagggtaaatgccagcttatgggggctgggggttgggcagagccattgataggcccgtgtccaggaaaagctaccctgacgctctgccctttggccacaggcctgagcttcaagcctgtgcaaactatgaaatgtacagtgtctttaacaaatggcttcgctggggcgatgtccacaggacttggcttccaggtgccaaggtgctctaagtgtccctggaggccaaaagccctactccccgagcccctggctatacagccagaaggtggccggggtcctaacccgctatccccttgcagctcaacaacaacacaacgcagggccaggccatggtggtggagctgattctgaccttccagctggcactctgcatcttcgcctccactgactcccgccgcaccagccctgtgggctccccagccctgtccattggcctgtctgtcaccctgggccaccttgtcggagtgagcagtaccgacattgggctggggtgagggtggggcaggcactcaaggcaaataatggagccctggagcggagcccacttcagatggatgagtccagcagagtttaaggcctggatttagggctcctggactctggccctactgggccccagaattgatccccccaaaacctctgggctgaggaaagatgggagtaagtaggaggtgggatgggacaggaatcaaacccaacctcagagcagagaagagaggagggcgtagttaagggtccatggttaaccaagcagctgggatccttggagggagaggttgccagcctgagtttgagacctggctgagcccctggactgcagtgtaaccttgagagagtccagattctgtgggagtggaccaggatgttgcctttctctccaccgccctgtctctatccagatctacttcactggctgctccatgaacccagcccgctcttttggccctgcggtggtcatgaatcggttcagccccgctcactgggtgagtctgtcccttcccctggctccctggagatgagggcctggagacccagcagtggcagctcagagctcaccagacctggattctgtgggtctagagcttgggggtgggccacggagtggtggctgacagagaaagggacacagtaggggatgggattcagctagaggggcagaggtggctttgtatggcctgaaccgctggggacagggagtctgagtatctatccgcttatggaagaggctctactgaacctggaggtgcagaggggctctgtgtcaattcccttgaggatttggtgtccgtccccctcggtgtctgcgtgctggtcctctctgatgttttatttatctgtccctgttgagggggttgggagagtcttcctgtgggtctgtccctgtggacagtctgtctgccccccctttggaagctcatggtcactctctccagggtctgcttctatccctgcgtggaggggacacgcgctctgttcatccgtctctctgaggacccacgtgtcccctctgaaggtttatttgcttctctttccggtgtggttggagggagcctgtccctctgggaatctgtttgccttctttgagggtctaggtgtctgtggtccatgtctctgtccctgggagtggtgtgtcagtatattcgtccccgaggtgggaggaagtctttctccctgaaggtctggaagtctgcatgtctgtctcctctcagggtccgtgggtctgtcctctgtggggtggggggcatgtggtcttcaaggtctggggctcagcgccctgactcctgccctgtctccaccaggttttctgggtagggcccatcgtgggggcggtcctggctgccatcctttacttctacctgctcttccccaactccctgagcctgagtgagcgtgtggccatcatcaaaggcacgtatgagcctgacgaggactgggaggagcagcgggaagagcggaagaagaccatggagctgaccacccgctgaccagtgtcaggcaggggccagcccctcagcccctgagccaagggggaaaagaagaaaaagtacctaacacaagcttcctttttgcacaaccggtcctcttggctgaggaggaggagctggtcaccctggctgcacagttagagaggggagaaggaacccatgatgggactcctggggtaggggccaggggctggggtctgctggggacaggtctctctgggacagacctcagagattgtgaatgcagtgccaagctcacaggctgcaagggccaggccagaaaagggcgggcctgcagcctgcaccccccaccttccccaacccttcctcaagagctgaagggatcccagcccctaggtgggcagaggcagaccctccccagagctccttaggaagaagacagactggttcattgaatgccgccttatttatttctggtgaggatgcatgcgtggggctgctggtgtttagagtgggggctacccaataaatcactgatactcacgttccacctctgtctctcctcagagtgccttgagacactctggcccattgcctctcctctttgtcatcccacatcctccaccacgatctccacagggtaccaggggaccccaggacaagtgctctgtgggaagaaagggagactgtgaccatgggaggcccagagaatcagagagatgggaacagagcagggagagactgagagaagaccgaatatcaaaatagagctagaggccaggaaggaggggtcctcactgcagtcaccctccacccctccccctcagccatgtcaatcaagtccctgccacttgaggagggcttggctggcacttgaggggagtaccagggtgtgacaggcagggcggaggagtgagccaaccgcagcccctcgagatggcaagggggtgaccagccaggttccatcacagccctgggctcgtttctctgcaccttggtctttcaaaaaggtgtcctgctgggagcctgtgcccagagggagcagccccccgacccccccagaagccacatgtggcccagcccccttttccagggcttctcatgccttggcccaccagtgtccccaccgtcctctcctctgggcctgagctctgtcctagcctgctcttgtcccactgtcactgacactccttaggtaacctccttaaactctcagagcctccctctcttcatctgtaaaatggggataaaatatcactttcctcacaagatagttgtggggaccagatgagggcatgagatgcctgggaccagtcagctttctgtgaggaaaaggcggggggtcatgcagtgaacagctccgcatagcccagcttcgcagtgagcccagcctggagtcagtaactaccctcattccaatctggccgtgaaacttggggcaacataagctctctgagctttaaggaccttatctgcaaaacaggggtacttttcccgacctcatgtgctatgtgctgtcgtgaggagaaaatgagaccacgcctggaggtaaaacgcttgtacaaatggtcaggcgccttggagtgagtgctcagtatagtcgtgttaatagaaacccacacgtgcctgcctagtctgaggccccagccacatgcttctgccctcctgggggtgtctggacctgagcgcctgtccagcggggccaggagacggactgagaaggggtaggggaagctgtagttcttggccagcgagaggcagtcccaggggctggggtgaggagtggcagaccccccagccttctccacacttagagtctaagcatctacaagtgagaggtcagccactcatgtccgccccataggcttacagtaaacaccacgtggcattgcgtgtgagaaccccgggagcccagggaaggagcagccccccacccaccgtgtcccttcccacttcttccaacctgccccgggctgggggagccgggctgcaagtgccagctctggccagcagagggcgacgtcgtccaccgaatccacagcgtggcgcctcgtcgtccacaagtcctgggtctgggctctagccagatgggggtggagtggaggacacagggagtccctcatgcttgagtcccctggggccaccttgaggcagcctatcccaatgcatccccgccccgctatccgggtggggcgcagaagagaggggagcccttctccgctcagtctccaggagactcaggtacagacacagccatgaccaggaggatgggctcttcctccagcccaatgggggccacggcagggtggacagtggacccttgggagacaaacccgcgggggcaggcaaggcactaagtcagagggggctaccggccctgagcttcctgcaggttgcctcgcctggcccttgggcaggcttccagctagggcttggggctgacaagcgccgtggttggggcggtgtggccagcaggggtcgctgtgtctgcgtgtcggatcttgcaggagcggcaggtctgcgggctcacaaagtcccgtgcacacgcgcgcacacacactgaccccacacagtccggggctcgcggccacacactgacctcagtcgtgcccgagggctgcatgttccgggtgtgtgcgtctcctttcctccgcacgttcattcgaatgtgcagagccacatcagccctcctccagcattcgctcacagggccaccgccggccccaccgcgggcccagacctatgagcctggctccacgggttctcagaggcacacctgtgtgctgtccaacgcaagcacacacagtccccgtcacctctgctgcacctaaagatggaacccagggagagtctggattctcctgtgggaggctcccttccccttcctccctctcttcctctccccagggcctgccagttctcaccagctgggaggtggacaaggtgatatggggagagatggaagaggaccgggaggagaggtggagagcggacagaggggctggctgttgagatgggtggacaggaggaaggacatctgggaggaccaggtctctccgctcctcttggcctcatgtgtctccgtcatgtgtggatga

SEQ ID NO: 5843 - DNA, 6000 bp, Homo sapiens
aatgaaaattgtattctgtagtctctttcaatatgctgtgacttggcaagggctgaaagcaaatcatgcacctgcataaccttttcagcttgacaaagaatctctctcactccccctctcgcccctcccttccacaggaaatgctcccagacgacagcacgaacaagccctaattaagtctttcctcagatcccgacgtcttttcctccaaccacatcttgggtttagatgtgtaagtaagaggaaagtggagaaataaaaatcaggtataagacacagctggaaattgggacctatttaattgcaagtaaagcctaagaccccggccctggtggctctttggacagttcacatagaacaagagacagagtaaactgatggaggagttaagatgcttttgatgaaaaaactggttgcaaattatttaagaacattttctcagactttttgcgtttcttatatttgtgtctgtctctgaatagaagaatctcaatgtctttcaggatatttaaggatcatatacgtaaggtgcctcatgcttccttgagaagtctatgaacacatccttacaattatatgcaaaattttgggctttgtttacttatctgaaaaagagaatccacagattttataatgtctccagggagttcaagacccaccgctttccccaaagtttaagaaccactggtattatagaagagaaagaataggtctaaaacaaaatctggaaggatggccacgtcaggaagccacaaagaaagagtggagcctatgaaagttagagaaggatgaaattcccaggcatccccatgggagacagtagggtggtgaagctcatgcactgtggaatcatttcatctgagctcacagtctagtgtctccatctattaactgtgctggctgtgtgccctggggaagttacctctccaagcctcagttttctaatctatacaatgggatgatagtgcctacctcagagttgttgcaaggatgaagtgaggctatccatgtagcatgcctctctgcctccctattggtatgatgtgtgtgtgtgtgtgtgcatgtgttgtctctgcctctacacatgtattttccattttcttgtccactttatgcctctttctgggctgactgaagattcaagaaggctctgaattctgttctgctgtttttttctgatttctttagaaaaataatcagtgtgaggtgatgtccttggctgaatacccccagctccactaggacttgtcttccagccaggctgagagccatgtgtttgagcttttccaaccagggtaaggagcagtagatgttaggagcctcgtgcttagagccaagtgaaccagctttttctgggaaggagagaccaaatcatccctgggaggatagagcctgtcttctgcagtgccccagatagcagcagccttagctgctgcctctgtggcctacttccttttgtaatttgcacaataggccagaagatggggctcttgaccctggagtcaagggccagaggctctgactttttccacatttgtactggagagaagtcagatccaccagtcctcccaggaatcaccactacttctcaattcctttccctaccctacctactccacttctgccatggctgggacttgccttccaggggagtgggggatgtgggcacatctttcctttggccaccatcctcggctcctgaattaccacgttgctagagtcagtctttctgacgccctgcctcaggtttccccctctaatccattctcccctaagggcagattttggagatggtacaatttttataggccaatacaacatagtggtcaagaactctagaatcagagagcttgttcttgactcgtctcctcaggtgaatctttccccacctcctcagagaagctctccctatcccatgccagttactcttgatcacataactctttatttacttaacagtagtgattataactagcggttatcttgtttgatgacttgtttactttctcccacttgattgtaaggcttatgaggccaaggacactgtcttaattgctgttttcccaacacctaacatagggcacgatacataggttctcagcaaaagtgttttgaattaatagatgaatgatggaatcccagcttcatgactgcctgaccttgagtaagttgcttaacttcactgagcctcagttttttacctgtgaaatagaaaaagagtagagacattatgactattaaatgacacaatgcatttataccactaaacccaggttctggtgtgtggaagttttccctaaagccttcagcgtcctgctttttatcatttaagaaaaataaagtctgaatgaattagccagatctccacaatttgatcacagccttttattttatttattttttatttttttgagacagggtctcactctgtcacctcggctggagtggagtggtatactgaagcctctcctgggctcaggtgatcctcccacttcagcttcctgaggggctgggactgcaggtgcatgccaccatgcctggctaatttttttgtattttaaaaatagagatggaatttctacatgttggcccaagttggtcttgaactgttgggttcaagggatccatctgtcttggcctcccaaagtgctgggattacaagtgtgagccaccatgcccagcccacagcctttctctatcacaactattacctcccactgctcttctcaataactttctgctttggcccaaattgtggctaccctgaatgggccatgtgcattattattcttaagtctttgcctaagacttgagatgcttgctcttcttaccttgggtcagctaaatcttacccatgttttcagacttagctcgaatccatgtcctctgtgaaaccttcctgaagatcattttctcttctgaatttttgcaatcttcatggtttatataatattactcattaacatataccctgtttccctgataagcctgttaagctcccttggagatatatattttagatttctctgcctctacagtgttacttgggcctgttcattagtaggtgttcaatacattttttattagattgaattaaaagcattcatatttactaagtactttctatgtgcctgggattggttgaggctctgttgagtatacagaagggcataagaaaaataatcattgctttcaaagaacttataatattttagtaagctaaagtcaacatataaagtacttaaataaccacagcatgacaactgctataagaaaggtatgaagtgccttgagaattctggggagggtgagatgacatctgttaggggtatcagggacagtagaataaagaaaggcttcttggaagagggtggcttttgagattaactttgaaggatggttaagattttgatggacaaaaatggggatgagggtaggatgtgaattccagattcaagatgacaggattagtaaagagattgatggagtgtgtggcaatgaacactaaaacgcagagactagacaggaggcttatacaggacatcagaaatacaattctgcttcagggatactgaagcccaaccttgtttccaatttcaggaccaacacaaaggatggtaagcaggggtggaaagttttaacatgtatcagactaccttccccaactgtagcttctttaggggctgagaattatttgcaacaattcttcccctgaccccaatttggacctacctgaagtctggtatgatagtgcatataaaacaaaaggccccacggccgggtgccatggctcacgcctgtaatcccagcaccttgggtggctgaggcgggcagatcacctgaggtcaggagttccagaccagcctggccaacatggtgaaaccccgtctctactacaaatacaaaaaaatcagccgggcgtggtggtggggacctgtaatcccagctactcaggaggctgaggcaggagaatcgcttgaactggataggcggaggttgcagtgatccaagaacacgccattgcactccagcctgggcaacaagagtgaaacttcgtctccaaaaaaaaaaaaaaaacaaaaaaaacaacaaaaaaaaaacaaaaaaaacccaaaaggtacctttctttttcttgaggagagagggttgcttcgattttagccagcctctcttttcttataaatccaaatcaaatttaatgcattattcatgatattctaaccttgtgttaagtcagtagttctgttgctaaataatagtttgccttagatcatttcctggaaaagttcgaagcctttttgtggaattgcttcaacagtcatccttagctcgaccctgtccgtgtgttttgcttctgacttgagactcaagaagaagacctaagtcatagtgagactgtgagggagcctgacactgcctgccttcttcaatttaatgctctttaatctggccattagctcaaggaaaaacaattaattttagaaggccctctcccctcatccgcaattacctcctcctgcaatcgcgaaggatgtttgcccggaatttaaacatcatctcccaaggaatgaaatcagaataggcaaaaccgacactttcccagttttcaagggtcaggtgcagctgcaaatagaagcagagattttctagcaagcagttggaaggaccttcacgcccagaggcccctgaagggagggaggcggtttccaaggcaaccgggcccgggagcggttggctccccggctcctccccctccccgcggtagcccagggtaccgccggacagcgtcctcccgtgctccgcgccctgattggctgcgcaggcctctcgctgattggttgcggcggatgcctcgcgggccggtggctatggaggcggcggcggttgatggttgaccgttggctccggggtgggggtcgccgttcgagtgatctgctcagacccgaccagagggcgcgggctgctgatgcttggcttggagcccgtgggggagacctagttcggctccgccatgccggccgccgggagtaacgagccggacggcgtcctcagctatcaggtagggccccgcctcccgcgcctcccgctcctccccggggcgcagcctcctcatcctctgcccaccctccttccttctgcccccgagcccaggcttcccaggccgctccctgagggcgaggggaggccagcccgggacaccagggggcgctccgggcggttggggaccaggccagggctgcgagagagtgaccttgggccgaacctgggatctggcccatctctgccgcatcccttgcgccgcccgcccaggagccctgacagccggcgggcggcgacctcttgttctcctcgcgtctttctgttggaaggggccggcgtctggcctcgcgttgtcctgccagaacgtgggcagaaagggtagcagggaccttgctctggtggggcacgtcttctctttgtgtttttatttctgggggtttctggttcctcagtggttcagaggaaaagccagaaaagactctggaggctgggaccaatccctgatagggtgacccggtttgtgactccctctgccccattgaacagacacctgaaaacttctgggtagggactgcaaactgggctgaggatgtgtggaggggtcaggaacaggtgcttatttaagggaattaaaaaaccaaggttaagtaactggtattggaactgttggggcggctaatgtaaggaaaagcattggactaagtgttagagtctgtagtttgaaatcctacctctgcctcacacaaactttgtgaccttgagtaagtcacttgcctctttgaacctcagtttccccagctattaaaatgggaatagttatgtctgctttgcatgcttcacagggttgttttgaggatcagacgaagtgctgtttgtgaaagggctttgtggagtaatgtttattgtgtgacactcagtgaatgagtggcagcccattgaattctcactccccgtttcctg

SEQ ID NO: 5844 - DNA, 6000 bp, Homo sapiens
ctctgcctcttggattggggtgattctcctgcctcagcctccctagtagctgggcttgccggtgcccgccaccacgcccggctattttttgtgtttttggtagagatggggtttcaccctgttggcctggctggtctcaggctcctgaccttaggtgatctgcccacctcagcctcccaaagtgctgggattacaggcatgagccaccgcgcccggcttctataagtttttttctatgtttaaaacttttaatttcatttttgtacttaattttttttttttattaaacacacacattagcctaggcttacacagggtcaggatcatcattatcactgtcttccacctccacatcctgtcccactggtaggtcttcaggggcagtaatgtgtggaactgctgtctcctgtaataacaatgccttctggaatacttcctgaaggacttgcttgaggctgctttaaagttaacttttttaaaaaatagaagatgcacactctaaaatataataataaaaagtataggatattaaatacataaaccagtagcattgtcatttatcatcaagtattgtttattgaacatagctgtacatgctgtatacgtttctatggctagcagcgcagtgggtttgtttataccagcatcagcacaaacacatgagtaatgcgatgcgttactacgacgtcagtaggcaacaggaattttttggctccatttataatcttatgcgaccatcattgtatgtgtggaatatttttgactgaaacttcattatgcagcaaattactatattagcaaataaaattgagctatatataatgaagaagtacacattataaccaagtgggtttattccagggatgtaaggcctggttcactattagaaaatcagtcaacataggctgggcacggtggctcacgcctctaatcccagcactttgggaggccgaggcgggtggatcacctgaggtcgggagttcaagaccagactgaccaacatggagaaaccccttctctactaaaaatacaaaattagccaggtgtggtgacaggcacctgtaatcctagctactagggaggctgaggcaggagaatcgcttgaacccaggaggcagatattgcagtgagccgagatcacgccattgtactccagcctgggcaacaagagcaaaactctgtttcaaaaaaaaaaaaaaagaaaaagaaagaagagaaaatcagtcaacataatctaccgtattaacagactaacaaagagaaattacacaattcgtatcagtggatgcagaaaaggcatttgacaaaattcaatagccatccatgataagaatacacacacacacacaaaagaggaatgggggaactttctcaatctgatatagagtggctactacaagaaacttacggctaacattatgattaatagattgagtgtgttctcctaagagaaacaaggcaaggatggctgttctgttttgaccactcttattcaacataatgctagaagttttagctagtgcagtcaggtaagaaaaggaaataaaagatatgcatattggaaggtaagaaataatactgtctctatttgcagatgcagatgactgtcgatgtagaaaatcccaaagaatccatgaggggtagaaaacccaaatacctcacccccttgaataagtgagttcagcaaggtcacagtatacaagatcaatatgtaaaaatcgattatatttctatataatttaatgaacaaatggacacaaaaattaaaaatagcatatcctgtttataattgcttttaaaaagtataagtgtaacaaaacacataaaggagttaaatgctgaaaactacaagaacactgataaataaaagagacctaaataaatggaaaaaaaatatatcattaagaattttaagatggcaatgacagcgcattaaaccaagcatggggccctgtgcatctgcacaggtcacactcccatgaagccagccccgcactagtatcaagagtgatgtttgagtctgggtggggtggcttatgcctgtaatctcagcactttgggaggctgagtgggtggatcagctgaggtcaggagttcgagaccagcctgtacaacatggtgaaaccccgtctctactaaaaatacaaacattagccaggcgtggaggcacgcatctgtaatcccagctacttgggagactgagacaggagaatcacttgaacctgggaggcagacctgagatcacgcaactgcactccagcctgggcgacactgtgagactccatctcaaaaaaaaaagaatgatgcttgaacttaatactcatagctggtcctgaaaggtgaaggtgtccattgccctgccttcctgacagactccatgtcacccaccttccacagatgagaatctgcttgaggtttcaccccacacagaatctccaggcctctgcttcctgcagtgttgggaaatccttctgagtatctaaatctaaatctttgtcctttgggcctgtttcctcttgttctgtcctcactgaatatggggaacagctggtccctctgagtaattaattcttgtagacttggacacagtctgtaattccttttcccttttctcattgggatgactctccagggctttctccaactctggatctccaactctgacacctcccccaggttctctgtgtgctttggaaggcatggggttcacaagagccccaaagagcaccagtcaggggccagagggctcagtgctctggggagatggggaagattccagcactgatgaacagactccagccccccctgggtcctctcttccagctcccaaaatgtactctatttttatctgtttcacgaacgctggtccagatagtcttccatcccccactgactgttagaagtgactctcagcttttgtccatctcgaagtttctgtgctcagtgtgcctctcagactaaaggcttcctttgggaagccccgactctcgcttctcaggacagagatccaggggttgggggaggaaaaggttgaccagaagccatagcggagcagggagagagagtgtgaaagacagacccgcggccaggctcccagttctccagctcgtagagggcccaagtggccgctataatctgaaagagcagatatcgtaatcccatagtacttcctattggctgcaggacacagttctgtcctgacactgaaatttgggtgtgtcagggttctgggaattcacaacgctcacaacttgtgaagcagctgtggggtgggggatggggagggtttcagcagaggaagtgaggtcagtcaataattgatgcctgtctgagcttttagccattatctcccccagcctctattcctgtcaaaaggtggggcggggcaggaggaggggtccctggctcatcttgtagaatccccatattagagtaagacaccttagaggtctactcctgcttctaatacccacgtctttccaagtgtctctgaggccaccccctccccagccttttcatttattcatttaattaacgaacgccttcattgagggcctcctctgagtcaggctcagccagccagcatctttgctatgagctgagataagcatcatttccgtctattctcacaaccaccctatgaggctggcacggtttactatgcctatttagcagatgggggactgaagcatggagaggtgtcactagcctacggtaacacaaccagcctgcattcctagtaggtagtttgacttcagagtctctgtggataaccaggaggctaggactaagaccagagtcctgcaggtacttagatggttggagcaaagcagggcagtgaggtcagtgctcccagcctgtgcaggagcatcaggaagagtctgtgtccccctcccctgccggtatgaagccattctgcttccctccccagctgccttgtgtcagcagagttccagggaggctccattccccacctctatctaaagctccatttgctggggtgggggccctgcctggaaggggaaggtccaaggctgctcccagcgtgtccctccatcctgactgtccctggcggggcgggggtgtctttgtcacccagctgcacaacggccaggaagggctcaaaccatcctcagggctaacccaaggccgtcctctgggcctgtatacccctgtgctgagtgcggatcgggagaggctgctgaagacaggaggggacaaatgggggacgaaggggcccgagggaggggactgaaggatttgggccaagtcgggagttcccgagggcggagtcaaaacgcatctggattttgctagccccaaactctgccctcattgctgcaagcctcctagaccgaggacccccgggctgagggtggggtaaggataggtagtgtccctccccgtcccacccccgcctgtcccttcctcggtggccccttcccggcgccccgattccaggcggcccctccgctgctgccagccgatccccctctacccccacccactactccggccgccagacgttgcctacagtctcggctctgtctcccacggctgtgggtccggaccccacgggacccctatgggacccccacaggacccccacggcctgagtccaaggcccgccccctcggggaggcggatgtgggaggcccggcccgggtgcgggccagcgacccgggagctgcgggcggctgggaggggaggccgccctgaggggctgggagcggcgcgggggtgggtcccggtcctgcagccccagcgaggggcgagcggcggccagtcggcgagctgggcaataaggaaacggtttattaggagggagtggtggagctgggccaggcaggaagacgctggaataagaaacatttttgctccagcccccatcccagtcccgggaggctgccgcgccagctgcgccgagcgagcccctccccggctccagcccggtccggggccgcgcccggaccccagcccgccgtccagcgctggcggtgcaactgcggccgcgcggtggaggggaggtggccccggtccgccgaaggctagcgccccgccacccgcagagcgggcccagaggtgagtcgaggtccgcggacgggaccgggtggcgggcggcctgacccccgcttcagtgggcccttccttcgggcggaccccagagtcaccgcagagtggtcgcgggaggctcagtcccagctcattagaaaggcaagctgctcctggctgaccacgcacagctcccatgaccctacctgagacttggaggggaatggacgagactggactggaaatcagaaacttggttctagtcgggtgacctggggtcagtgacttcacttctctgttctcctaccctcttcataaaatgggcagtgggattcctgtcttgctctactcacatagaagggatcacacgtcctccaggccgctgggtggacctggagtgaatgcctacttccacagctgttgagcctcccagcagagctcacctttcccagatcagtccttccagctgttgcttgaggaatctgacactatcactccaacctaggagtctcaccctaggcgcgcatggtcagtcacctccttgccacgaccttccttcaggatccaggccaaaggggatcccagtctccccccaggctgggaccccagatttttccatggaggccagtgctgtgaaacccatggctgggctggctgccccagctcctctttccttctccaaggacaggggcataatggacagttgctctcactctctctatgtatggccagcttctggctgagtcagggtctgtcctaatacctgtcctctcacctgtccccccatttcattggtttgttagaaatagctaccattgattgagtactaactatgtagacacttagatatatatattttttctcatgtaatcctggccgcaacctagtggaagaggggttactatccccttcctacagaaaaggaaacagacatgaatatgggacttg

SEQ ID NO: 5845 - DNA, 6000 bp, Homo sapiens
tcccaggttctcttcctacttctatcactgttccttctgtcttcttttttgctggtattgctgtatttccagaattctcttgctcccttgagctgtttgaacaacaatgatatgctgctaacttccaaatctacatctctgtggctccaggtaccttcaaactcagtatgcctgacaaggaactcagtttttacatttttaaaatttttttattttttggagacggagtctctgtcgcctaggctggagtgcagtggcacaatcttggctcactgcaacctctgcctcctgggttcaagtgattctcctgcctcagcctaccaagtagctgggattataggtgcccaccaccatgcccagctaatttttgtatttttaggggttttgccatgttggccagctggtcttgaactcctgacctcaggtgatccacctgcgttggcctcgcaaagtgctgggattacaggcgtgagccactgcgcccagccaaggaactaattttctttttcccaaacctgcccattctagtctgctgaatgaaactaccaggcagctagtcacctaagattatcctagagtcatatggggccatcccctttcctcatttcccgtatccaatcaatcttgtcatttctacgtctttgaactcttgaatctgtttctcttttccaccttcacattgctgctgcctggggtcaggtccacctcctatcttgcctgggctttgccttctctttggtttccttacaaccagtcttgtcttcctccaaccagcctctgtacaaagttcaaattcacttggttcagcaaagtgatcttcctaacacaatatgatcagtttacaaatatgatcagtttagcctttcctaaaatacaaacatgatcaatttacacttagaacccttccaagtgtactgaagagggtctcttattagactcccactccagtgtgctccatttccaagtagacttccacgtctgcctagctcaccaacattacgtttccactgtccatcatcttcagcctgcatcttctgggtgtaccgctaggctgctcacggttctcctaaatgccaggcagaacagtctcctgccatctcctgccctcctgacacaggcctatctggggggactctctgatcttccaagaatcagcgtagcctgtctcttcgtgaaaactttctcaactcctcagcctgtcccctcacagctgaatcattcatgtcccctgagtggccctcattggctctttacaggcttgtgtcctcgcagagataacccgttgttgctctttttctcatgcttttctgtattagattttaagttccatgaaggcgaggactatgacttatccatgtctatatgttgtgcctggtgtactgtaggtgcttagtgcttgtggaatggatgagtgaagatgaactattgccttcttgggatgaatgaccctgctgctcaccaaggcaaatgatcccctaggtagtggtgtctctgtgcgttgcgaccaatgtggcaattgtcacactgagttgtcactctagtcagtgggactaaggagtaagactttttcctggagaagtggctcctgctagctctggggactctcctgacaaagagacagggcagaggggaaaagaagttcatagactgtgatgtgggtccagccctaagattaagacggtttacaaggccaggcacggtggctcacgcctgtaatcccaacactttgggaggccgaggcaggcagattacgagatcaggagttcgagaccagcctgaccaatgtggtgaaaccctgtctctactaaaaatacaaaaattagccaggcatggtggcgcatgcctgtagtcccagctacttgggaggctgaggcagaagaatcgcttgaacccaggaggcggaggttgcagtgagccgagatcatgccactgtactccagcctgggagacagagcgagacaccgtctcaaaaaagaaaaaaaaagaaaaagaaaaagaaaaaaaagaaggcttacgaaaatggacacttaccggggccttcagggatggtgaggagaactagcaggaagcatccttgggccaggctgtgggaaggagcgaagggcacaggtagggattaggcagtctctatgtagcgcgggacctaaaaggaaggtagacacatcacctaggaaagctctagtttggagatgccccaaactctcacaaatggggtgtgaggcatatgattaacccctcccctgctccacctcattttccaccttcagctgggtcctgaagaccagtacctagaaaagcaggagatgctatggtgttgaagaaagcacaggaccagtaggctgtggctttaatgatggattgtatgtgagccttggcaaatcgcttaccttctctaagtctcagtcacttcatcggggcacactctgacatgcctcaaccacttcctaggattgtagtgaaggtcaactcataatgatgataatagctattctttttagatcacttcctatgtgtcagagattatgctaaatgctttaccatattttatcaatactaacaatatctgtatgacatagaactattattagctccattttacaagatgagtaaattgaggtttagggaggtaaagtatcttgcccaaagttcaatgctgtcaagtgagctgatggagctgacggaggtggcatttggtctgtggagccagcattctggttccctgatctgtatatttagctgtgtggctgactttactgtctaggagtgaagcaaccacaggtcccctctgggacccctggcctcgaagccacagtggcagcacttagcaagaaataaggaaagatacctccctcccccctggcttcagatatgtgctcctgaggggttggctttcccttcttaactgcaggggttggtgactgtactgggttgaatagtgtccacccaaaattcgtgtctaccaggaacctgcgaatgtaatcttacttggaacgaggatcttagcagcagatgtaaccaattaagatcatttgcactcatactggattagggtgggccctaatccaatgactggtatccttataagaagagaggaatgtggacagagatgtagatgcagagggaagataaccatgtgaagacatggggttatgcttccgcaaaccaaacaacaccaaggatcctgggaaccaccagaagctagaagaggcaaggaaggattcttccctagagccttcagagagcacatggccctgccaacaccatggtttcagatttctagcctccagaacagtgagagaatacatttgtattttaagctacccagtttggtagtaggaaactaacacagtaacctagcactgtgtgcaccacagcttggtggatagagcatggattggaaaccacttagacggactgggtggggtgtgcctatttgggggagatgagggagaggagaataagttatttactcatccagctacactgaccaacttgtagacaatgcctccccatgactttatgtgattgtgtgtacactgtgtctggcgagtgtgtcttcagctttattttttccggatatgacgatgggagttcttcaggttggtgaaacttagaaggtgagaattccatttaagcaactgttctccctatctcttggccatcctttccacccctagatctcagatggtgaagctgtgcttagagaggttcaaaccttgcccaagttttcacagctagttagtaggaagcagaattcagatccagaattctctggctgcaaaaattctgccctttcctttatatcaagttctttctcaagctaaagaaactgacctcttttcagaaagatacggagtgatttgtttactttcttaagcatttcttctagatttgaaagtaacatttatttgaaaaatatttagaaattattgaaatgttaaaagtaaaaaaattatggcaataactactgttactattgggtaaatatccttccagtctttttttcctataaacacatattatcagtacaatttgaataatactgtaaacagtgttgcattttgcttttttaatttaacattatcttgtaagcattttctcatgtcaatagtttttgtaaacaggattttaaattactaaataatgttccatcatatggatgggccataatttaacattttctattattgtctacttagtttctaccttttttacaatgataaatatacagttaacatttttcataaacatctgtcctcttattatttcttgaggacaggggacaatactgggtaaatggatatgaagattttaaggcatttgatgcataatgccaattgtttaccaaaagggttctacctaccagcccaatcagagtgcctcacacggcaccctcacccatactgtcatcaataaagagctttgctatgttctgaaaaggcgcgtgccgcgattccatcacacaggctgccgcgtccagaggatggcagggggcgaggcgaggcagggaaaccagttaggagaccgcggcgatgatcccaggggacgcgctgggggcttgaggctaggcgcagggatggaggaactggaacacgcacgggattcgtagaatattcgacgggggcgggggatcgactctgataagataattctgcactgcgtggggtgcaggagagggaggagactgcacgttcggctccggcctcctccgcgccgggctcggcaccgatccgcgaagttggccgaggcgtgagccccgcccacccctttaacagggacactcccctttaaggcgggcgcccgcgcgcgccccggccccgcccttcgggggcgcgcgcggcggccgcggcgccggctccgccgggagcgcacgtgcaggcgccgggcggaggagagggaggcgggagccgggccgcgggaggaggggaggcgccgggggcgcgcgcgcgcgcgctgggcgctgctgggctgcggcggcggcggcggcggcggtggttactatggcggagtcggccggagcctcctccttcttcccccttgttgtcctcctgctcgccggcagcggcgggtccgggccccggggggtccagggtgagtcctgggacggggggcgggggccgggatggagagggcccggcaagggcgaggcctcgagccgcggccgctggactacagcgcgccccctccccacgagcacaatatggccgggtggggggcgcagaggagtcggggtgacccccagtcagcttccccgatctccgaggcgcagccgcccggcggcgacggagctcacgccgggcccctggggacccgagccctgttccaggcggaactggattcgggcagttctcaggggtcgcgctcccagcgccctcgtgttccagagaggggagtctgagcctccagctccaagatttggaggtccgtggtttctgcccttcaccgtgtccaggggcggggggctttcttccctccctccaggtgctcctggggggcgtctttctcccgccaagactgtggggttcgggcggtggggtcttagcctctccgagggaacctgatgttgagagtccgcgcacctcagactgtaggggaaggggtctctaacctttccttcaggtcctgcacttggcgtgtttcttcccctccctccactgcctccctaatgttctgggaaagggagtcacatttccccttcactcaatcccttgagttcagtggggcaatcccccctccgccctccggcactcatgccccgtggaggctatttggaggaagtgggacgaacaggcccctaaacctttttggagcctggctttggaatccctaaccctatggaaccgagttccccaagggttgatgtgaatctaggtgtatttgctttcctcctcgcctcccccaccctaccccggggggcccattcagttaatcactttgtggatgcctttcaggtgaaatcctggaacctgtctccaaacccccaagattatttaaagatcc

SEQ ID NO: 5846 - DNA, 6000 bp, Homo sapiens
cctctactaaaaatacaaaaaattttgccagacgtgatggcacacgcctataatcccagctacttgggaggctgaggcaggagaatcgcttgaacctgggaggcggagcttgcagtgaaccaagatcacgccactgcactccagcctgggcgacagagtgagactccgtctcaaaaaaaaaaaaaaaaaaaaaagaaagacatgctgggaagggccgggtgtggtggctcatgcctataatcccagcactgtcagaggcagaggcgggcggatcacccaaggtcaagagttcgagaccagcctgaccaacatggtgaaccctcgtctcaactaaaaatacaaaattagccgggcgtggtggcacgtgcctgtaatcctggctacgtgggaggccgaggcaggagaatcgcttgaacccaggaggcggaggttgcagtgagccaagattgcgccattacactccagcctgggcaacaagagcgaaactccgtctcaaaaaaaaaaaaaaaaagggaagaagctgggaagaacagcaggagaaacagtgggtagaatactcaggtttggggcataatcagatgtgaatggtgagggaaagaggaaagctgacttcagtttggagtaaaagagagaatcttagcctggcagttccgcatatgtgtttgggggttagggggttggtgcacgacactgtcccctaggagggaaccagggatgaaagagcaagtgtgtttgccaagcggaaagagatgtgggcagtctagggccctaagaactgccattttctctcttcactatatgcacctgttctgaaatgaggccgggtaagataacacataccctgtgtcttaggagttgtgtgcagatgctgtaggaaacctggagacttaaccttcctttcttctgccactctaacccgttcatgccagagatgccctgccattttcatccaagaggccagatggtccctggcctttgaacaggactagacccagagaccaccaacattcaatgcaaataaactgcaacatctaccttgatcctactccaagaccccctgggatcagatctttggactgtgccagatcaaccatactgctagattctctctctaggtccccgaacatgcacagacactgtcccatggaaatggtcgcgcagtaggagccacgaagaaaaacagccactccccgcccagtcagctgcccaccagctgtccaccgcccacaagaggtgatgtcatgcaactgggggcccagcccctcattcctgacagaccagagagccagggccccaggccctcttcccccccacctccccagcttaggagcagtgacagtacccagtgaggaactcccagtaaactattcatctctgccagttccgggccccactgatggacaaggcccatgttagagctctgagacttaggtcagactccagaggggccagcactagcccctagtgctctgacttcatcatggtaccctagagcttaagctgctcagtggaagactcagctctcccaatttcctccatggggggctgctgactgttacatagccaggcgaggggttgccctgaagagaaggggtgttacctaggccttgtcctttagctgggcccccactgtctaatcccccaccccaggccagccacgagtgtcaggagccagggcaggcagagcagagggagggaaacctgagagctcattctgagagaggctggcttgggaagaaggtacagattgagtacagatgtctgaggagccagagcggtggaggttttgtggggaggcttcctggagggaggaggagggggacgtatcctggtatgaagctgcaggtggtgtgcagaatgcttcccccaccgcccaagctttaaagggctgcagaggataggatgagaacagatgctagccaagagactcaagcttaggagaaagctgtggagagttgaaggcaaagctttagaggcctcatatatactgcctggcatgcgaaggttagtgcaccaacaaagcccgccagctgcctgccttctccctgctgaatttcacctgcagcagaagcagctttgatgcaaaaaacttcctaactgacagctgtgagattccagaattcagtgaccaaagtggagcttggcatcccagttgtgccctcttgggaggaagaggagccgtgggggatcctgaaacagggctgggattccaggtggagtcttccagcctttccgcctggcttgaagattttcccccgagactcatggccaccagagggcataaccactccacagtatggcatcctgggctccaggggcccctccttggagaaactggggaaattgggaggaggaagcaggcagggatctctgagctctcagggagctaccagcagctgaattaaacagtctctggagtcaagagacttgggttctagtgggttctagtccctgttatgattctgtctttctctctctggcttcagttgcttctgttaaatgagggcttggaccatacggtatcctttccagaccataaggccatttctggctctgaaatcccaggatttaaggaatcacacaaagaacttgataaaaattgcatttcctgggcccacccttactctggggttctctagggctttctgcctagcaagaggaggaaacaaggtgcgaatttcagtcctctggtggtgttcactcacttggaggcctggaggtggactgccctacataaactggggaagtctgcctccacgtcagctgaaggatgactggctccacaggctgttagacacaggggctgtgccacacctgtggcatccacttctccaggtttcaggcaaggagacatgtccattaggtaaccctctgtgatagctggggtggctccttcacagaggaggttgtgcaagatgcccttttgctgggtccctttggggataagcaatggaatgaatggaatatacatcattgcctctccgctttgcgtctccccctcccaccccccacagatgctgtctgtcaggagcaggcaacagacggtcctggggtccatctgtgctaatgcttcacaatagagtcccatgtttccccactgacaccccctcggcccctcagctgatggccacttggtggtgccaaggcgggaggtgggaggagggagaagaaggcactaagagagctacctcttagctcctggcagtcctcaatccaccccggccccccacccaacaagcatcctgccatctggacttgtgcaatcactgaggggcggaaaagcaccctcttccacccacacctcttgtaggggatgggggcctagaggactgggggtggggaggagaacacagagtcaaggagactagagaagaagactgagccaggcgcaagaactgagacaggcaggaggcagaaagtctttcctggcctcgcaggtggacgtggccattgcccctctgtgctccttatgccacgtgtctaacacagcacatgtgcaaggtaccactccctaccaggccaagagcctctgtaaccccagtgcccagccagtacctggcacacagcagggcttaaatgttggacaacatcacagagtggttagattgcaggctctggaaccaggctgcctggctttgaatctcagctctgccgctgagtgacttagggcaaattacttatcttctctgggcctcagtttcctcatctgtaagggaggataatggtgcttatttcgtagggttgttatgaagaccaagtgagttaatgcatgtatgtaaaaggacacacagaacaaacagtgtgcatagcacatgctaagtgctcaataaatgttaactgtgaaggcataacagatttgggaagactgggggaggagggaggggacagacaagggcaccgcattgccgcctctgcttcttggccgatgggtgttgggacatggagtccccagcctgtgctgctgacgccctgtggtggctagccgctctttagacaccagacgctgccttccacttcctcctctcacttcttattcgggcaccactgacgacagagacttcggctgggccattcccgcctctcctaccgcctggcagccatggtaacagcctgggggatggtccctaagatggggtcagagaacggctgagcatggccatccccccagccctgaactcccactcagcctgggctcatcccaacctcctgagtcaagtccacagtaagcgtctgtctcctgggaagggggatctgaccccggcatcaggagctgaggaaaggtgttgccagcagggatcactcaagccccttggaggggacaggccagaactaagcctactgctttcagggtttccacctcttcccttcttcctagacgtgcgaacagggggcagcctctttcagctcttctggggcagctgcgtcaagggaaaatcctgggccctctccctccctgggggcttctgcgcagtgagttcagggagtctcctccctcctccatcgggcctccacccctactcctgcgcagccccgctgccgctctccctgccctggagtctcctgcagccccttggatctccgtgactctccctacctccccgactccccaggcttcttacagtgacctcttaccgtgccccactccatgaatcgccagagctattcgtccctaaatttcaaaccttgcgcaatgtcccttcacagacccctccaggtatcacgcagccccgagccccgagccccgccccgggggcctcatcccgccccttcgcgtccgcggctcgttttcccccactgagcgcccagctcccgcagtttccccggccgtcgagcgccgtgggcggggctccagggcggcggcgcctcgcggggagggtcctccgtgctgggggcgaggccacccgaggcagctccccgcccgcccccaaccccgccccgctctcggagcctataaagggaggcgacccgcggcccgcccggctggcatcccccagccgccgccagccccgccgaggggagccagcgccgtctctgaggggcgtccggcgccggagccatgaccctccgccgactcaggaagctgcagcagaaggaggaggcggcggccaccccggaccccgccgcccggactcccgactcggaagtcgcgcccgccgctccggtcccgaccccgggaccccctgccgcagccgccacccctgggcccccagcggacgagctgtacgcggcgctggaggactatcaccctgccgagctgtaccgcgcgctcgccgtgtccgggggcaccctgccccgccgaaaggtgcgtcccccgcccgccttcaggatctgctcagcccctctccgactccctacagggcctgctgactccgcagtgccctctcctcggcgtccgcggagtcccccaccttcttccccggcccgctgggtgcctcgactccccgcgttccccgctgctgcgaaggccgtggccctcgcctgcacaccgcgcccaggctcggtggctcttaactccgcgccccatgcacgccccctctctccctccttgactcctcccagcaccccccttctcctacccgctccatctggctttctgccccccatgccccgcctccccgtggccaggtgtcctgggtccccaggagcccctcgcccgagggacagagacagccccaggcaagttgaaggtccgagagcccccggtgggagaagcgggccggtggctgcgccgcgtgcgttctcactctgaggaagtgcgtggggagccgctgactccggatagcacacccttccgaggggactccccgattcctgggctgggggcctgccgcctggccccacgtctgacgtacggggcgcgagggccactgctccctggacttctgtcggaaccggacgcagtgggaggggtcgcagggcgcccgcggggcaggaaggatgcgggccgcgcccacctctgagtcccctctgccagcctcttcctctggccccaggagacct

SEQ ID NO: 5847 - DNA, 6000 bp, Homo sapiens
aggcgtctagaaccgaagaggccccaaatccagggttgtattagacttgagtagggactgagggcaggctagggcgtaggttaggggagaggggagaaagagtaggggaaagagggaatctgccaaatcagggttatgatttaaacctgctcagaatcgttcacccatcctaccccaccctgctccagggaggagagcagaagctgagtcactgggtgggtgggacagaagtgaatcagccgtgaaaacatggggggcagcggggagatggggagggcaggaaatgcaaactgcgcatcccagaggctctgggttccttccacgggaggggatggagaattcacttggagtttctttcagttccaaatgcccgagtgcaggcttctgggcgtcctcctaaaaggtggtctgggtggatgagaggaggcagtttggaactaaatggttgggtgctaaatgtagggaatgaaggagaaggtctggggaggggtgggcatcctgaggaagaaggatcagactcaggattgcaggggaaatgtctcctgggttgtgagtggtagttagctgggagcttgtctttaggcacagaggaagaggatcccttcaggggttctgatatctgattagatgttaggcaaattccaagcagtcagtacatgctcccctttctgccttttcctgtccctgacttatttcctcaccccttcccagtcctgagctctccccggaccctccggaaactttctccagagccaggagcaacctgcaggttggaagcccctcattccttgcaccttcttaatctgccctcagcctatcttggttaagggttgaatccatgtgctcctgggaccactggggttgagctggcctgggtcacagggtaccagaagggagaggttcccactgcagtgccccagaagtaaccacatctcaggcctgggaggggtgggttgagtcatagcaaggtcacagcagggacacacattccttttgggtccctgttggcccccctcctacatccgttgctcttctgccccagctctccggcttcgtgcgcccccttctggcctctggtggaacagccaggtcttttcacccaaagcccaaagccccaaatagtcctttgaatttgttctccattttttcatttattttattatttattgtaattaattgattgatttttaaattagttaattttttaaaattaagtaattagttaattttttaaaattaagtaattaattaattttttaaaattaagtagttaattttttttaattaagtaattaattaattttaaaaagtatttatttattttgagacaaagtctcactctgttgcccaggctggagtacagtggtccagcgtctcactgcaacctccgcccccccgagttcaagcgattctcctgtctcagcctccggagtagctgggactacaggagcctgataccatgccaggctaatttttgtatttttagtggagacggggtttcaccatgttggccaggctggtctcgaacgcctgacctcaagtgatctgcccaccttggcctcccaaagtgctgggatgacaggcatgagccactgcgcccagccaataatttatttatttttgagacagggtctcactcggttgtccaggctgaagtgcagtagcacaatcatggctcactgcagtcttgacttctggggctcaagcagtcctcctgcctcagcctctcaagtagctgggactgcaggtgcacgccaccacacctcggtaattttataaattatttgtagagatgaggttctcattatgttgcccaggctggtctcaaactcctgggctcgagcaatcctcccacctctgcttctcaaagttctgggattacaggcgtgagccattgcacccatcctcattttccatttttgctttccaaaattcatctcctttataagccttaaaaatcagtatgggaaatactggggaatattgtcaggaaaagtaatataactatttgtcagagaaagaaactagggccagcatcatgcaacagcggggcataaggccctcccttccttacttcagcaggtgatgtgggcaaggcccttctccacatggctctgcctgatttctgacctctccttctcctattcctcctccagttgcagaggagaatcctaaggagagtaaaccccaagcaggcactgcccgcccacaggatgtgaaccgcagagaccaacagaggaatccaggcacctctaccacgccctcccagcccaattctgcgggtgtccaagacactgagatggtgcgtttggagctggtagggagcaggaggggtgggaagccctggagacttccatctgagactgctcccttgggcttggagacgtctccattgtctgtcctgggtgcttgcctggtgggccagaaggttggaatggggagctgggctggagcggttctaagctgcctactctcccttccccagggcccatgccgtagacatctggactcagtgctgcagcaactccagactgaggtctaccgaggggctcaaacactctacgtgcccaattgtgaccatcgaggcttctaccggaagcggcaggtgagactatttttcttctcctcctgctccagcagaaggctcctgccagggagtgggggcggtgctgcttacaaagctgcataaataagacactgccccatctttaaggatcttccaactttaggagaacatagagaatataatttattaaacaaacttagagaataatcaaccacacactgtgagagaaaacccacttaaggaatgccctaactcagtggctcttgaacttgaggcatcagaatcctccggagggcttatgccacacagatagctgagccccaccggcagccttcctgattcaggaggtgtggggtggggcctgacaatatgcatttctaacatgttccctcgtgatccggatttgggaacgtcactttgaaaactactgttccaggctagcagaatgcacacaatttattggttgaagagggggaactaaagagagggaacactgggccgggtgcggtgtctcatgcctgtaatcccagcactttgggaggccaaggctggtggatcacgaggtcaggagttcaagatcagcctgaacaacctggtgaaaccccatctgttttaaaaattacaaaaattagccagatgtggtggcatgcacctgtaatcccagctactcaggaggctgaggcaagagaattgcttgaacctgggaggtggaggttgcagtgagcagagatcatgccaatgcattccagccagggcgacagagcgagactccatctcaaaaaaaaaaaaaaaaaaaaaaaaaagagagggaacccccgaggagacgctcaggtgtttttacatcctcagactcagatgtcccctctcattctcctgctggaagcctctggcctcactcctgacctgtgtgcctctctctccagtgccgctcctcccaggggcagcgccgaggtccctgctggtgtgtggatcggatgggcaagtccctgccagggtctccagatggcaatggaagctcctcctgccccactgggagtagcggctaaagctgggggatagaggggctgcagggccactggaaggaacatggagctgtcatcactcaacaaaaaaccgaggccctcaatccaccttcaggccccgccccatgggcccctcaccgctggttggaaagagtgttggtgttggctggggtgtcaataaagctgtgcttggggtcgctggcttgtgtctctgtgtctgcctctcacaattctggaatccctggccctctctttaccccactacagctcactcacagcatttctcctttcctgtggatacctttagtccttcctgtgacagccaggcagaagcttcaagccatcaagcctcacagagctgcccaccaggagttgggagtgggaaggggagacactgagatcatggccttaatctgaagttgtgaccttgtttctaacactgatctttggacacaaagggaggggaaggattaatagttaatcccagcaggaacccagcaaagaggaactctcaaagcacatacccttctgttacttcctactaaaaaaagaaggaaattattactaatatatgagctcatcccatggccctgaaccatgtgattttacctggacaacctcattttgagcttacgataaccttgtgatatagggatttttacccctatttttcagaggaggaaactggcttaaaatttggggtcacttgcctgaaattatatagctggtaaatgacagagggaggtttgcatccggttcttccatatgtgacaatacctggtattccctaggtgctgaatacgtgtttgtttagtctcctttctgcctacatgctcacccaagcaggtgtcaggaagcggccctgtcagttcaggggccctgacactcagcctttcctggaggggccccagttccgtgagtagcacagtgccaaccccatcagaatattaccacatgtgtcaatcacacaccttgtggtgaaagcgagctgaacgcactgatacatgaagacatttctgactcctccctgaccttcagcctgctgggagagagactggaaggccagccatgctaggtgacaagcttctgagaggcaaagttcccctccccaagatgtacccagccactattcctgtgtgtgtgtggcggggtggatagcacccttggagctgggcatctggatggtggttggggtgttagggggatgtggcgatccctgcgacagacagcagagtgaggtctgaatctgagaagctctgcctccagatcagataacctatcgcactcccagaggccccctcctcctgaaaggactttagtctttggagctgtcacctgagctgagtgggacaagagctctacagggcaggccacactgcgaaggaaggaggcaacacgggcaagggctgcctgctgcccgctggagaccgcaccatggagccaggcggggcccgtctgcgtctgcagaggacagaagggctgggaggggagcgggagcgccaaccctgtggagatggtgagccgccctcgggggtgcagaaggcacaggcaagtgggggggaggcggggagagatgcgctatggagagaaggctccaactgcctgatgccaatccttcctgctgtccagagaggccaaggaaggtagaccctggcctcagcccagagccacccagctggaagatggaacagaaaagagctatgtcagagctgtggcctggccttatccttctgactgtttagccccagatagtgaatggagtagcttcccattccctgagtgccctgttcccagtaatgtcaccaggccccctgcttgcctatggcctcctcaccactggcaacagcaacttccccttctagtagccccaaccatgatactagatattggctggttggggtgagggcagctgctgagcacacaaagcatttcctgaccacaggatgcctctgggtctgcagaaccccaattcctcctgttgactgtgcctttgatccctcctcacaggaaacactgagacgcacagagccccggacttggtacaatggacccgacacatggaggtgagggatgtcagaggtcagaggtcaagtggacagatccttggtagcaggaagcaggagtgaggcttggtgataaagatgacttttttttttttttttttttgaaacaaagtctcgctctgttgctcaggctggagtgcattggcacaatctcggctcactgcaacctctgcctcccaggttcaagcgagtagctgaactacagatgagtgccaccaggtgtggctaattttttttttatatttttagtagagacggggtttcaccatattggccaggctggtcttgaactcctgacctcaagtgatctacccgcctcggcctcccaaagtgctgggattacaggtgt

SEQ ID NO: 5848 - DNA, 6000 bp, Homo sapiens
ttcctgtgtccctttagtatttgtgttcctgtctcgtgtcctttcctttccctacccttttccctcttaaactctaacataagactctaacataagactgtgtccatgttgatgactcccaaatcttgagccctaacttgtctcttgacctggaagtctgcttgctagacattttcatctggatgtcctccagataaattcaacacagtagaaggagaaataattctttgtgtttcacatctcccttaataatatcacccactgctccttgatcactcatacttgaaacctcagaatcatcttttagttctccctttcacctactaacactaatttgattgccaatcctgtcaacattacctatacaatatatatcaaatttttcctcttttttttttttgagatggagtctcgctctgtcgccaggctggagtgcagtggcgtgatctcggctcactgcaacctccgcctcccaggttcaagcaattctcctgcgtcagcctcctgagtggctgggattacaggcgcgcgccaccacgcccagttaatttttgtatttttagtagagacgggttttcaccatgttggccagggtggtctccatctcttgacctcgtgatctgcccgcctcggcctcccaaagtgctgggattacaggcgtgagccaccacgcccggcctcctcttttattttcatttccactgtctcagtactcactttgtttactgcttaggtcttgcaactgatctctccaaaccccagtagtcatccatcttccaattgccaccaggcccctgcctaaaattctttgcttttagggaaagcctaagctccttgatacagaattgaaaacctgtccaatctggtccgtctctctctaaggtgattttctgtctcatatctcatactgcttcctcctcactccttccacctttaacacacaagcctttgtgtttatatctccatgcctttactcttgccattccctttgcttagaaggactgttctcctcttaccattgtgtttacctttgggactatttaaatatccccttctctgtgaaactctctgggcacctttcttctatgccctaggcagaattagcttacttgatctatttgtatagctccttcctcatgcccctagtaggaaacacagttttccggttgcttgtcaatatccacctgcatttctacactatgagttcccagagggcagtaatcacacctctatctttgtaggcccagcacctaatgaaatacattttttttggccccgcgcagtggctcacgcctgtaatcccagcactttggaaggcctaggcggtggatcacctgagatcaggagtttgaaaccagcctggccaacatagtgaaaccccatctctactaaaaatacaaaaaattagccaggcatggtgacaggcatctgtaatcctagctacttgggaggccgaggcaggagaattgcttgaacccaggaggcggaggttgcagtgagcggagattgcaccactttactccagcctgaatgacagagtgagactccgtctcaaaaaaaaaggaaatttttttttaaaaataatataggtgggggtctcgctatgttacccagggggactcctggcctcccaaagtactgggattacagacatgaaccacagcgcccagcctctatcaccatcttaactctaaaacctaacagcccagagcaggtatagttcccataaacctgactggaatgtttctatcttggaaagaattagttatccgaagctttgggtgaggagactgcctttctgcctgatccttacgctgctcccactctggaggagatagtctcctgagacattccagacaaaagaagctatttcaccttcaaatctcccctcacaccccaccacacacaccaccccagacttatctgatctggggctagtgaaggaaagtagctggaagcacaacattccatctcactggcaaggccctgcagactcctggaagggtccaaagaaggatgggcggctatctcgagccctggtcattcctcccgctgctgtttcacaactactggaacttttactatctcttcctttcatgcaggtttcccagaagaaagaccccagaatcaaaaagtcagtactcaagctgggcgcagtggctcccgtctgcaatcccggcactttgggaggccgaggggggcggattacctgaggtcaggagtttgagaccagcctggccaacatggcgaaaccccgtctctactaaaaatacaaaaattagccgggcgtggtggtatgcgcctgtagtcccagctactcaggaagctgaggccggagaatcgcttgaacccggtaggcagaggttgcagtgagccgagatcgcaccactgcactccagcctgggtgacagagcgagactccgtctcaaaaaaaaaaaaaaaaaaaaatgtcggtactcagactgtcctccctggtctaagccagatcattccaagaaagggtttccaggaagccactagggggacagaaagctagggaaacagagaacaagtcccctctgactcttaattctcaaggagccagtggctcacaggtgtggaagtgattacctatttctgttgtttcttactctgggaaagagtctggtggagttggactcctctgtctctactgcagaacaagccatagccctctcctcccaactccatgctgaaactctccacatcctgtgcccgcccttcacattttatagtccctgaagcttagtaaatgtaggaggtatactatatgtattagtcatcagaggaggtactttctgccctctcaccgcagcagggaatttctcctctgctgacctctggtggtgatagtttgaactgtaccctccctttttagttagtggcctgttggcaggtaatgatgcatattttctcaacaatttaaattcaaatgtccaagtatagtattaagtggtaattttttttcattgttgaattttgtacgtctttcaggcagtatagtgtaatacaaagaatagagccggccgggtgcggtggctcacgcctgcaatcccagcactttgggcggccgaggcggagggatcacgaggttaagagatcgaccccttcggccgggcgcagtggctcacgcctgtaatctcagcactttgagaggccgaggcgggcggatcacgaggtcaggagatcaagaccatcctggctaacacggtgaaaacccgtctctactaaaaatacaaaaaattagccgggcgtggtggcggccgcctgtagtcccagctgctcgggaggctgaggcaggagaatggcgttaacccgggaggcagagcttgcagtgagccgagatcgcgctactgcactccagcctgggcgacagagcaagactccatctcaaaaaaaaaaaaaaaaaaaaaaagatcgaccccatcctggccaacatggtgaaactccgtctctactaaaagtacaaaaataataataaaaataagactagaacctggactttggagtcagacctgcctaagttcaaattccagctctgctatttcctagctgaatgactttgggcgacttacgtaagttcagttttcttacctataaaatggaaataataaaaataataggccaggcacagtggctcacacttgtaatcccagcactttgggaggccaaggcgggcagatcacgaggtcacgagatcgagactatcctggccaacatggtgaaaccctgtctctactaaaaatacaaaaattagctggacatggtggtgcgtgcctgtaatcccagctactcgggaggctgaggcaggagaatcgcttgaaccagggagtcagaggttgcagtgagccaagatggcaccactgcactctagcctggtgacagagcgacactcggtctcaaaaaataaataaataaaataataataataaatatttcaggggagaattagatgagatgattgtaaaatgcatagccctagctgtgccccagcacatagtaggtgcttgataagaaatttgttacctccttaataatgggtatttgttcagcctgtgaaccaatgtgttttttttttttaagtaaaatccacggctaggcatggtggctcacgcctataatcccagcactttgggaggccgaggcgggcaaatcacctgaggtaaggagttcgagactagcctggctgacatggtgaaaccccgtctctactaaaaatacaaaaattagccaggtgtggtggcaggcgcctgtaatcccagctactcaggaggctgaggcaggagaatagcttgaacccaggaggcggaggttgcagtgagctgcgatcgtgccactgcactccagcctgggggagaagagcgagactccgtctcaaaaaaaaaaaaaaaaaaatccacatagcaaaatttaccattgttactgttttcaatgtgttttttaaaaattcaggtaagttttgtatactttctgattcttaagttggaaaacaaggtaacctctaatatgggctgtgaggccttcctctgcccaagcagttgcagatatgaaccctgaatataaagagatcttaggctagaaaggatcttgggcagagctgaatggctctaagcatttgacctcacattggtttcctcctgagaagagtcaacagagtccagcatcttcttccaaggtcagggaagggcaaagatttgaaattaggcatcactgggttctcagctgggcctccaagttcccctcctctcactatgcagagcaaagaggaggttgcagaagagaagaggatatgagattggttctctgctcctccctttctttccctgctttccccacacccaccctctcccccacagcagccttctcccccacagaggctgggataggatgaggggggcggagttggggactgagggatcagaagccccaggatgccctgtatctgaagaaagatttggccaggggcagctgtgctggcttatgctcttctccttctgctgctgccatcctccagcaagatgctagggtctttggggctttgggcattacttcccacagctgtggaaggtaagtgtctacagggaggggaagggtctctccatccatccagcaagggaaaggggcgcttgaagcaagagccacccctttggaagagtggtgagtgggctgggtgagtaagggtgaaggatagagccatgtgtccccatggcagggctcaggttccaggcctctgctgaccctgcttcctcctgtggctttaccatactgacgctgggatgtggaacatgttttgtctattcttttggccagttttttgcctctgcattcactcccaccttgaatcttttcctttccccaccctgggcctcagcacccccaaacaggcgaacctgtgtgttctttgaggcccctggagtgcggggaagcacaaagacactgggagagctgctagatacaggcacagagctccccagagctatccgctgcctctacagccgctgctgctttgggatctggaacctgacccaagaccgggcacaggtggaaatgcaaggtgaatggcaaagtatatggcaggtgatggctagggtgggagacagacacatcctggggtgtgggtggcaaccaagggggaaggggagaaatagaacatctggtgggaaagaaaagcccatgagagctggaagggacgcctctgatagagaagggatttaccctctgtttccacaccccattgtgctttcttccttgccccccctttctctcctcttcccctaatcccatcccatcaggatgccgagacagtgatgagccaggctgtgagtccctccactgtgacccaagtccccgagcccaccccagccctggctccactctcttcacctgctcctgtggcactgacttctgcaatgccaattacagccatctgcctcctccagggagccctgggactcctggctcccagggtccccaggctgcccc

SEQ ID NO: 5849 - DNA, 6000 bp, Homo sapiens
atgcaacctttaagacattctgctaagtgaaataagctagatgcaaatagaaaaatattgtatgattccattttatgaggtactagaatagtcaattcatagagacagaaagtagagtagtggttaccggctgctgggcagaggaaagaatgaaggttactggttttttaatttattttaatttaattaattaattaattaatttttgaggcagagtctcgctctgtcacccaggctggagtgcagtggcgtgatctcggctcactgcaacctccgcctcctgggatcaagcaattctctgcctcagcctcccatagctgggattacaggcacccgccacaaagcccggctaattttttgtatttttagtagagacagggtttcaccatctttgccaagctgttcttgaactcctgacctcgtgatccacccacctcggcctcccaaagtgagccaccgtgcctggtctatttttatttttttgtagagatgggggtctcactattttgtccaggctggtctcgaacttctggcctcaagccatccaccgtcttggcctcccaagtcctgtgattacagtcatgagccatggcgcctggccaatcatagaattttaaagttagggcctggccgggtgtggtggctcacgcctgtaatcccagcactttgggaggccgaggcagccagataacctgaggttgggagttcgagaccagcctgaccaacatggagaaaccccgtctctactaaaaaaatacaaaattagctgggcctggtggcacaagcctgtaatcccagctactcgggaggctgaggcaggagaatcacttgaaccctgggaagcagaggttgcggtgagccgacagtgtgccattgcactccagcctgggcaacaagagcgagactccatctccaaaaaaaaaaaagttagctagggccctagaaagctctggtctgaacctctcccctttccagaagtgacagctatagtccatccagagagggtacagagacttgcagagttctctcactgattaaagcaaagtcacaacaataactaatgtctctaattcagtcaattgtcttcctcccacagcacaattaccccaacaggctggagagctaagaatcaagcgatcttctgcaacaatatctgacttaaaatttgtcagttactacacagaaaaaggagccaaccatccccatgaaccaaccataccacactttttcctccttatggtccttgtagaatatctggcactgaggtagagtccttgaggtaggactgggatgcaagagaggcagtacaacaaactagaggagtggactgtgggtaagaacatggtttagagtctcctgtgctcaaacgtatggctgctaaaacagttctgtagccttaagtaaattatttaactgctctaaactccatgttgctcatctgtaaaatgggtttaataatcatctacttcgtaaggattttttattttatttgttttttttgagacggagtctcactctgtcacccaggctggagtgtagcatgcaatgtcggctactgcaacctctgccctctgagttcaagcgattctcctgcctcagcctaccaagtagctgggatttcaggtgcctgccaccgcgcccggctaattttttgtatttttagtagagacggggtttcaccatcttggccaggctggtcttaaactcctgacctcgtgatccacccgcctcggtctcccaaagtgctgagattgcaggtgtgagccaccgcacccggccaggaattttttttttttttttttttgagacagagttttgctcttgttgcccatgctggagtgcaatggcaggatctcgctcattgcaacctccacctcccgggttcaagagattctcctgccttagcctccggagtagttgggattacaggcacctgccaccacacctagctaatctttgtatttttagtagagacggggtttcaccatgttggctagtctggtctcgaactcccggcctcaggtgatctgcctgcctcagcctcccaaagttttgggattacaggcatgagccaccatgcccagctacttcataaggattttaaaaaatgtattcaataatgtatttaaagatttagcaccgtgcctggcacataataagtgggcagtaaatgttagtattacctttaagctgcaaagccaatgacaacccactgactgtgatgccaggcacagtaaatgtgtgaacaactctccttgaggaataaaaggacaagccttcacttcttccagatataaggcttaacacctggtattccaccagaaattcaccttctgtcagagtacactgtaggtctataatttgcattgtattgttcaattttttattttatcttatttttatatacagactgggtctccctgtgttgtcgaggctggaatgcagtggctattcccaggcacaatcactgcgcactacggcctcgaactcttgggctcaagcatcctcctgcctcagcccctggggtaattggtactacaggcacatgccacagcgcccttgtattgtattgttttatgtttccttgattctactccgactattagaaaaattcctgggtggctgggcccggtggctcacgcctgtaatcccagcactttgggaggccaaggcgggtggatcatctgaggtccggagttcgagaccagcctggccagtatggcgaaaccccgtctctactaaaagtacaaaaattagccaggggtggcaggcgcctgtaatcccagctacaagggaggctgaggtggcagggagaatcgcttgcaaccgggaggcggaggttacagtgagccaaaatcacaccactgcactccagcctggcgacagagagagactccgtcttaaaaaaaaaaaaaaaaaaaaaaaggccgggtgcagcagtggctcacgcctgtaatcccagcactctgggaggccgaggcgggcggatcacgaggtcaggagatggagaccatcctggctaacacggtgaaaccccgtctctactaaaaatacaaaaaatcagccaggcgtggtggtgggcgcctgtggtcccagctactctggaggctgaggcaggagaatggcgtgaacccgggaggcggagcttgcagtgagccgagattgagccactgcactccagcctgggggacagagcgagactccgtctcaaaaaagaaaaattcctgggtaagtttggaatctcttcttggagggctcctaaggatataattttcagagatgagggaaaaaatccctttaggataattaaggtaataggtgtccctgccctaagaggagtcagggatcaggaaaccaagggataggggaaagccaagcttcatcaaaatcattccctattgtgaaattcttgcattcagtaaacttctcttttctcattttgcaacgcctcatttctttcctctcctttctttccttctctttctttctttctttctttctttctttctttctttctttctttccttccttccttccttccttcctttctttctttcttttctttctttctccttttcttttctcttctcttctccttttcttttcttttcttttttttttgagatggaatttcgctcttgttgcccaggctggagtgcaatgacgagatctcgcctcacctcaacctccgcctcccaggttcaagtgagtctcctggttcagcctcccgagtagctgggattacaggcatgttccaccacgcccggctaattttgtatatatgtatattttttgagacggagtctcgctctgtcacccaggttggagtgcagtggcgcgatctcagctcactgcaaactccgcctcctgggttcacgccattgtcctgcctcagcctccagagtagcagggactacaggcgcccgccacccacgcccggctaattttttgtatttttagtagagacggggtttcactatgttagtcaggatggtcttgatctcctgatctcgtgatccgcccgcctcggcctcccaaagtactgggattacaggtgtgagccatcacgctcggcctgtattttttttttttagtagagacggggtttctccatgttggtcaggttggtttcaaactcccgacctcagatgatccgctcgcctcggcctcccaaagtgctgggattacaggcttgagccaccgcgcccaggcacaacggcttgtttctattggaaaaccccagaatttactccctataacccctctcttattctaatcccatccctttccccgtttgtcccgcaaaccccatctccaaagccgatttcacgttgagctcaagttggcctttacaaactgacttctcatgttcctcaggcccagcaaagcctggaactccaccttagggagattgttattgcgactatcaactcctggcagccttggtttatgtagttaacatgttgggcctttcttggctctactctatggttgtgcagactttctgtgaggatgctgaagtgacctgagcgagcatgagggaagggctagccacagagatcatggacctaatgcgggcgctgaaaatagggattagggcaggattccggttagaaagcgccagtgttaaaggctaaggagacacagcgccccctaaagagggtgcggtttaaaaatcgctaaatcagtccgacaatatcacgtgtcctcggccctaccaattgaaaattaacaatcgcttcttctgttccccatggaaacaaccccgccccactaaccctcccgccccaatgagtcgtgaggttttggcgttttattgagtattcaagctgacaatcaaacacctgagccttctggttggacactttgcttccggtaagcaagctagtacaataattggccaataaagcaagccttacccaatgatccttatcctaggcggggcctaatgggaacgtatggccaatcagcggcggcgtttcttttgcggctccacgtcggcaccagctgcggggcaagatggaggcgctgattttggtaggagctggaggggcagcagagatgctgtggtgtccacaggggccgggagtcagggttcagcccgagtgggagacggggaaagagagttccgggtaattcttggggactgagcgttctgctgacctttggaataagtgtgtggcctagtgtaggagctaaagccttggtttagagtaggaagccctgccggggagagggcatagagtcggtggaaagttgaaggcagcacatggactccttaggatacacagacctgtaggcgtactggattaggacccttcaggttgccccttatttttagcattgtggatgataccctgattttaatttaccaaaccaccaaactcgccccatattgtaagaaaagaatacagatgttttgtcgttacagactcctcctgatggtttcccaagtttgactctccattgccgattccctgccacattccttcaggaaactgttttgtcttcggtttcctgttaatccctattatataggtttgtcaaataatcagtattccatcaaagttctgggatacctgataaagttagcatggattgtggaatattttttctagactccttattctgttctccttttctctacccatttagaccttaggaattctttttttttttttttttttttgagaccgagccttgctctgtcacccaggctggagtgcgcacgtggcgcgatcttggctcactgcaatctccacctcccgggttcaagctattctcttgcctcagcctcccgcgtagttgggactataggcgcgtgccaccacgcccggctattttttttgtatttttagtagagacgtggtttcaccatgttggccaggctggtttcgaactcctgacctcaagtgatccgcccgcctcggcctcccaaagtgctaggattacaggcttgaaccaccgcgcctggccaggaattattattattattattat

SEQ ID NO: 5850 - DNA, 6000 bp, Homo sapiens
ggattctaggtctaccaggccatactttgggagtaattaaatacctttagaagggttcctccagtttatgggagaaactgctgaatgatctttccaataagtttctctaaaaactaccagttggcatagttagttacattaatttttttgagatggagttttgctcttgttgcccaagctggggtgcaatggcatgatttcggctcactgcaacctctgcctcccgggttcaagcgattctcctgcctcagcctcccgagtagctgggattacaggcgtgcaccaccaagcctggctatttttttgtatttttagtagaaatggggtttctccatgttagccagctggtcttgaactcctgacctcaggtaatccgcccaccttggcctcccaaagtgctgggattataggcgtgagccaccgtgcctggcaaaatttttttttttttttgagacggagtcttgcccttgtcacccagcctggagtggcaatggcttgatctcggctcactgcaacctccatctcctgggttcaagtgattctcctgcctcagcctcctgagtagctgggattacaggtgcccgacaccacgcccggctaattttgtatttttagtagagatggggtttctccattttggccaggctggtctcaaactcctgacctcaggtgatctgcctgccttggcctcccaaagtgctgggattacaggtgtgagccaccacactcagcccagaaaattttttttgagacagggttttgctttgtctctcaggctggagtgcaatggtgcaatcacagctcactgtagcctcaaccttctgggctcaaacaatcctcctgccacagcctcctgaatagctgggactacaggtgtgtgccaccactcccggctaatttttgtattttttgtagggatggagattcaccatgtttcccaggttggtcttgaactcctgggctcaagccatctgcctgcctcagcctcccaaagtgctggggttatagatgtgagccactgcgtctggcctagttccatttttaaacctagagtttttctttatgagtgtcaaatagaatccacagaaagtgacataacaagctcactacacactcaaagatcaaaattttactttactgttgacattcctaatccaatgtagcaggtcttgaaccaaatgtttacatatgccatattatttcatcagttccacagtcgtatgagggattaccaccattttatagattaggaaacaactcaatggtgatagatagctaaagttacaaagctagtaagtgtttagcattattaatattaattgaggtaatacatgtaagcttgagtgcttatagtacttcaaatgctttacatgtacagagtaagtaactaggctataacttttaaaatatgcacaatagctccgtgaaataggaagtattatcaatatcatctttattttacagacaggataaataggatgtgaactcaagatatctggttccagaacctgggctctcggtcactaaatcataaggctcagcccactgtactcaactacacttgagccaaattctgtctgataacagcaggtaggcttttcgcatataccaagtacaggggaataagtgtttccaggtttcaacaatcttttggttcagctggctaggcagtattatatgaaatgggcagttaaggacagaacctgatttagatgtaaagtatgtggtatagaccaagtgttgtgggagttcggcaaaacctagacttgggactattgagctagatcctgaagattgactaggatttgggtaagcaagaaggaaagcatgcgtaagtgaagtcagagaggcagacatgaacatagcacattcacagcaggctgagaagatggtccccaccaagttggggagtatccattaaggagcaggaaacaagattagcttgggatgcagagtcttcaaccacactttcaggataaagacaagaaattcaagtgaggtggctcacaaaaaatacaaaaattagccagacgtggtggcctgcacctgaagtcccagctactcaggaggctgaagtgagaggatctcttgagcctgggaggtcaaggttgcagtgagccatgatagcactactgcactcaagcctgggcaacagagcgagagcttgtctcaggaaaaaaaaaaaaaaaaaaaaaaggaatgcaagaaagagccgctagaattacactaaccccacgaagaccggtgctatgctgctgctaagcttcctggatgttggcctcttactgtctgctccatattctccttggtaaaggtaaaagaccagtagaaatcctacaaattgctttagtaaaacctgggtttctttgataacagcaggtaattcaaatcttcatgaccaatatcacattacctcgagcccatagctttctagggacccagtctagtaaataaaatggaaggcagattctatattcctaaaatgcaaattctaccttagagatatttgaaatttcatgcgttaagtgttgccatcttgctgcttcttttaaaaatacattctctttggagcatggatgttaagtttctttttaaaattaaaaaacatttagattcaggggatacacatgcaggtttgttacatgggtatattgtgtgatgctgagatttgggcttctaatgaacccatcacccatgcccaaatagtgaacacagtactcaagtttttttttctttcttgcctttatttatttatttatttatttatttatttatttagagacatagtcttgctctatcgaccaggctggagtgcggtgttgaactcctgggctcaagcgaccatcccacctcagcctcctgaggagctgggcctacagccatgtaccaccacaccaggctaatttattttattttatctgtagaggggtgggggaaggtctcacaatgttgcctaggctggtcttgaactcctggcttcaagcaatccttctacctttgcctcccaaagtgctgggattataagcatgagccacttcacctggccccaacttcttaagtaataatgctgatcagccttgtctctcttctcccactccctagaatttattgggacaatgggaactctggatacggaaaatgggaatgattaaaaacctgagaaaaggaattggcaaggtggtggaaatgaagagaactctttttgatttataatttttcctaggaccttttgctttgtgtcttgaaagaaagttgaaatagagttgaaaattttcttgagttacggagttaaggcctcattggaatggcaagaatattttaatgctaaaattcattcaagtctctaagatttaagggtgattactaatttcctctttttaatcttgattaatttggttcttcttcatggggcctatttcctaatttagtcttaataattcaacaaataaaccagcatatttattgagtgactactgtgtccaagaggtattgttctagatcagtgtttttcagaatggaatatttgtaccaaaacctcctacaacagtgcttatataagtacagacttctaggccccacaacagactcgcctacctaccaatgctaatctcagaggacagggattgatctgtttctcaagcatccataaataccatggtactagagcactggttctcaaacttgagtgtgcattggaatcacctggagggtttgttaaaacacagagtgcctggacccaccccagaattttggattcagtggtctggggcgggtcctaagaatttgcatctctaacaagtttccaggtgatgctgatgctgctggatcacattttgagaattactatgtacttcttgagaactactttgagaattattatgtactgtagaagtacaatgcactgtagtagagcattgtgagaaatataaaaaagtattagaggccgggtgtggtggctcatgcctgtaattccagtactttgggaggctgtggcgggtaaatcacctgaggtcaggagttcgagagcagcctggccaacacggtgaaaccccatgtctactaaaaatacaaaaattagcaaggcgtggtggtgggcacctgtaaccacagctactccagaggctgaggctggagaattgcttgagcccaggaggtggaggttgtagtgagcagagatcatgccattgcactccagcctgggcaacaagagtggaactctgtttcaaaaaaaaaaaaaaaaagaaaaaaaagtattaggtacaattcctgtcattaaggagcttatgctgtagttgggggagatacaacgtacactataaacatataacaaggaatatatgtatttgacaatataaaatataatacaatataatatttgacattgatggggtctttaggagaagatgggatttgatctgggtactaaaacatgatgaggccaaaggttcataggcattcttggatataaaagaaggaaaatatagaggtgtacaggggtggggtggtagatacttgtttatctagcttacagcttttaatttttattttttatagagatggggtcttgctatgttgcccaggctggtctggaactcctgagctcaatggatcttcccaccttttcctcccaaagtgctgggattacaggtgtgagccaccacgcccagctttgtctaggacacttatgggggcataagaccaaaaaggttggtgcagtctgtgaagagccttgaaagcctgtccttctcctcagctccacccacttcatagccttaccaaaagtgctgcacagccagaaagaggaagtctcccctgctgagtgtgcaagaggaagcacaagaaggctctgagggcctgtgagccataatgactgatttcacccatgagccaattgcagaggcaacagaagaccagtgcaccaaccaggctgggtccctccgccagagggtgtcaccatctaagctgaaagtgtttggggagatcagacattgctgtctggtgctcctctctcagtggccatcatgtctttgacatctgcttaccagcataaattagcagagaagctcactatcctgaatgatcgcggtcagggggttctcatccgtatgtataacatcaagaaggtaagcatgaacaatgggactagtactgattattccaacaataatagggcagggaaccctgaggcggcaggtgcagcagttagactcccacctttttttccactgcttttccactgactataatctacataatcactcagattatacaggccagccagttcaggaaggcagaagtggaggcttcttttcaaggcttcccctttctagatatgattcttgccccaacgatggcatctgctttcctctggggatgggggtgagggtggggatggggaaacaacagtggtattccaagtgacttggataaaggtctggggtccaaccttctgggttttattatttattgttgatcctctacactctgaagagatctgaagctgggtctctggcaaaaacttttctgtggaagtgcttccctaaaaggaaaaaaaatagataattaggtatttagattaaaaagggtaggtgtcttctgagctgctcctggggtagttcatgctgtggtggttgtgtgtgtgtgtgtgtgtgtgtgtgtgtgtgtgtttagaataggaactgaggaattgaaagaagctagtgacaagaggtgggctaggggctgggcaaaccataggaagtaaagagataaagacaggggtgtttatggggagttcctggcatagaaaataggggactttgggggagggagcttttgtgttttttgtaataaaacaaatcaccaggaacacggtttctctgtcaccatgaatcctgtaaatgccctttgggataagatacttacatagtgaacaaaattgtgacactgaatcttgtacaaagtctaactcctgagcagctgcttttcttgttccttccggcttcagttgaggggcgggga

SEQ ID NO: 5851 - DNA, 6000 bp, Homo sapiens
caggcccagctacttttggtatttttagtagagatggggtttcaccatattggtcaggctggtctcaaactcctgacctcgtgatctgcccaccttggcctcccaaagtgctgggattacaggcatgagccaccgtgcccggcatgtttagctgattttttaagaacacacagggtcttatgaaattatataaaaagtggcctgaccatgtttgtggatagaacatagaaagcttccttgggtaaataatatttgagtgaaacacctgaaaggggtgtagtaattaattagataaacgtgttagggaggaagggcagccggagtactacagccgaaagaaaactccaattgcagcatatgtgaaggttctaggttgaggtaagagggagaagcagtgtgcaatgattagaacatgaattttggacacaggctgcctggaattttttttttttttttttttttgagacggagtttcacttttgttgcccaggctggagtgcaatggtgccatatcggctcaccgcaacctccacctacgcggttcaagtgattctcctgcctcagccccccgagtagctgggattacaggcatgtgccatcacgcccagctaattttgtatttttaatagtgacggggtttctccatgttggtcaggctggtctcgaactctcgacctcaggtgatccgcctgcctcggcctcccaaagtactgggattacaagcgtgagccactgcacccagcctgcttggatttaatatacaacattttagctgtgcaacctaaggcaagttactcagttactctctctgagctatggtttttcttattttcaaatgaggataatacaggtatttaccttacagggttattatgagaattaaatcagttagtgtatgtaaatggcttcaaacagtgctttgccacataacaaatgctaagtgttggcaattgatgaagcattctgaagaaattaaataaaataaggccacagtagttgaagagttagtaactatgctggagagacgggcagggatataatttaaaggttttaagcaggggaatgactcctataataaatatctaagtggtgaaatcgctccccctacaaatcccatccgccaagagaatacaagctgatcacatcaagctcctcctttcaaacttccaaaggctcccagccctacttcttacatgacaaaggccagaagtccttacataacttagaaagcccttttcaatatcactctgatttacctttatagtttacctattttcctttccaaactatcttcaactaccaatatatttcctcacttcacttttcaatacaaatgtctcactattctcaacactctgacactactatcactttctcctctcctctgcaatagttccttttctaatgtttgactggatatctgatactgttacagttcaagccattttcatccacagttcaatctctctttccaaatgtgttagtatgggccaggagtggtggctcatgcctataatcccagcactttgggaggccaaggcaagaggatcacctgaggtcagtcaagtccagccggaccaataacatggtgaaaccccatctctactaaaaatacaaaaattagccaggcatggtggcacgtgcctgtaatcccagctactcgggaagctgaggcacgggaattgcttgaacctggaaggcggaggttgcagcgagccgagatcttgccactgcactccaacctgggcgacagagcgagactccatctcaatttaaaaaaaaaaaaaaaagaatgactgcatttctacaaaatcctcagaaatttgctgttgatatgacattacatatcaactcagatacatactatgtttccttcctgcttcaaaaggtattcccttcccctgaggttccataccaaagcccaaaattctctttatgacaatggagagatttttttattttcttttttttgagacaaggtctccctttgtcacccaggctgaagtgcagtggagcaattatcacacagctgaccacagccttggcctcccaggctcaagcaatcctcccacttcagcctcctgaggagctgggactacaggtgtgtgccaccatgcccagctaattttttaattttttttgtagagacagggtctcactatgttacctaagctggtctcaaactcctggcctccgcctcccaaagagttgggattacaggtgtgggtcactgcacccagccaagatttttttttaaggcaataaaaccccaagtcaacccagaagtcaggatcattgcatcaagatcaccagtggaaccaaacattaattgtcctaaaaatcagaatcaaaggcatgagttctttttttctttttgagacggagtctcactgtcccccaggctggagtgcagtacaccatctcggctcactgcaacctccaacccgggctcaagcgattcttgtgcctcagcctcctcacagcctcctcaatagctgggactacaggcacttgccaccacacctggctaatttttgcatttttggtagaggcggggtttcgccatgttgcccaggctggtctcgaactcctggcctcaagcaatccgcccgcctaggcctcccaaagtgctaggattacagacgtgagccaccacgcccagctaaaggcatgagttcttaaccagaggtccatggactcctcggggctacaaggtagttttatgaagcccctcaaactgcatgcaaaatatgtgtacatgcctttttctggggagagggtccatacctttcatcagagtttcaaagatatctgtgacctccaaaaggttaagaagtgctctagagaaaaagcaaagacaagcaaatgtgattaaagagcaagtcctttttaggctgtcaggagtgcctaatgttctcttagactgtaacactgaaatcaggtcagaggactttacgtaaaagttacttatccaatcaaatacaaattttatatagacctgacaaatacagatttgatggaaggaggaactccataaaccaacacaatctataaatgcaagtaagtcatcgggcagctggtgacttactccagggatttcaaaaataggacaaataggaagaaaatattagctcttctatatatagttcctttttatctcattcaaaaattccttttctgtgttatattttataacagtccagaagtatacaatttctataagtacagtatatataaacaaagtggagatgattgctcaattttttttaactcatcacaataaagatcaagagaccgctgatatagtctatgcatttcagtatcatcaagttaacaataactccagaataacacaaaaacccactaacagagtttagaatccaagagtaagaaaaacatcagtttcacagaaagactaattggggtcaactaataagtgactaaagaagggtcctctccctacccttactacccttaagctttcttaacagcaacaaaaacaaaaaaaaacttttcgagctttaaaggatcacttttcagtttcagctatatcagcctggtttgtccaaaacatctaatgggaaaactacttgtgaaaccacaaacagacaattactcaagatatcttaatttaccctaaaagaaaatactttttaaaatgttcttctttttaatatatttttttaacttttttatatatctaagtgtgaaaaaactaccaagagtctcataagacaatttaaaatagcttctgtgattcagtgtcagccaatggtaacaccaggagatgcagggcccacccgagatatgaaatggaacagagataatcttaaccttggaattgtttttcccaaatattgcaggtgtgagttctctctggtggttggagatggtgtgtgaggaaggctggcgggccgagagccgcgtgacagaactcgaaaacttttaaatctgaggtgtctgtacttctactattctcaagacctcctcaaccccaggcttctaaggcgagaccgatcttctgagaggcctctccctgtttcaaaattcggcttggggcgtaatcccacctagaaaaggggagtggaagtattttctgagtgtctggtacctatttagacagaaatacacaaaaatgccaccatttgctaacagggaaatctcagcttcggacgacagactggaaacatcatcccagggaagaaaaacggatcctggctccgacatggggcaaaaaggagggaccaactgacgtaatgcagccctgaaaagcaacgaagagtataacaggtagaaggcacttacacaacccagtggggaagggtgacggacgatacaatgatgaaggaagcagaaataacaaataaatatagcagtaaagccgtgaggagaaatgggaaattagggaaggcgtagtgtggaagggtggcacaaaagagctacggcgggagccgagaaacgaagtggaaaaggctgcacggagaagacgtaggagaaggcgcaagctaccctgtagaattcagttcctagaaaagtccaactcagcccttccccgattcacggtacctttagcttatggagctccaccgtctcggtcgccatcttgttacccctcactccactaggcccccacccgcggcctccgcctccaggagctcccgccttaggcgtagagatgcaaggctgaccaatcgttgtcactcttgctcccacgccataccatcagctcttcccattggtcaatagctgacgtcgctctcacttctctaggcagcttgccccacctctttcaaaaggtggaactgggagaggggcgggcactgtatcttgcgaacgacagaaatggcaaccaactgtgcttctgcattacagaccaccaaccaatgggtggtggcagcgctgattctgttcctccaataggaaaggggcagaaggagaggcgttacttcctggagacttcaggtgtggtagccggcgccgcgcccatagccggacggggatctgagctggcaggtaggagctgcaaagactgtaagggttgctgaggaaaaatggtgggaggcgaaaggggcgccgagggagtggtgacctaaatactgagaggggagcgctgaagggagccctgaaaaaaccgatgaacatgaggaggaagctgggaggggcatggggcgggcttaaggaactggcggtggggctggggcgggcaagagccgcttcctaaccagacatcatcagctttagagctaccacaattttaaagatccgagttcagataatcactgctgcccctggagtcagagccaaggctccacctttcgaggtattgagctcaggtcccttcctaacccagtccagaagccgtgggcaagttgttgtcgtgccccacgcttgagagaagtaatggggatgcagactgtttacatgccacggaggtgagagagagggtggacaagccccagagaacaaagtggggaccagagtgagctttactctgtcatcccttcttagtggttctttgatgattccatgactttcgcctggaattctgggtgtacgtgacctcttcatggttattaacttcttcagcaaagtcagatactcctatttcccttgctccctgaagtgagtgccccaagcctacacatacaccttcatgttacagttgacgtgtaaagatcagagcaataatgactatgtctctgaaatgtagtgaggactcttcttgtcttttaaagttttccccaagtcttcagtttttattttctgcgtgatgggtaagttcttcattcccaatagagttcaggggattggggctatctgagagacaactgggagatagctcaagaggggttgagaaaaaactgagctggactcctgcctgatcccccattacggctaggatgaatgtgggggtggcacacagcgaagtaaaccccaacacccgagtgatgaatagccgaggcatctggctggcctacatcatcttggtaggattgctgc

SEQ ID NO: 5852 - DNA, 6000 bp, Homo sapiens; identical to SEQ ID NO: 3233

SEQ ID NO: 5853 - DNA, 6000 bp, Homo sapiens
tggcatgatctgggctcactgtagccttgacctcccggggtcaggtgatcctcccacatcagcctcccaagtagctgagactacaggcgtgcttcaccacacccagctaatttttttgtattttttatagggatggggtttcgccatgttgcccaggctggtcccaaactcctgggctgaagtgatcctcccgcttctgcctcccaaagtgctaggattacaggtgtgagtgaccacaccgaacctatctggacttttctgaggcctccagcagtggcccagaggatgaattcaaggctttagctactttcttcccttgcagattctgtatggtttattctgaggttcctaacttcagtgagccaaacccagagtacagcacccagcaggcacccaacaaggcggtgagtcctgtggccacaatggtgggaaaggagggcagatcaagacaagaagcatgggagggagcaggatctgaatatgtaatctgtgccttcaggtgcagaacgacagcaacccttcagcttcccagcctaccactggaccctctgctgcctctccaggtaaatctgttcccttctatccactggtcctcctagctctcccactctcctcagcctagaaagatgcatttccctcattccttttccaaatctctcttttctcagtgtatcctccttcacccaattctcccagacccctttttttttttttttttttttttttgagacgaagtctcgctcttgtcaaccaggctggagtgcaatggcgtgatctcggctcactgcaacctccgcctcccaggttcaagtgattctcctgcctcagcctcccaagtaactaggattacaggcacctgccaccatgcccggctaatttttttttttttgagatggagtctctgtcacccaggctggagtgcaatggtgtgacctcggctcacttcaacctctgcctcctgggttcaagtgattctcctgtctcggcctcctgagtagctgggatcacaggtgcacgccaccatgccctgctaattttttgtattttagtagagacggggtttcaccatgttgcccaggctggtctcgaactcctgagctcaggcgatctacccacctcagcctcccaaagtgctgggattacaggcgtgagccaccgcgcccagccatgggctgcagatatcttagtccagtggagcagcagggttcagtagagatatggtttaagaactagactggctgggcgcagtggctcatgcctataatctcagcactttgggaggccaaggctggcagatcacctgaggtcaggagttcaagaccagccatggccaacgtggcgaaaccccatctctattaaaaatacaaaaattagccagatgtggtggcaggagcctgtaatcccagctacttgggaggccgaggcaggcgaatggcttgaacctgggaagtggaggttgcagtgagctgagatcatgccactgcactccagcttgcgcgacagtgagactctttctcaaaaaaaaaaaaaaaagaaccactaggctataacttccatgccatttagggttcatagtccctactgtatgcaagaagcaaacctctgccttcatataacaaatgtttctagagcacctactatttgccgtggaataaaacacactacctgcctttaggggcttgtggtttatacaggagagagataatgattataatacgccatggttaagttcaatgacagtggtatgtccagagttgtgagagctcaaacaaatcatcccacacacctggcttcaaacattgaaaatataagccagacgcagcggtgcacacccatcatcctagctacttgggaggctgaggcaggagcattgcttgagcaaggagtttgaggctgcagtgagctatgatcacaccactacactccagcctgagtgacaaagtgagacctcatctctaaaacagtaaaaattaaaaaataaatatttatatacacaaaaatgtgacttgttattagctttggtgggtaagattacgtgtaataatcttttcactagctgggcgcagtggctcgcgcctgtaatcccagcactttgggaggccgaggtgggtggatcacctgaggctgggagttcaagaccagcctgaccaacatggagaaaccccatctctactaaaaatacaaaattagccaggcgtggtggctcatgcctataatcccagctactcaggaggctgaggcagaagaattgcttgaacctgggaggcggaggttgtagtgagctgggatcgctccattgcactccagcctgggcaacaagagcgaaactccaactcaaaaaaataaataaataaaaaataataataatcttttcactgatggttatctatattttctaaaatgaacattatcattatcgtacactcatacacaccttttttttaagtgcctcatattttaacgcagagacttcaggcccttccccttgccatgcttctccagttttataatcacttttggtgaaggggccttttttttttttttaattgagaaggagtctcacactgtcacccgggctggagtgcaatggtgcaatctcggctcactgcaacctctgcctcccaggtttaggcgaccctcctgcctcagcctcctgagtatctgggattacaggcgcctgccaccacacctagctaattttttgtatttttagtagagacggggtttcactatgttggccaggctggtctcgaatgcctgacctcgtgatccacccgcgtcagcctcccaccgtactgagattacaggtgtgagccaccacgcctggcccagtaaaggggcatttttgtcagaggtccctgagcctagaactaaacagctaattctaggtctgattcccaataatagtgagataactacaagagaaaaataccgtaccgaggttcatgtagcaacttcctaaatgatcgtgtaagtcttctctggagctccattcatactcgcagcccacagtcttttgcatttggtccagttggcattaagatgcagttgtgcatggtgaagactgtgccactctttggggcatggagacaggccttgggatggacccctctcctatgttaactaattcctttgtttcttctcctcccacaattagcctctgagaaccagaatgggaatggactgagtgccccaccaggtcccggtggtggcccacatccccctcatactccctcccacccacccagcacccgaatcactcgaagccagcccaaccacacacctgcaggcccgcctggcccttccagcaaccctgttagtaacggcaaagaaacccggaggagcagcaagagatagcatgacattctttcttcctgccaccaaccacatcccaagtgtcccctggagagcaagatagccttccactgattggctggtgtagcagtattttagccactgaacttcagtggagggtggtgagcagtgtccttatccaccctaatctcatactccctcattgtccagctgaactacctgtcccctgggagtcaggaccctctgcctgctctctttcctctttagaaatggcagttactggctgggcgcagtggctcacgcttgtaatcccagcactttgggaagccgaggtgggcggatcacctgaggtcgggagttcaagaccagcctgaccaacatggagaaaccccgtgtctactaaaaatacagaattagccaggcatggtggcgtatgcctgtaatcccagctacttaggaggctgaggcaggagaatctcttgaaaccgggaggcggaggttgaggtgagccgaaattgcaccattgcactccagcctgggcaataagagcgaaactccatctcaaaaaaaaaagaaagaaagaaagaaagaaagaaagaaatggcagttaccatctgtttcttctgtgtgagacatgggagtctaactgaagtctctccttcctaataaatgttaccactctactctgtgttggactcctttgctttctgtgggaaaaggaagaggttagcaactaggcatttgggaaggtggggtgtccctagaaggtggaaggaaaataggttacaggtaaggaggcccaggcaaagcagacctgcccctttaaggtagtgtccctcccctaccccctccctgcaggtgacccttgcccgcctgcctgcctgcccccccagctggaaccaagaaggttgtgtcccccttcctctgggtgtccttgtctcctgctatcaggtaatgccaacctcaaccccctggaccagtcaccccgatcagactttgcttgcctgattttaggccaggtcagacatcagaggagagcccagatccttgtttcctctccccccgcagggcttcccctttcttggtcatcgatccctagagctctggctctttctcttcttggggtgagaaactgctaagaacagtttatttcccatgcatgcatctgggcttgccactgatctgccttttcccccctcctccccaggttagggacacctgggtccaaccttcccaaggaatatggggatgggggttggagatgaagtttagtgctagactgtaaggtaggtggggtggaagtacatgagggaaagggctaaaatggtactaatggtgttaaggatagggtgaattatttaagaggaaaaagactaggcccaggttctccttagccatgtggctttcccagggcagagggtggcccctccctacccaggggcccagcagagactgacttttgatccctaccccagagaccagtgaaccattaactcctctcttatgtgagccttcacacactggccccacccctgaccccgccccaaggcaggtgggctaggagggggtgcatgtccatctcagccttctatgtgacgtggcctccgatccacctggacacctggaggctaagcctggattcccccttccctgactcaggaactgcttaacgtctacagcaaggcctaataggggacctgaggtgacagctcttatgttgccagtaggggtgaggccctggggattgaggggggataaagaggtggggcaaagttgaggggtggggtttaggggacaaggaatggacggtcagctctggatgaagtatgaggagagctctgactcagggaggtgctccaggaaccagcaaacaagaggctgctcccgcaggaggcagtgtgaagggagaaagaaggctgcagtaggggctgctgctggactcggtggggagcaggtgcaaggagctctggctcccccatggacctgagctggagagcagagcgcagctccagcccattcctcattcttccagggcacagtcctcaggatgtttcggggagaataggagccagaacctgagcccctaagctattcccctcaccaatgatggggtccccagtgagtcatctgctggccggcttctgtgtgtgggtcgtcttgggctgggtagggggctcagtccccaacctgggccctgctgagcaggagcagaaccattacctggcccagctgtttggcctgtacggcgagaatgggacgctgactgcagggggcttggcgcggcttctccacagcctggggctaggccgagttcaggggcttcgcctgggacagcatgggcctctgactggacgggctgcatccccagctgcagacaattccacacacaggtactgaccccttcctccactccacagggccacatctcccaggtcctctcagtgcttgcccccagttgcctcgttctggcttcctcacgagatccctggagttacaaattcttcagaaccgagctccttggtatctcttcaaaacctctcatgcttctattgccttctctctcttttcttgagactgggggtctcgctttgtcacccaggctaaagtgcagtgacacattcacggctcactgcaacctctgcttcccaggctgaagccatcctcccacctcagcctcctgagcag

SEQ ID NO: 5854 - DNA, 6000 bp, Homo sapiens
acagcagtcccctgatttggcgtcccaccctcctgacgcagctgagactataataagtgctgccgtgggcggctcttggaggcaggagcccgcagcgtgcttggcctggtggggggctgagggtgggggggctgagccaggatgccaggagccctttgttctcccagaggcctgtatccaatccctccaatgttctgtcctggggctcagcagtttctccctccctccctacagaaccaagatgacaccatccccaggacaggagacccttcagtagtgttttttgatggagagggtgaaggagaattgttggctctggcttaaacttccctcctttgatggcctcggttttcctttatgttcaatgggaacagaatactaattcttagagaaggagtaaaacaaatcacttatgaggagtgaagccttctcagggatttccacctccacccctcctcaccctcctccctctccagagctaagcacagcttttctgcctggcctaaaccgctcttctcctttattattattatcattattatttttgagaggggtggggcttagagtttctccctaggaggccccatggcccactcccccttggtctgcctttccaaacactaaggctgtcaggggaagcttcaggtgtagttcctggcaaagggtatgggacaggaggtgagaggggcactagcctccgaagaacaatgggaaggggatcatcagactgtcccactaggcatccaaagcaagctgttccttccccaagttatactctggtgtactagcagagaggtctggcaggaggtgtccttgagggaaagaatgatctcttgacaaccacccaggtaggcaggtaacaatggagaagactgaaatggctggaagagatcaggatatgatggaagaagtgtttccaccagacacctttcatgagcaaagaaggctgcttttgttagctctttgctgcatcagaggtgaatggaatgacagcgagctggaacaacctccagttccaccagttcctcagtggtagggccttgtggatggagagaagctgttcctgccagggctccaccacaggactgaagcctggggtgggcaggaggatgtggcggatggtgttgccatggcagcatttcctccctgtgttgtcatcacttgctctaatggcactaaggaggtagagcggaaggtgtgtggggggaagacaggaacaggagcaaggggaggagaggggaccaagaagagttctggggacctatctgcactttggctctgcagagcatagtgtgtgagagttagtatgcgcttgggagcctgagattctctgcatggtgtacttcaatgtgcatgcgtgtgtgtgtgtgtgtatgtgtgtgcatgtgtttctctctacagctggagaacaagaggtcactgatcctttgtgggtcctgggaatgaactcattatccagtcccagaacctgctgccccagactgcttcctgctctggactccccaggcagggaacaagtctaccatgagtctgtcacagcctatcttccccatgctcacacatttcttcattgccaagaaggtcagctcaacagggacctgtattttgatctcctgggagaaggatcagagcagggaaagagaaagaatgatacctcccatgtctttttccatcctccctaaatgtattctttcccagagtcccatcttggggactaggaagtagctgactgggaattgatatatgatacagctaaaccttctatgcacctgctagtccctgatacacccaagttgagggctgacctttctcttacctcgaatgctgtccaatgaggcctggatgctgtcctggagttcggggtcgtccaccctctctgccagcttcctgaggcggtttagagcctgcttggccacctcatgtcgtctgacttctgctctcactgcagctacaacgaactgcctctgggcatgcatgttgcccagacctgtcttgccaggctaacaaccacctctggccctgaggcccatggccctacagcccccaaacctcagaaggccccttctgctgtgcccagaactccccgcccctgcccgcccttccgtctgtcgacctcacttcctgactggtgagtttcaaacccacagcctgggacagcactacctcctgcacctcccaccccctctagtgttggcccatcaaccctgccagccagtccctgctatgatttcccagccaggtggatggagaaatcttaacagtgtcccagggcctcctgtgggaggtggctaattaagatgggtgttggttctgggagaatatggcaagctaggtccgaggtgcaatcctaaactcttgatgacctgcggatttcaaactctcacaggaattcatgcacatttggtctgttaccctcacagccctgcattctagtatacacttgtacccattgccctctctacacatcccaatgagccctgtatccttatgtcttacgatgtaaccctttttcaggcagctacccactgaggccacctcctgtttaaaagggccaagtgaggccaggcgtggtggctcatgcctgtaatcccagcaccttgggaggctgaggcaggagaatcacttgaacccaggaggtggaggttgcagtgagccaagatcacgccactgcactccagcctgggtgactaagcgaaactccacgtcaaaaataaataaaataaataaataggccaagtgattatggggaaaatcagttatgaaggaggaaagtaacctataaaaagacaaaaactaccatgttccatgtccaatcgctttcataataattaacatgactataacacttaatagtttacaacatactttcatatatatattatcctcatgacagccctgaggagtaggattatttatccctatttgcataaaaggaaactaaggctcagagaagccattaagaggtgaaacaaagacatggatttaggtcttctgattttatttttacatttttatttttattttttaccaagcacataaagcccagattggttataattttgatacccttttcactacaccacacaaccaaaatgcttgtcaaccagttccccttctaatatcattgtcttgcccttgatttaggacctcaaagaaaagaaggtagatgaggaactgaaggagacaatgaagatgggacttggggtaggaaggggatggaggtggggagtgagggggtgggaggtaggaggtagcgggtagtttgacctaattactttgtttccaccggacgcctgtaatcgtagcactttgggaggccgaggcgggcagatcacctaaggtcaggagttcgccaccagcctggccaacatggcaaaaccccatctctactaaaaatacaaaaaaattagctgggtgtggtggcgggcacctgtaatccagctactcgggaggctgagccaggcaggagaattgtttgaacccgggaggtgaaggttgcagtgaactgagatcgcgccactacactccagcctgggcgacagagggagactctgtctcaaaataataataatgataataacttaattaccttgtttcaagacccaaacacctctctcgccctgtcaaacatctattctcctgcatacctttttggtattaatttctgtaagagtttatataaatactgtgtagttaaagataagggaattgaggttggaattgcccacaggaacctgtaaaatgacctgaaaagtaataactaacattgagtgtttactatatgccaggtactgttctaagtattctacatatattaactcatttaattcttacaacccaagaggtagggtgtgttgttatttatccccattttacagatgaggaaacacgcacagacagtttctaagtgcctggccaaaggttacgcagctaggaagtggcaatctgactgtggcagtaagtctatagaatctaagtacacacaaacttaaatcattctgttgagttgattggagggttttcttttttgttcctactgtttctttctcctggggaagagaaggattatgcctttccctacccccgtgagaaggacggtttgtcaaagcacttactagataataaagttgttgatcagcctacccccaagtgaaaaggtggaggctccttccacttatatttatgtaaatgagactcttcctcttgcctgccgtttttttgcaagccctagatcaggcgtgtactctgaaaatgctgagcacacccctctgtgcacttgtggcaatgccacatacaggaatgcgctggcctgaggccgctatttccacactgaatttctggtatattcacacccctttaggaggagatatggaacaggacatgggtactagaggacacacaaacgtgtgatgatttgctgggtgttgctgtgtccaacccgcggactctgcggccgggctaaataagctcaatatgtggctcctttgggtgttcccgagcgtgacgcaataacaaaacaatggcgtcatcgtgaggtcactgcagaacagggggaagggggtggggaagggccctccttctacgggcggagccctttttgcccagctctcagagcggccccctacccgcccctcccgccgtctccccttcacctaagttcctccagagccgtctccctgggaattagccctctcctaactccgaccacagaaagctcagctttcaacctaagcttttggagtttaggctgtagtccctaagagagtctctagaaaccctgcccctagttttaagtttcgcccaatgaaaaaacaaaaggagagggacagaaggcgggtcggtgacgtaatgcgggttgattggcatgcaggccttggacgtccaggattagccacgcatttcgccaatccagaggcaggggagggacggtgcaggcgcagagtattgggtttggctggcctcgatttaaagagacagaagctgtcggggtcctggaagacggtccccaataccctccccccaagtccttgggaccacttgggtccccagagctggggagatggtttgtggcggctttgcctgctccaagaatgcgctttgcgctctcaacgtggtctacatggtgaggttttggaggtgggggaagcttcaaggcggaaaggccccgtggggagaatctctagggtacttccggtggggagaggggtgtatgggggttccgggaagattcccaggaacttccggcgacgagggaattcctggggacttccgtgggagagaggagacttccggttgattaagggggtttgtctgagggtgggggaatgaactgaaggccgtgggcgtaagttccatacctccttcctgtgaacctcagtttcttccaaactggaagtgataggatgatcctgagggttcatcttttgcattcatactaccatccctgccaccccctccccgccatcctagccattctaacctttgggagtgcctagggatgctcccggtgcggatagcaccatccccagctcccattcacacactattccattattccttccccctgccccgctcccaagtcctcttgtatggccttgggctgtgccgcatgctagaattgttgagatgtatcctgctctttcttcgtagctggtgagcttgttgctcattggagtggctgcttggggcaagggcctgggtctggtgtccagcatccacatcatcggcggagtcattgctgtgggagtcttccttctccttattgcagtggctggactggtgggtgctgtcaaccaccaccaagtcctgctgttctttgtatcctgacctgaagtgatgggggcaaccgggggcttgggagggctgtcatctaaggaagatgttagaagggtaggggacctcagggatcttggacacgtctccttgccctgccctgtcccataatctacgaaacaagagctgattttattgctttcaatttgacatggtggtgtaagttct

SEQ ID NO: 5855 - DNA, 6000 bp, Homo sapiens
gttttctgatagaaggtagaaatctccttcctgctgttcccaggtttgaaatgttgtccttctagtgagcagggtaggaaggacagcaacctggtgctccccactcagctgctggtgggctgtctctcaggctggagtgaatggggttggtaaaccaaaggtcagaaaaacatagtgtctctggtggagagtgaagatgtatcgaagaagtgttaggacaaggaacacagagctacttttccacgctgcagcaaaatcagagcaaacatgagtgtgtagactggggcagagtggaacccagtcaggcagggaaatctctagtctaggatgatgggcagatacccagatataggaggaaaggtcaaggtggaaacaaaattaaacaataaaataatttaaaatttgagaaattaaattagtatcaagttgatgcctggcattattgatatattttattccctattgtcaccaaacctggaagaggccagcctacaggtctttagggggaggcaaagggggaagaaaaatggacacaatgagtaaagacaaaatgttcctaataattttgttacttctaatttggtgtggtacaggtatgccatcaatccccagaggactgtgtgtgcttgttgatgtgttttaggggagactcacaatcttgactagtacaggaaggtatggggaaaagaaaaagagaagtttttcttttctctgtgtttaggatgatggttctttccggtcatcttccataagtgacaagcaggatccaacaaactgattttagcagctcctatagctttcatttaggttatatttaactatgggatcatttttattccattcagcaccaacttcattatcagtgtttagtgtttattatgtaacaataacaaattctaaatataaggacttgaagttgtaaattctgtgatttaatgtgacatttccttggagaggattttcatagtgaatcttgatgtttaaagaatgcgatggaaatgatctatttcagctttgcctcttacattaatgggtttttttgatcctttataggaaatgctggtggtgaatagacctcactgttataaaatgtgtatagaagcttgaaaaaggaaatacattttggactgtctgtaaatagtcaactattatgcattatttatgacatattttgtggctatataaatgctattgatcatgatatttttatccaacaacatgtggttgatatgattcccacctgctagtcgtatagtataaatgtttgctttaagagtatatgaactgggcaaatacagggaactaaataacatacatagtttatgaattgaaatattagttcttttatatttgaatatacaatatacaaggttctgttttcattctgtctttgaaaaaaatcttcatgtgatttatttgcaatattgagctaaattgtaccagttttataggaacatattttgttaaatagcataaaaaattttaataatttaatcttcatgaatgaaaaattatctaaacatataccagattctctgaggatctcatatcataacttttatggaaactaaattgtgatttgagaatataataaaattctaagcagtcttaaggaactaagaattggcctttgggagcctctagtatttaattgttaagcacaggccctgtctgcttatataatgtaatttcttcaagtgattctttcaaaaagaacttttctttttttttttttttttttttgcaggggagggtccctgttctgtcgccatagtttttaggagcttggaaaagttgttgaaacactgtccatatgtttattacttattttgaatggcagtagcattttcttagagcagggaagaaatttgtgttttacatgctaagacagccgataagagaactattttagtgtcatagaatcaaagtatgggagctcagagggactcagaatactaagttctgcactgtgttttttacaaataaagaaactaagatccagtattattatcgcttggccaaaacgttacaacactttagtgacatttactgtgatatatgtttttaaataccacatagggttatatttttgcacatcacataaagcaagttactggatattgagtcatcttaatcacttggtcattttacatttccaacagtcgcttttcctttccatatccaggttagtagcatgttttgcagtataatactcttaaaaacattaaaaagatcatttagttccagttaatacaaataatagtaccatcggttctttataaaagacatgcctctcgctatatacttcattatagaaaattcaagtttatcagacctgcatgagaccacaccattgatctcttttccctgctacattcccgactatttttttaaactgaaaagacttactggtgtctgacttaatccttcaaaaagattttaagagatgctaagcaaaatttctgttaggaggaataagttcaagaaatttattatacatcatggtgactgcagttaataacaatatattatatatttgaaaattgctgagagtagattttaagtgttctcatcacagaaaataagcatgtgaggtgctatgtacgttaaataccttgatgtagtcatttcagaatgtatacatatagcaaaacattttacatcataaatatatataatttttacttgttaatttaagaaatatattaataaaatcatataaactaaaaaaaaatgctaaagtcatactcttggtttgatcttttccttggcttagtgaccttgtttttacttgtcctgagtgtcttaacttgagaatcttttaccaggctaaagctaagtggggggtgggggcagaaaatatctttcaatcctgcaagtcctgtaacacctaccccttttcctatttttgtccctgctatcctgctattatggccttattgcttccatagtaaccttctaaatgtagctaattaccaccaactcatgcaagcagcaacatctccaaacctcttttcccagagccccaaatacattgtgtacattttctgcatttgaagatatcagggaaaagttttaccaaatattttgttactgtttaacataacttgccatttttctaacttcttctaacagattcctcactattgcctgcccatccttgaagccaatgtgtttctcaggattttgttttatgcaccctagctcagattttgctattctgtcaaacaactgcaatctcttagggcttacaataacagatatttatttcttgcccatgctgcttaggcactatgggtcagctgtggctctggttggttctgaggggctcagctaaccgtcaaacattttcttattttctgggatccaggctaaagggacatgttcttattttggaaagcaaggactgctataaaggcaaaacatgcaaacacattttaaacatactcttggacatggcctacactgcattgacttacattccattggcaaaaggcagtcacatgtccaaacctaaagtcaatggatgggggctatactttgcctacagagaaatatgacaagtatgagtaggggacaaataagtattaacaaaaataaaatctaccaattcaattcactcgtaagtgtatggtagaagaaagacctggtaactttattaagttcctatgaattctacattccttcccttcaacatggctctttcataatcctgattattggtattattttctgactccagtggatagttaacattctgtgggttccagctttcatttcctcctcttcttttgataattaccaactaattgagtgtctcctgaagtcattggggaagcacatagctggaatggtggaggcagaaaacccaggcaagtgaccacgaggaaagccattattagaacaagcaaaatacaagagggtggagaaggagtggcaatatgaccactttaaggagttcatgaatgaaagatagtaagttggtaggaagtgtatggcttttaattcattaaaaacatagttctagagtgagacgaatactgcggtagactttaagactttgaacaagatatttgacatctttgaactttattttcattgcctgccaaatgaagacaatagctaaaagatagtattatgtgaaaatgcatattaaattgttaagtgtcttgcttattgatacttacctgtaccataacaggtggcagcaatgttttatatatatgcaattggtaatcagcaaatgttatttatatctaaatttttatgtggtgactgtctgtgagtatcctctttacaattatgcaggagtctcataatttcatttaggtatgactaaagacaaatcaatataaaacaaaaaaggagaaacttaaaacaacgtaggtaagatctgtaaataaaatacagcttccagtttcattgtgtttccttacaaaaactatatttgaatcagttgtggactagttaaaagcaacctatttttcaaagcagacataaaaatcaaaattagggcaaataagtaaatgtgtaatattaatttaagtactgtatatattatgccattatagtggtattatatcaacttaatataattaaggaattataattttttctgcaatccttatcctaattctatagcctatgtttatgtttttttgacatgtgtcttttatcacatatttggaattatgctatcatacaggtttatatcactatttttaaactaaaaattatataataaatacttccctttgtattatggagctttcctaatcattatttaatgtatatataatagtttatcaagtgaatgacagtaatatatgcaaccgcttctcagagttggcatttagattagttttcccatattatgattactcaagtgagctaggggaaggggtcatagaatcctgagactagctgacaaagtgttgagtgacaaagagatagatggaactaagtatgttcaggattctaaaaagagcaatggttcacaaggaaacttctgcctcaggtggggagaggagtccatagatcagggaaacttatgtcttggtgaaatggaagaccatgtttctaaacacctgtcgccaggttggttcaccttgctgtggtactgttcttaatcctgcctcagtgatactgtattttttagaaacttaagggattctaacatctttctgaatctcatcattgatatcaggagatcctgtggggttttttttatttgattttttaaaatgggcattttaatataaaagtcagaaaggtattctttggccatgtaatcttcctagaagtatccaggaatttttctttaactcctcttccgtagtgccagttaatgatctaatgctttcaaattgagaaaagaaccaaaacaccagagaatctttggaaactaatgcaaaatggaggatccaaaatctcttaaatataattctgtttttttcctaagttgaaaggtgagaaaagtattattaagtggcttcccagctatgctctaaggaattctaaactttctaggaagaaccagggacaatttcaggagtcaggggatgctgataagtggaattccaggctctctatgatgcttccaaccccataaaccagagtagctggtttgcatagcaggattctgagtaagatttcattcctagaaaggattctgtggctttaaaagctttagaaggagaaaaacaaaaacaaaacgggatatacacacaatgattgttatcatcctcttttactgtagagccatatacgtaatttccctaagccatgactctgggagagaagaaaagactgcacacatggtaacatgtaaaactctcagataaatttttccctaaaggacatgaaaatcatatttaaaagtttgggctgactctccttttcaggaggggagcactgttcagcactgttcaggcttcctatgtaagggaagaaaaaaataattttctttctatattttctgagttcttagctgtgacccca

SEQ ID NO: 5856 - DNA, 6000 bp, Homo sapiens
tacactaaactagactgtgttagcctaggaaagcttagaataaataatttgttcatatctgaatatcctctaaactgtatcctagctatcatattgtgtattgtattactctgtgattgatcatctaccatgtctaggtgaagtggtctctagggaaggggctatgtataggactagtccagctttatgtatataaggctaggactggaagagaaagttaagtttccagaaggtctgatgttatgcattccagaaggtctgagtatttggaaggcttagaaacttgcactttcatctcttggctgatattgcaactaattcctttatgtatcctttagataaagtaaacccaagtggtgtctgtgtggtggtatttctgctaatctgcaccttctattgatatgtatcaacacggaggttatacagggtgatatcaatagattggcagtaattgaagccattggtgtgcaaaggatcaaagagaataaagaagacaagcaagtgagggtggggaagacagcagagaatagaattctgggaaacactaataattgaggagtaggtgaaagaaaagtctaagaggagaataagtaaatgtgataaaatcagagggactgaacaactagaaaggtagattgaataatatttgtatttcatcattaaactaagatatttcagaatgacattagacaaattttcttattacatgtaaatatatactcattgttaaatagatatattttctaaaagattcataacaagggctcagaaaaagacatggatttcctaattttcaactagaaggttaaacactaggacaaaactcactgataattctgttagaagttaatacaagatggcattagtgatgactacaaatttaagagttctcttttctaccacctatttaaaacgtttactcaaagctaatgtgtgccaggcatgctttacctacaatatttcatttaacctcacaactatcccatgaagaaggcacttttgttttcttcttttaaagctatggagaggttaagtagtaaagattggtgaagattagaaaggctaaatgttgcgggaagtcagggaccctgaatggagggaccagctggagccatggcagaggaccataattgtgaagattttatggacatttaccagttcccaaataatactttcataatttcttacacctgtcttactttaatctcttaatcctgttatcttcgtaagctgaggatgtatgtcacctcaggccactatgataattgtgttaactgtacaaattgattgtaaaacatgtgcatttgaacaatatgaaatcagtgcaccttgaaaaagaacagaataacagcgattttagggaacaacagaagacaaccataaggtctgactgcctgtggggtcgggcaaaaagagccatatttttcttcttgcagggagcctataaacgaacgtgcaagtagggaagatattgctaaattattttcctagcaaggaatattaatattaatactctaggaaaagaattgcattcactgggggaggtctataaacagctgctctgggagtatctgtcttatgcggttgagataaggactgaaatacgccctggtctcctgcagtaccctcaggcttactagggtggggaaaaaccccaccctggtaaatttgaggtcagactggttctctgctctcgaaccctgttttctgttaagatgtttaccaagacaatacgtacaccactgaacacagacccttatcaggagtttctgattttgccctggtcctgtttcctcagaagcatgtgatctttgttctcctttttgccctttgaagcatgtgatctttgtgacctactccccgtttgtacaccccctccccttttgaaacccttaataaaaacctgctggttctaaggctcaggtgggcatcatggtcctacggatatatgattccagccccagagacccagctgtaaaattcctctctttgtactctttctctatttctcagccggccgacacttatagaaatagaaagaacctacactgaaatattgggggtgggttcccccgatagttaaataatgtgctagagtcacccaggtagtaaccagcagaactcagattcaaactagagctttccaacttcagagtctgaagcctaactaccatgtaacaatgctgtgaaagcattacttatggtaataaatggttaaatttatcaggcatttattaatgtaattttcaatgaagagagatttggtagccacggaggagttttatacccacaccgacatttataggtatgctacaattttgaaagtatttcttgagatacttgagaacaaaaatatgtatttgaatatttggttttgctattgaaagagaaattattcagttttttgaaatgctaactcttaactttagctgatttgttaacttgtagaataaaaaattatttttacctttggtaacttgcttggctttggcataaagccatgcattgtttctggggcagtataatctctcttggcatatgtacataaaaggctattgtgtatttttttaaaagaaatttacagaatacttgatataagtacttgctacacattattattttattttattatttttttttttgagacagagtctcactccctcgcccaggctggagtgcagtggtgtcatccccgttcactgcaacctctgtctcctgggttcaagcaattcttctgtctcagcctcccaagtagctgggactacaggtgcctgtgaccacgcctggctaatttttgtatttttagtagagacggggttccgccttgttggtcaggttggtctccaacgcctgacctcaggtgagccacccgcctcggcctcccaaattgttgggattatgggtgtgagccaccgcacccaggtgctacaccttacttttaaaatttggcttttcaaatcattagaagtattgttttcaatcaatgaattccaattgcatgtcctcaactctgaacagagatgtaaaagattctaacgattttgagttaatcatgccaaagttaccaatagtaaaaaatccaaaagaaaagttggctacatagtgaaagtcagagaatttgatcctatatcactagcccaattactaaagcatcatttttggccaggtgtggtggctcatgcctgtaatcccagcacttcgggaggtcgaggtgggtggatcacttgtactctggagttccagatcagcctggccaacatgctgaaaccccatctctactaaaaagaacaacaaacaaacaaacaaaaaggcctgcggtgtggctcacgcctttgtaatcctagcactttgggaggccaaggcaggtggattgcctgagctcagtagttggagaccagcctgggcaacacagtgaaaccccatctctactaaaatacaaaaaattagccgggcgtggcagcctacgcctgtagtcccagctactcgggaggctgagacaggagaattgcttgaccctgggaggtggaggttgcagtgagtggagatcgcgccactgcactccagcctgagtgacagagtgagactccgtctccaccccccacccaaaaaaagcgcctcgtttttacaagctccctgagacctcaagaataatgtctgccatatattccatttgaacttttttgctaaattcaccagttttcatacataaagcttataccataggaggtgtcaagtttcccagaagttgtgtaataggcacaaatgatcaaaattactgccctaggagctctctactattacctcatctgtcccctttatccatccttgctttgcttcttatcagaaggaaaaataaaataaaattatttagcttacaaagtagctctgttacagccaaacagcgctatccactgacaatctcatggctcactgtcttccatcatgtcataagctcagctgtctgaaggtgttggtttcttcatctctactgtttctggtttttcctccctcattttctgctttctgaccagcagctgcaaaatgtcttggggaaaaagtagaccaacctggatcttggggaaatacagatgaagatttttctgtttggcttttgcctcatatttatttggcacttcagacctgatgaaggcttttatgtatctgtgccttatttgagcctcgaaactctgattttataatagaagggtattcattcaacaagtatgtactgattacctgctatatgccagacactgttctaggtgctggagatacacaggaaacaaaataagatttaaaaagaggaagaaccggcagcccaactcgcgaaactctccttttagctgggagcatctgccagtaaaggggccgggacagatctcgtagcgcctggtaggtgattggaggaattttggcttttactttgagtgagatgggaggccagcggaatgcgtggagcagagggtagtctcattttagagattaggaaaataagaggctaccccacagtaagtgcaccagttgcgtttaaagaaaaaaaatgtatattaacaggaggtagccactgatttggggccactagtccagagattcgaaatgaagcgggaggagacacgttaagattaatctacagggaaacaaattatttacaccgaaatacaatttaacacaaacatacgcaaagagatatgccaaggagtactcgggggctctgttcaggcacttgttaatgaaaacgaagcgaatcttgacgccttaaaccctgtctagcctacttgattccgggggtggggctgtgggaatcgctgcccacccggaatcccgcctgccccgagcatggccaagccccagccccgccccgccgacggcctgccgccggggttggccgcggcggtggcggaggccacggtacccggaagtgcggctgacgtgtcccggcagcgctcggaattgtgggcgactcggctaatggcgtcggcgagtcttaggggcctggggagctggcgctgaagcttcttgccaggttggctggtgacacccggtgtggctgggccccgcggcagcggagggacctgcccgccttgtgggtttctcggccagagtcggcggagcctagcgggacggtgcgactgcggggggcgcctccgagaaaagccagaggtgttgcggggaagctgctgggggacgctcgagcaggctccgggttcgcagcccagggcccaagaagcgggctgctgaaggaccagagacaccgggagggagctgcctgtggccctaaggagctgaccgtgccagagcttgtttgtacctctcggaaattggctgggaccttggaggatcatgtccggcaccagcagccccgaggcggtgaagaagctgctggagaatatgcagagcgacttgcgcgccttgtcactggagtgcaagaagaaattcccacctgtcaaagaggtaagcttcaggtgacgtcaggagaaggcactgtgagcatgcctggtcctgttagactcagtgcttcaccccagtttccagtcctaattttcattcaggcctcacctttccagatttgtgagtcggtgggttgttccacaagggctttttatagtttccactggagagggctgaggcactttgattttctcccctctcctgtcctcccagtttaggagtgaagttcatgaagtgagcctattcagttaatccagctaggtgtactgtgcactagcctattctggcctttttcttacttgaaactggccaaaccaaaattgaaaaacttgtttgttgctccccgaaacgagtatccacccatcttgttgaaacctgtactcctcacgtttatggcatatcactgaattggaaacaattttccttctggtatatatcattcagcttaactctgtatcaatcctttgacgtgttaataaactatccagagccacctaatttatgaagaatattgaagatccacataatcatgttaaaccttgttatgagcag

SEQ ID NO: 5857 - DNA, 6000 bp, Homo sapiens
tcaacctcattattaaccagggaaatgaaaattacaataataaaagtccattgcagccatcatattggtaaaaattttaaggactgatctaacaaaatgtttactacttggtcattaaaatatcacatacactctctcctataatctctactggatcaaataaaaaatctaaatagcaaagagtaaaaatattgcactttcaggatgcagtggtaaattaatcagtttctatgatttcattattaagaagaaatgataaaatgttaaaccaactgtccaattaataaagttagagaaaagatcaaacaaacaggaaaacagaaaaaacaaaataatgaaaaataatgcacaatctagtaactgccacatagacaaacaaaactgataaatccaaagatagttggaaggagaggggaaaaccaataataaaatcatacaatcaattataaaagctgaaaatttcactataaaaaagaaaaactcaaaagaataaaattaggaatgaaagaagggatatatctgaatgctttttaatcctaatgaggtaaactggcttcttagtaaataaaaattgccaaaacagacttaagtattaatattacaagcaagaataaaccaaacgagtgttattaaagaactatctcaaaaaatagttctagggccaatgaatattactgaaaagtgcagtcagacttttacagacagtattttccatgctatataaactgttcaaggactgaaatgctatccaacccatttgagacagctagcaataatcctgatataaaataaacatggcagagtttgtaaaaataaagataaatctcagattattaaaggtgcattattaatcagatgtgtctattctactggaaaagaataaatctatctgggtgagttaagtgagttaatagaaataagaatgcatgaagttgatggattcacgggaatatgtataagccatcaagaccttgtgatgaaaagtcaaaattaggagagggaatacatcaaatatttacattcttgcaaccacaaaaaatgaagtgagcaaaaagcacagaaagacatcactaaatgagactaaaagaggttgaaagggcaataacaaatgctggagaagatatggagaaaagggaacccttgtacactgttggtggaaatgtaaattagtaccaccactatggagaacagtttggaggttcctcaaaaaattaaaaatagagctaccatgggagtcagcaatcccactcctaggtatatactcaaaagaaaggaaatcagtatattgaagagatatctgcactcccatgtttattgcaacactattcacaatagccaagatttggaagcaacctaaatgttcatcaacagatgaatggataaagaaaatgtggtacatatacaccacagagtgctatccagccataaaaaaagaatgagagcttgcattttgcaacaacatggatgaaaatgaaggtcattatgttaagtaaagtaagccaagtacagaaagaccaactttgcatgttctcacttatttgtgggagctgcaaattaaagcaattgagaccaggcacagtggctcacgcctgtaatcccagcactttgaaaggccaaggcaagctgatcagttgagcccaggatctcaagacccacctgggcaacataatgagagcctgtctctactttaaaaaataaataaataaaacaattgaactcatggagatagaaagtagaaggatggctactaaaagctgtgaagagtagtgggggcaggtgggggaggagagtggggatggttaatgcagacaaaaaacagtaagaaagaatgaataagacctagtctttgctagcacaacagggtgactatagtcaaaaataatttaattgtacattttaaaataactaaaagagtataattgcattgtttgtaacacgaaggatgaatgcttcagtggatgtatgctctatttactctgatgggattattacacattgcatgcctatatcaaaataatctcatgtaacccataaatatatacacctacgatgtactcacaaaatttttttttaatttttaagaggttgaaatgcatttatatcactcctggggcctttcagtagcctcctaccccaagttgatgataataatatcattagaaaaacagcatatgcaaatgaagtcagtggtaaatgagagatggagtcacatgggttcaagctgtcttgaatcactctctgagactatcaccatggtggcacccactcataagggcttttagtagaacagagtccatagacaactatcacactagttaaggctggtggatcatatggaatacataaacaaaattggtgatgaaatgttacaccaatgatgaaactgtgcatagggtttagagggtgtggggaaggggaaataggagagggaaagatttacagaggaagtgatgtttgcacagaatctgtttctgctcatctgcttcaatttcacctcagagttgttctgtctttaaccttcatcctagtttctgtttggttggttattagtatgttgtttgattgattgtttaaagaaggcgttataatttgcttactatttcccaatgccaatatatttctgtagagttttattacttatttttgtgagcattgtactcacatgaaaaagaaaaatgtatcttcttaggactgattcttacaaatttgaaatagctatagtttataacttacatggccaagccctgctagaagtatcttgcaaagggtttgacacagaagcttggccaagctgtgaaaaatctctcaaagtagttaacacacttcttgagtattactggaaacttgataaactaagaagagaattttgaccaggtatcacaagaaatttgtactggggacttctaagaataagcgtgtactatttcacagtcaactagaagaaggcattaggacattagggctattttctcaatatcttgttgattaatagttcttccctttgcagacagagtagaaaatttcaccaagtaaagattttagccctgctttagtttaattcatctcatattcctttatttctattcttcctcccacatctttccttctcaggtctggttccctatatgcggagcttcaacccccagaggatatttaaccttgtctccccctccacactgctgcattccccaccacatctctttccctctctttccatccacctgaagagatgagagcatatacagaaagtagctcccagctgtagctcaaccattaaacaccaagagaaaggaaaatgaactctgccagacttagatcaattagaagattcctttgtaacctaaatacatttttaaaagcttatcatcaaattatgcagtcatttgcagtttgaggtaaaacaactccttcattttcatggccctctcccctattcaagatgacatcaactgcatattagttttaccttgtatgcatttctcaatagtaaaaccattagtcagtagcatctgaatgtacattgatacagtgggtgttttgtggtaattataaggtaattacttcctatccttaaataattgtcatttccacaaacaaacaaaataggataaacaacaatacagcatacataaaacaactgccatctccctaagacaccagaatagcctgttaatcaaggaaagctaaatttattaaatctactacagtaagggaggccacactttgacagaagcttggcagtctcagaaggagaaggttgggggtgatatttataggatttggggagtctgagcaaaaatggtttaaaacaggtcttttgaggcagggaactgtttgggggattgggtaaagtgtttgacctaatagtttagggtcggtgctagagtgaccaattttactgatttcctaggactttctcaattttagcactaaaaatcctccaactggagaatccttacagtcctgggcaaactgggaccattggtcaccctaattagcagacataccgtcgcaagactgctgggtaatttgaacagtagtaccagagcaactgacaaaacattgtagcccatcttcccaaggctggatacaaagttttctgaagcattcacatttacagcctctatttgacaaaatactgcatgcctatgtgcgttcaactcacataataatgaaacttaactttaaaaatgtttttattgcagtaaggtatataaaacatgaattcgacagtttaactatttctatgcatacaagtgagtggtattaattacattcacaatgttaagcgaccatcatcacttaatttttttaaaggacgtttatattcactcatctatcaacgtagtaggcactgtcctaggcgctagggattccatgcagagcaaaaaacgtcacagtccatgccttcacatggccttcatggaccaccgcgggtgttctttttcccccgagtctttatgtacttgggaaaagtggccagggttgaaaggtgcaatgagtacacggcagaggtcagagaggttcccactcagcccggcgtctggaagcagcgtggggtaggggccgctccagtaccccctcctccagtgtcgaaggtgggcaggccctcggccgggtggatgagccgcgactggagggggcggggcctgggcgggaggcgggcggtgggcgtgtccggggcggggctgtaccgggcgctgggcggaggagccttggctggggactgcctggaaacgggctgggcctgcctcggacgccgccggtgtcgcggattctctttccgcccgctccatggcggtggatgcctgactggaagcccgagtgggatgcggctgacgcggaagcggctctgctcgtttcttatcgccctgtactgcctattctccctctacgctgcctaccacgtcttcttcgggcgccgccgccaggcgccggccgggtccccgcggggcctcaggaagggggcggcccccgcgcgggagagacgcggccgaggtaggactgggtcggcggcttccttccggctctgcgctcctggctggggctgctgggcggctggggccgggtccccgcacccggctctcaagtccgggattacccgcagggcctgagaagcgctttgccccctacagcctctcgagccagcccttggctcggaattggagaatggtcctcattcttacccagatctcacacgccgtccccgctcccgatcccagggggtgacaggcgcgcacgcctttcaaacacgtgttaaaatccaagacgtcgtctcaaatgccagagatttgcgggaatgctcctggaaggcctcaaaatcgccgcaaggtttaagacatccgtttccatgttgaaacaaagccctctctaatcctgcagtgaccataaggcagactttacctccaaattctggtcccctgtcctgtgttttaacttgtgttaagatcagactcggctttctctttccctttattcagaattttgcacgatagtatctaagactggtgaacactacactctgaagtcagttttttgtgcataggttacctgtatacaatggataaaaataattgcaaaagttaagcttgtaacttgatacatattatcctgttatttttaaaggttttgtgttggggaagagaattttcctgtctcaaggtagcattttatttctaagacttttcagagtaaaaaaagttcagtaaaaaaattgctgattttcttttttgttttcattgtgtattaccagtttaaattcagttgctgtacctctcagaaattaaagttaggatgaaattagaactaacacttaatttaaatgatttgaatttacctacaactgcaataataccttactggtaaacacttactctttttaaaacagaacagtccactttggaaagtgaagaatggaatccttgggaaggagatgaaaaaaatgagcaacaacacagatttaaaactagccttcaaatattagataaatccacgaaagga

SEQ ID NO: 5858 - DNA, 6000 bp, Homo sapiens
aatttagatggactcagcaataaggttaatgtataaaatataggctatgtagccctatacacttgctctgactggactgcaaatttgagtataaacttcttagctgtcatctcaaagggagaaacatggcaagtcaccaaacagtgtccatctgttaaaaggaaaacttaagacaaaataaatttgacagagtttatttaaagaaaataatgattaatgaattgggaagcatcaaaaccaaaaagtttatgggctcagccttagcagccaaagcagggaggtgtttgtttgtttgttttgccacaacatggaaacaaagtaaagaaattacctgattggctacagctatgcattggccttatttgggtatggtctgatgggaagtctctagttatatatccaatcagctggttggctgtttgtgattggcagaagctggtgggttttgtttttttttaagttaattacaagaactgcttccacttcagtttcagtttgcttatataagagctctaggtgcagagacaacctcaggctaatggcctccttcttgtttttttttttttgagactcagtcttgctctgtcacccaggctggagtgcagtggtgcgacctcggctcatgcaacctgggttcaagcgattctcctgcctcagtcctccgagtagctgggattacaggcacgggccaccacacccagctaatttttgaagttttagtagagatgtgtttcaccatgttggccaggctggtcttgaacttctaaccccaagtgatccctcctcggcctcccaaagtgcttggattacaggtgtgaggcaccgcatgggcctaatggcttccttatttgcttgaacacatccataaagttaaaaacaaattaacttttgtgattcctcaaaaagttcaacatagaattaccatataatctgcaattccactttgaagtacatacctaaaaaaaacgaaaacagctattcaaacagatacttatacaccaatgttcatagtagcattattcacaattaccaaaggtggaaacaaccaaaatgttcatcagtggatgaatggataaataaaaagtggcacattcatgcaatgaaatatattattcagccataaaatagcaccactgcactccagcctgggtgacagagcaagactttgtctcaaaaataaaataatataaaacaattaatgttatgttatatgaatgtcatttcagtaaaaattaaaacaacaacaaatgagttgctctggaaaaacacaactatttctaataatgagaccagaaaggacattctttaatgaaatgaactctcagcaatatatttatttgaacaaaatgttgcgttcatatcattcttcaatataaactgatgtcaaggctaaaagggtgacatggtgaaaggtattctattgggaacagggtgggtagggaaagagagtaggaggaacagcgtgttagtaatgtggcccaagctacattggtctctcataaggaggcttaaggcagaaatgaaattaaaagcacctcaaagaagagttggaccagaatccatcaaaattgtttccctcagatttttggaagttatggagcaggactgagtttgagattgcactccctgtcaagtatctgggtacagtcaagaatagagcctcatactttaagtgttagccagtctggaagcaggagcaagatccactagcaaatgaggagaatgttggaagtgagcagtgacagtgttgaggcagtgaaggttctcctgaaaaagcgttgggtcttctcaaacaccaaacaaagggtaattataaacccatatagttccatgaaataaatcatgctctagtatcttcagagaggaaaggtttcttgtagatcaaacaaggtcatgtatatgaaagttctttgaaaagtataaagtagtatatcaatcatagttgtcgttattattaatatctgataatacctaacttgtaaacaaaatatttgaacaacattttcacatacagtgttcgttcatcattctcaacaaatattgattgaattgtctgccaggtagggtaggcaatatcatccacattttaaaaaaaaattgttttgtttttttttttgagaccgagccttggtccatcacgcaggctggagtgcagtggcatgatcttggctcactgcaaactctgcctcccgggttcaagcgattctcctgcctcagcctcctgagtagctgggattacaggcatgcaccaccacacctggctaattttttttttgtagtttttttgtttgtttgttttgttttttttttttgaggtggagtctccctctgtcgcccaggctggagtgcagtggtgctatctcggctcactgcaaactccgcctctcgggttcaagccattctcctgcctcagccttttgagtagctgggattacacgcgcccgccatcacgcccggctaatttttgtattttttttagtagagatggcgtttcaccatgttgcccaggttggtctccaactcctgacctcaggtgatccgcccgcctcggcctcccaaagtgctgggattacaggcatgagccactgcgcccggctcatcttcattaactcttaattggacttacttaatgccttgagggaagtttgaccatttccatttttgtctatggagtagcattttctttaactgctattacatagagttctcaggagccatgctactgaaatggctgcacacaatgcttagctttatattattgactaacatttattgagtgcacactgtgttacgtatggtactaggcattatgcagatacatatagttttatttactccttaaaacagccttctgaggaatttttatcatccgtcttctgtttgtacagaaactaaagctcggaaagatgaattaacttgcccaaagtcacaggcagaaacataactggttcaacagtccttataggaggtcacttaaaggttcatgaaaatcagaggctgagccaacagagctctatgattcctatcagaggagccagtatggcataaagcaaatgttgaaccaagaatcaaagtaagagacagggctgggtccatatctagttttgtttaactccaaagctcacagcttaaccactctgctacatggagacacaagtccactaagtttataataattttagttcccacccagataattatggcaataaaatctgggtcatcatcatcatagccactatagtttactgttcaaaactctcttataagtgcataacagtcatagattcaggaacatttataaatcttaaagtctcaatgatagaggacaaggaagtgtcctccacagaaaagcttttttttttttttttttttttttttttgagacggagtctcgctcttgttgcccaggctggagtgcagtggcgcgatctcggctcattgcaacctctgccttccccgggatcaagcgattctcctgcctcagcctcccgagtagctgagattacaggcgcctgccaccacgcccggctaatttttttgtatttttagtagagacggggtttcaccatgttggccaggctggtctcaaactcctgacctcgtgatccgtcccctgacccccgccccccgccccgcctcccaaagtgctaggattacaggcgtgagccaccgcgcccggccgtatttatgcttttgactaacgtttttctgtacaggtgtatagggtaatgtaataggtaaaataactcattcaacaacaaaaaattattgtagtattttgtagctactaggattgaagtactaaagaattgtctgtctgccaaggtttggggaaatgggaaaatgggacaagatcttcaccacatggggcacatttcacctctctgggattcatttcctattctgtaaatggcagagttggggttccaggtcttgtccttgtttttttgactttgtgtgaaggtttctccacctcacctggcactagtcttatttcaaaatattcatctcatactatcctctctttgcaattctttaattcattcaacaaatatttattgagcttctactagtattgtgagtaacagaagcaaggttcctccacacatggagcttattatagtccaaaaggataggacaataaataattttgaaagtaaacaaatatttattaataactgataaataactattggttggaaaggtgctaagaaggaaataaataggatcatgtgttatgtctctgagagtcttagaatgaagcagacaagctctttcactttcaagtgctgacgtagtaaagtcattaggtttcaaaaaaggaaaaaaagataatatcttacaattaactaatgaatgaacagccattacgctagaagaaaattgtattgtgattggtgtactccgtatcttctcagaatgagagaggtgaggcttctcaaaaagagcagcgagagaaagtcacttaaaaattttttttttttggtaggtcaagctaaagacgaactgaaaatagacaacctgaagtcagacgggaaagctgccaatctagtctggccagcagaatttctttcagtaggtctaggctccctcggcattgggaatccagatgtaaagaaaacttacgccataaacttcaaggtagatttcagttattactgcccggtggcaggaacctaggaaggtgaggtcaaggtgtggtttagtaagagacagctcccgggaacggcacttggaagggcagggcggagaacagctggagatgagatagagagcagggggagaatgcgccgacacctcaaggtgagagagtagaaacagtctccgccgtgggagccgcgcgctgctcaggtggctctttcccgctcaggtgagctcctcccgcgcctcccattggccgagatgcccgcggcgctgggagggcgacgcagcgcggtctagttcagggtctagggcggcgcgtcacttccggtagcgcggagcttgtaaaacaccctggagagaaaatggcggcggcagcagcttcggcgcctcagcagctctcggatgaggagcttttctctcagctccgccgttacggcctgtctcccggaccagtgacggagagcacccgcccggtctacctcaagaagctgaagaagcttcgagaggaagagcagcaacagcaccggtcagggggccgcggcaacaagacgcggaacagtaataacaataacacggcagccgccacggtcgcagccgcgggaccagcggcggcggcggccgcggggatgggggtccggccggtctcgggcgacctctcctacttacggactcctgggggcctgtgccgaatctcggcctctggcccagagagcctcctgggagggcccgggggcgcctccgccgcccccgcggctggcagcaaagtgctgctgggcttcagctcggacgagtcggacgtggaggccagtccccgggaccaggccggcggcggcgggaggaaagaccgggcttcgctccagtaccgcgggctcaaagcgccgccggcgcccctggccgccagcgaggtgactaacagcaactctgcagagcgaaggaagccccactcgtggtggggggccaggaggccggcgggccccgagctgcagaccccgccggggaaagatggagcagtggaggacgaggaaggggagggagaggacggtgaggagagggacccggagaccgaggagccgctctgggcgagccggaccgtgaatggcagccggcttgtcccctacagctgccgggaaaactattcggactcagaggaagaggacgacgacgacgtggcctccagcagacaggtattaaaggacgactccctttcccggcatcggcccagacgaacccatagtaagcctctccccccgctgactgctaaatcggccggcggcaggctggagacttcagttcagggagggggaggactcgcgatgaatgacagggcggcggctgccgggagtctagacaggagcc

SEQ ID NO: 5859 - DNA, 6000 bp, Homo sapiens
aggaggctgaggcaggagaatcgcttgaaccaggggaggcagaggttcgcagtgagccggaaattgtgccattgcacttccagcccaggcaatagtgtgagactgtttaaaaaaaaaaaaaaaaaaaaaaaaaaaaaaaaaaaaaaaacttgtttcgaatactgtaattcaaaaaatgctatcttttttatttttatttttattttttttgagatggattttcgctctggttgcccaggctggagtgcaatggcgcaatctcggctcaccacaacctctacctcccgggttcaagtgattctcctgcctcagcctcctgagtagctgggatcacaggcatgtgccaccatgcccagctaattttgtatttttagtagagacatggtttctccatgttgatcaggctggtctggaactcccaacctcaggtgatccgcccgtcttggcctcccaaagtgctgggattataggcgtgagccaccgtacccagcccaaaaaatactatcttaacactcattaagagacactgatcaaactaggatgtgccagacagacatggtgtccgtcctcaaggttactggaaaacagtattccatttctttattcctgccctcaattgctccccaccctctccctaaggcccttttagaatgagctcaacctaatacaacaaatccatcttcaaattgctccctagtcttttaaaatctatactacaaacatttaaaaaacaaaatattcgggtttaatgtcaagaaggcatatactggttggatgcagtggctcacacctgtaatcccaacactttggaaggccaaggcaagaggatcacttatagccaggagtttgggaccagtctggacaacacagtgagacctcacctctatttttatattaaaaattttttaaaagaggtgtctatttctcagatgaattttcagtttaataaattatttagcaaacactccaaaatgtgttatttctaactcttctccattctcttgaacttcctattttcatgttctttttaaccaccaaacaaacctttacaaattgcccttgtttagcttagtcactgagcaaactctttgtcatctttcaattcttaccttggatgctcccctctcttgtgtgacaccatccctaaacataccagagtgacataagtgcttttctccttgagtcctgtttatatatgacttggataaagtcatcatctttttataatgtaattgtctacatgtccattttcatctgctatgctccttcaccacacatacacatgtggtgtatgtgtgttggcactcaaatcactcaaatattcgcacatttcagaaaatctaaaccaatccctttgaattagattcaaagggattgtaaataaaatctgataatttcctatcacacagtaagtgctttttgacattaggataatttttgtgattggtattgaatataaatgtctatcatagaaaaatccaaactttatatcaaagagcacttaaccataaatgggtatttatattgtgaaatttaaagatcagcgcaacaatgaactttcagtttattctatgattgctatagtaagtctcaaactgcatgttttctacaggaaataaatctgatgaagacaattaactgttggaaccatttaaacaaatgtgtttgtttcttaacttcttagagtcattaataatacactctaactatcccatgtagagacaacatttctcaaccttaaatttgatcacaggtatcttttgagtggtagggatgcctactaataacaaagaataactactattaagttaaaaaatatagtttaggaaatgcctaaccagaaattttccattgccagaaaatggcttccaaagtaaatagaaaaacaaagactttgttgaaatttttaagattgatagtctataaaaattgtaacagtaaaatcgtgattttttaaaagtatacaagagcccctcccactccctttatccttggagatacattccaacaccctcagtggatgtttgaaaccctggaaaataccaaaccctatatatactatttttttccaattcctatatacctatgataaagcttaatgtataaattaggcaccgtaagagattaggaggaatacctaataataaaatagaacaattataacaatatattgtaatagaactaaaataagggcactgtgatactgcaacagtccatctgataactgcaatggctcctaagtgactaacaagagagtaatgtctattgcatggatggatatgctagataaacggaggattcacgtcccaggtgggatggagctggatggcatgagatttcatcatgctactttggcatgcaatttaaaacttatgaatatttctggaattttctttttaatattttcggattgttaccggtggaaggtgtccaggttcttggtgttttgaacaaagaactggaaaaacacacaagcaaagcaaggaaagaatgaagcaacaaaagcagagatttactgaaaacaaaagtacgcgccacagggtgggaaccatctgagcataggggctcaagggcctccttacagaattttctagggtttaaataccctctagaggtttcccattggttacttggtgtacaccttatgtaaatgtaaatgaagtactagcccacaatcagtctgattggttgtgaaaaacaaccaattagaggctgaagcaaagttacaaagttacactcctacgcaaacgtctgattggttgcagaaagctaccaagcagagatactttcaattttctatctgccacgcagaaaaaaagaggggtttgcaaagggcgtagctttgggtccttttgttacttaggtatgggaagttggggttttccttttgatttagctctaggaagtcagcatgaatcggccttaggttccctgcctcaataggagaccctattctcctgcctcaagatcatgtttaacccttggtaactgaaactgcctattgcatataagaactactgtattttaattatattaactcctctaaattattttggtcttaagctagaataacttttatggagaaaaacatctataattggtcactgaaaaaaatagaagggaaaatattcatctaaagggtcagttcactgacactactatttaatatgcattttttagccagatctaatagtcatgagaaaatcatccctgacatccagggactgacctgacacagctacaccacagtgttgggagatagcttgacattcacaactaggctatgattttcctatcgaacaccaactaatcagagagggtcactctgtgactgtggtgaagcaaggcaaaaaaaagaaaaaaaaaaaaaagaccagtttataattttgtctaagcagagacaaaaacaatgcgactgtgcaaaccacaaaacattagctttcattattaataattttacccagtagtctggtaacattgatactggccagtcagcttggtgaaataatccaaacatttacctatgcagaacagactaagacaaaaataaagtaggcacataatacatttcagcataaagaccatatatgtatattatctagtacaggaagcccactactatttagtcctacttcacagatttgattcttagttaactacttaattagatgtcttaccaaagaaaatgacaagctgtcttggcatgtattttgaaatttaaaataatgtgagcttttttaaagtaactactcttggggcttaaaacacaattgcatactgtgtctgaaatggatttggctcctcttcttacactgtcagcaattaactgaaaaaattgataaatattatgtaattatcagttaattactgttaacccaggcaaacaagttaatttcacataaaacatgaaatcaggccgggcgctgtagctcacgccattaaacccagcactttgggaggccgaggtgggtggatcccctgaggtcaagagttcgagaccagccgggccaacatggcaaaaccccgtctctactaaaaatataaaaattagccgggcgtggttgtggcgcctgtaatcccagctactccggaggctggagcaggagaatcgcttagaacctgggaggcggtggttgcagtgagcagagatcgtgccactgcactccagcctgggcggcagagagagacactgtctcgaaaaaaaaaaaaagaaaagaaaagaaatcagccacgattcagatttttaatgctaacaagacgttttgctttctaaatgcacacacctttaatataaggggtgtgaggacagatatttccacaatctaagtggtgttatgacaataattacgagagctcagtaatagaaactatgtttaactttacctcgctagcagccaggagtctagcacattataggtactaaacaatgttgtttagtacctataatgtggttttggagaagcagtgcaaacgcagccggccaggatgccagcagtgcctgcccacgtgagctaggcgacatccccctaagcggctgcggcgcatgcccacagcgggcgaggcgctagaggcgggggcgccgggaggcgcgggctttgctcctggggtctcggccttggccggctggacctgaccctagggcggcttgcgcagctgtcgggacgtgactgcgttcagccgcgtcgggcgtgcttcccagacttgcccaagttcgggtgccctagctgcccctttgcagccgctggcctacccggcccgcgggtgagaaggttgcgacgggaggtgggtggaactcgccagcgccgggaccgcggattggctgcctcggctttctcttttccccgtgggctccggcgtgaggcgctgaagcggccggcagccggcgaccggccctcaccgtccgccgggttgcgctctgcttttgcggtgaggcgttgaccacgcccatatgaattggagctctccgccagtaggagtttccggaaggagtttgaatttttgtgatttttatgcttgtttggtcggtggaatatgttgggatttatgtttgcctctgaacaagtgtcttgctcacatcgtaaatgactttctctccgaaacgctaaatattctttcccgcaggagctcatatccttattttccatgacagatcttaacgacaatatatgcaaaagatatataaagatgataactaatatagttatactgagcctgatcatttgcatttcgttagctttctggattatatcaatgactgcaagcacctattatggtaagtctgagtgttctaagttgtttctctgtaatctagtcagaggaaattaaaaccataccattgtgaaatccaaaactcatatcctctgaatggttatgaatggttgtgtttacttaacttccatagcctgatttaacttactaacatgatagtataaacaatgcctttaataaatgcttgttgtgataattcgagttatacctatttctttttttttttaatttttattttgtataagataggggtccctctgtgttgctaggctggtctcaaacccctaggctcaagtgatcctcccacctgtgtctcccaaagtgctggcaatacaggccaccacttctggactagttacacctatttcaaaatgtctttatattttatgtaactattccatctgtcttggtaaaagataagtgaggcgaatatagctttgtaaagcaattacagtgatgcttttaattttgaataagaatattagtaatgggccaggcgcggtggctcacgcctgttatcccagcactttgggaggccgaggcgggcaaataacctgaggtcgggagttcaagaccagcctggccaacacggtgaaaccccagctctactaaaactagaaaaaagctgtaatcccagctacttgggagatggaggcaggagaatcacttgaaccctggaggcggaggttgcagtgaaccaagattgagccactgcactccagcctgggccac

SEQ ID NO: 5860 - DNA, 6000 bp, Homo sapiens
aatacacaagtcagacaactaacagttaaatgaaggtgttagttgttgtggacaaactacagaaatcgtgaaatttcaccatctcaattatagctgattttaaataattctttccttatcttcaagatcttgaggaatgttctgtctggaagggtagttcttatatgaaaccccacaacaacatcaacagatcagtgggtcaaatgttgtaaaattttgaaagtctgcagtataaaaatattaataaactttgcagtaatgttaatttctccaaattaaaaatttcatcaaatgatcagtttcaaatttcaaactgctgttttgctattgccacatggcggcaccacttcagctgctaaacagaaacttcaccattcttttttcatattggtctccagttgagggaggtcttcagaaacatatccctctcatacgatacatcagtctagttttgactgccagaatagtaagatttgtttgtttccccctgttctttttctactacagtgtgcttttataaaatttacccattaaagttttagtttttaactgaattattttttgcttctcatgaagaagattaattaaatatttcttgagaacataaagagggtagtatgttagcttctgtactgtatatttttcacagaagtccagagctgaaagatacccccaaatctaactcctttacactaacatattgagaaattgagtccattaagtactgggttaggacaatagaggaagatgaaggtgatcaggatctagttctttcccccgagccaagctgtttctggacatgaggttttactcacatgtgaagagactgagtacccgaggacacctaactatgtgcttctatatacaaaccagtgtgaaaagaaacaaaaaaggcagttaaattgtaaacaatcaaatagtaagaccctggagccaatacattcactgaagatagttcattttgatcatttcaggaccaaggtgtagattttattaaaaacaacttctgtttggcctcatgtatattaaatattcagacaatttttacttttacaagcccctgaatcaaatatggccacatcatgactttagtgatatttattagctaaataaagtaatcataaaattctcctaacaaataaacatgtttctgagagaaacatcaggtactttaggaagtttaatttccttgtttacagcaccacatggtcccagtattggtaaaatcaaacctatcttgaatccagtgacctataacactgaaagcaaccttaaaaaggaatattagtaaactatgtctttatttttgtgaggtgcgaactctgaaatttcacccccccacttttgctttgaaggtagaatggacattctctagaaaaaataatatttaaaaattattttactaaagtgcttgcttctttgggaaagcgtgctatatattttcagaaattaaaaaaataaaactcactgaagacctttgtaacactgatatgaaaggaagaaatatttacctacttgatcttgatagtaagttttattatgcaaagttacatttaaggggaatccatgagctagtaagttgtgtccattctatattaataatcttatgtccactccacttgggtctgaaaaaataatccatttactaatttaatcacagttagtagagactttattaattggtaaatgtattatttaattctgaaatatttgagactttccttgtagtaattttcagaagtacataaacacattagtgaaatacaaagaagaacagatggaggtaaagagaggaaagagataacagactgagaaccgtgagtgagggaaaggggaaagatgaagagaactgggttaaagggtacaaacacacagcaagacagaaggaatctggctgttcactgtttgagagcacagtagggtgactataccttgcaaaaatgtattgtactcaggtgatggacaccttaaataccctgattttgatcactacatattatgtgcatgtaacaaaatttctcatgtatcccacaaatttgtacacatttttaaaaaaagacaaacagaaaaagccttctttgaatcttttcttgactaatgttttagaaagagaaagtcttaaagatcccttagtgggtaacctcttcctttaggcagtgggtcttagactccccgggatgattccagaagcctctgataatcaaatgtactcaatccatggatattggatcagtaatactaaattaccagtttaaaaccctaaagtcagagaagtctggtgacctgctgaggatcgcagggctcctcttacttgcttgcactatagttcctgattctgtgaaaacaaaccaatgaaccccaactcctcaactcttaaaatgcatacagccagatacatatggacagcaagagtacagacatttaaaaacagagcagaaaaaagtaacttgaacagaatgtggcatttcccttggtctgttgctaacggcccacatacaacatgcttaaaaaatcccaccctggcacttattttcatcatcatttaaaaatgattcaaatggacatttagaatgcatggcattgagcatgtatcccatctggggataaatgaaaaagggcttcctcgagcagggctgtgtttttagtggttatcaagctaaggttaatgtgtaattggtctcttctctttggtcatgcttttaaagccaaacacaatattttaattgtctattttcagtactccaaagccagaagcattaaccagttctttttgtaagaaaatagctatggacatgatttgtaaaatgccttcaagatttgaagacatgaaagaaacatgtaaaaaggaattacctaattttctattattcacttttttaattaacccagaagccaatcacactttgttttactaaacactggagactcctgcttcctagatgtcacctttggggtggctgttttctgaatattgttccaattagagttcttcgcacaaattctgaaggttggatatcccacatacttatacatactctgcagtataattttaaactccaatatactcagacaagagtccataaccagccaatgggctatgaacctattttgatgctgcctgctgtcagcaaactggtctattgataactatcctaacaaagttaaaacaatgttcatggtaacactggaaagctgcaagaaagtaattatggctaggtgaaatgaaaaactgaccaatcatggaatgtattcgttcaccgttctaataagcccagcttttctcagtctcagggttttggtcctgaatgttacactgtagacattgtgtgttaatcgtttctccaatctaaagatgggaattatcctatggggaaaacatcaccttgctttggcctttacttccggaggattttaatgcttcattgctaacattattttagtactgcacacctggacacatcgcacagtataatgtaatatatgtagtcaggttttggagaatttatttcaatttacatacaatcctccaaatcctctggcgagcttgatgtgaaatctgacacagccacatctccctagcaggatcttcttttgctctctatgttaatagccaaaggctccaaggatctctccctggagcgcggtggggctaaggagtcaggaagaggggtgactgcggggcttgttgcgctgaagatttacaatgtacttcttgcaggcggctcagcaaccccctctgtggctgtgggtgtctggtgtgacagagcggagaaaagctctctaatctcccagtgcctgcctctgccgctcagtcgctcccctccctcccgcctttcctgcctcctcgcgcgctccctctcctttgcctttctctgggagtttcagtccctcaatgcagctggagtagccctggcaatctaaacccgaagcctgtgtatatacacacacgcacacacgcgcacacacatgcacacgcgctcggacatacgcacttcggctctcccccttgggatatggagcaaacccagagcttcatctacctgaaggggatggcccggccggacacttctttctcacttgtcatctccggagggcagagcaagactggaatgagggagtctcgctgtcgggtctgcaacctcctgccgtttgccgccaccgccgcttaaagtgcccagggtggagaaggcttttccaggacggatctccgtcgtagcttcgcggccctgggacttcctcctgctggttcactctagtctctcccacctcggccatccttttctctccagctgcagggtgtatggctcgggtgcctcccgtgctgtggccgccgtcactgctgctgcgagcacattccacccagaggaccgaacgccgccgctggagtggggggagaaagcgaaagccctaacttccctctctacaccctcgctcttcccaccgctcccgtccttctccctagccgagaaccggttggaaggctcccgcggaaagcgaggcgagagcgcggcgcaggggagggagagccgggagccgcaggcgcgcaggggcgggggcagcatgtgccccgccgccgggtgctcgtccgagaagtagcgcgcgctgggcaagcaagacgctttccaagttgggcgcgtcccagagctcacagcccggtgtccagagtgaggcggggctgatgggggtcgcggaagctgccgtcgcttgtgtccagaacccgtcttaaaagaacccgggccagcatccccagtcgcgcgccctcggcccgcgtgagctctccgatgcctgctctggctgtggcccgggtggcccgcccgcggggggtgccagagggggcgggggaggaggaggaggcggtgtgatggccctggacggcgagctgggggagcaagaggaggagaagaaaaagaagaagaaaaagaagaggaagaagaagaaggaggaggaggaggaggaggagggggccgagaagagcagctcacccttcgcagccgcgatgggggaagacgacgccgcgcttcgggctggcagcagggggctctccgacccgtgggcagactcagtgggagtgcgaccccgcaccacggagcgccacatcgccgtacacaagcggcttgtgctggccttcgctgtgtccctcgtggcattgctcgcggtcacaatgctcgctgtgctgctcagcctgcgcttcgacgagtgcggggcgagtgccacgccaggcgccgacggtggcccctcaggctttccggagcgcggcggcaacgggagcctccctggatcggcccggcgcaaccaccacgcaggcggggactcctggcagcccgaggcgggtggggtggccagtccggggaccacgtcggcccagccgccgtcggaggaggagcgggagccgtgggagccgtggacgcagctgcgcctgtcgggccacctgaagccgctgcactacaatctgatgctcaccgccttcatggagaacttcaccttctccggggaggtcaacgtggagatcgcgtgccggaacgccacccgctacgtagtgctgcacgcttcccgagtggcggtggagaaagtgcagctggccgaggaccgggcgttcggggctgtccctgtagccggttttttcctctacccgcaaacccaggtcttagtggtggtgctgaataggacactggacgcgcagaggaattacaatctgaagattatctacaacgcgctcatcgagaatgagctcctgggcttcttccgcagctcctatgtgctccacggggagagaaggtatggagggaggcggtgccccgcgctgccccaccccggcgcgcggctcgaacctctgggcggcctgcgaccccggggacccagctggcttccaatacccgggaagccaggggtggggggaaggaaacgaaagcggagtagggcagtcagaactccggggtctcccagatgcctcggggtctcgctgccgccaacttcgcaaactgactcaccggtgccaaaaga

SEQ ID NO: 5861 - DNA, 6000 bp, Homo sapiens
gaacccttgtacactgtaatgtaaaatggttcagcagctatggaaaatggtatgatgggtcttcaaaaaattaaaaatagacctaccgtatgatccagcaattcacttccgcttatatattcaaaagaattgaaattgggatctcaaagacataaaacacactctcatgttcattgcagcattatcacaatagccaagatatggaaacaacccaaatgtctattgatggatgaatggataaagtgtggtatatacatacaatgggatattattcagcctttaaaaagaaggaaattctgccatatgtgacaacatggatgaacccagaggacattatgctaagtgaaataagccactcactgaaggccaaaggtgaagtatctaaaatagtcaaactgatagaaacagtagaatggtggttgccagggccaaaggtagaaggatatggggaggtgctgttcaatgggtataaagtttcagttatataagacgaataaggtctagaaatctgctgtacaccattgtgcctatggttaacaataccctattgtgcacttaaaaatttaagagagatcggccgggcaccgtggctcacgcctgtaatcccagcactttgggaggccgaggcgggtggatcacgaggtcaggagatcgagaccatcctgggtaacggtgaaaccctgtctctactaaaaatacaaaaaattagccgggtgtggtggcgggcgcctgtagtcccagctactcgggaggctgaggcaggagaatggcgtgaacctgggagacggagctggcagtgagccgaggtcgcaccactgcactttagcctgggcgacagagcaagactccgtctcaaaaaaaaaaaaaaaaagaaatttaagagagatcttgcgtcaggtgttctcaccacaaaaaaaccttttttttttttttttttttttttttaagacagagtcttgctctgtcgcccaggctggaatgcagtggcgtgatctcagctcactgcacatgccgctcccgggttcacgccgttctcctgcctcagcctcccgagtagctgggactacaggcgccagccaccatgcccggctaattttttgtatttttagtagacatggggtttcaccgtgttagctaggatggtctcgatctcctgacctcgtgatccacccgcctcggcctcccaaagtgctgggattacaggcgtgagccaccgtgcccggcccacaataaaaaaaattaaatggaccaagtaataattcattgaggataataacaacagaagaaacgtggtagaggcaaagagtagtagatggggaaaattcaggaggcttccagatgattctgctaccacctagttttgtaactttaagagagtttcttaaattccccatcatttccttttttgtgaaatgactaaatctggataatctctatgctgtctttagctccagtagtgtctgaagttacatatgaaactatatttatacaacaatgccccatgccttccaatctgtttgcttctaaatccatttcacaattattctctaacaaggtctatttttctctttgaattttattcttttttagccactattctgcattcctccataattctatgccattcttttgccagtctatccaatcagtgtactttcttagctgtctccttagtcccctgaatatattttctcaatttgagctatagataagaactctacagttatcaagatggactctgatcatatctaaagggtttgcttcaagattcaacttcaacatgttttcctaagcatgcctgcttctgctcttgatctctttcttcagttcttcatttaataactatttattttagtgctccagcagtaagcaagacagacatggaccctggttatgttgttccaacttttcggctgcttttagtattttccttatatttgaattgtggaattctcaggagtaaaaatatccacagagccaggcaggtaatgagaacgagtaaagcaggccatagacctggtagagactgagcaagaaggtcaagatggcttgtttgccagatgaactagaactctagattttaaagtgaactctgatttactgattttcgcagggaaggctaaacatttcttttatgaatactccacatcatatacctgtaccaatattcctaatacatgggtacctgaaacattttctccagttttccatgcctagtttctttacactctcacttcattcaatgctttattaatatttatgccacttaactttttcagtcggtgtcctttatttactctaatcttctatttctagtcaatgcaagacataaaggtaaggaagggcaagattcaaaattgagatttttggccgggcgcagtggctcacgcctgtaatcccaagattttgggaggccgaggtgggtggatcacgaggtcaggagttcgagaccagcctgaccaacatggtgaaaccccatccctactaaaaatacaaaaattagcagggcatggtggcgcgcccttaatcccagctactcaggaggctgaggcaggagaatcgcttgaatctgggaggcagaggttgcagtgacctgagatctcgccactgcactccagcctgggccgcagagcaagaaagactccgtctcaaaaaaaaaaaaaaaaaaaaaattgagatttttggctgggtgcggtggctcacgcctgtaatcctagcaatttaggaggcagacgcgggtggatcacctgaggccggcagttccagaccatcctgaccaacatggagaaaccctgtctctactaaaaatacaaaattagccgggcatggtggcgcatgtctgtaatcccagctacttgggaggctgaggcaggagaatcgcttgaacctgggaggtggtggttgcagtgagccgagatcgagccattgcactccagcctgggcatgagtgaaactcagtctcaaaaaaaaaaaaaaaattgagatttttgagtgaaaatgacttatgtccatgttaacatatgactgaaaacaattcgatgctccaagggccgaccctgagactatctagctgtaaaagatgactcctagtttgggccaggacgaacagaatgaaaatcagctcggactgaaatgagaaaaagtagttgtgctgggaggacagatacagaaaaagccagcagcaaagttaactgagaaacttctttctcccacagccgtgcagtagctatgacacgccatattcacccctctttgagtaactgctgctcttactagtgttgctactttattactggaggtacctaattactaaattgctgtatcctcaagacagcatccaatccctcgtaaatcccagcttttcttcatgccgccacggaaacggcgtcccatgcagaactgattctggctctccttagaccctcctcagactcctttggcgggaaactaatcttacaaaggaggcttcctctttccttttccagtggcattccaagcttcctttggagtgccctccctcctgatttacaaattggcctgacgttatcggagtacaggctttttcctggtggtttctggcctaacaggagacagattagtaagtaccaggatctctaataggtcaactttcatgatctctgctaaattctcagctgtttagacttacaatttttaacagctaaaaggaaagacaaatgctatctaaaactgtcccatcagcccatttacagggagcacctcccccataccgccctaaaatcctttaaaaaatggctttagtcattttatctgccttgcatttaagcgaattcagtttaagtggcttcagttctgaattcctggattatatcgaaatgttgcagatggcggtgtgtgggctttgagctcgtaaattttttgtgtggtactaattcaagacgattgagagcaggttgggatcattttaaaaagagttctcggcagggtgtggtgactcaagcctgtaatcccagcactttgggaggccgaggcgggcggatcgcttaaggtcaggagttcgagactagcctggccaacatggtgaaaacccgtctctactaaaaatacaaaaattagccgggcgtggtggcgtgcacctgtaattccagctactcgggaggctgaggcaggagaatcgcttgaaccgggaggcagaggttgcagtgagctgagatcgcgccattgcactcccgcctgggcggcaagagcaaaactctgtctcattaaaaaaaaaaaaaaaaaaaaaaaaaaaaaaaaaagggttctctagtaggaagtcccgagttgtatccatgtttttccgggcgtcccccggagggacaggttgcgggtgaccttttcaagtgtggaggaaagggaagctgcttttgtcttcaggaatgatgcaggtctcgactcaagcctgacgggcccaaacctccctggagctggctgacgactctgcccgagttcctgaagaggggtcccgggggtcccggagcggaagtgggagcgcgtgggcgtgggctcctcggctgcctggggctccagacttgtgctgcgtgcggctccggagctctgttctcgctcctgagcagctgctaggtttcccaagcgactgtctcaaccgcccggccgcctcccccgggcagccagagcttcacatctacctccagccgggacccgcccccgagccgcggggcccacgcccagagccctccgccgtccccagcgcagtgcagcagagcgcgatccagtctggggccgggccgcgcttccgcgcacgcgcggagaaacccgcgccctccgaggggggaggggacagagggggcgtcacgggggcaggagaagaaggaggaggaggcccgcgtcgcctccggcggggctcgcgctcgccccgcgctcgccctccgcctcgcccgagccccgggagggtgaaacgctttctcccagcatgcagcgggaggagggatttaacaccaagatggcggacggcccggatgagtacgataccgaagcgggctgtgtgccccttctccacccagaggtgaggaaccgtgctgagtggattccttgccctgcggccctccagcctttcttccccggactcgccgagggcggcggccgacgtgtgtggggtagtgggacgtgccgaagttggggagggtggggaggcgaatccaggcctgagcgcggctgcgagcggataacgggggaggagatagcggggcgggcccgaccggggcgggctctgggacgcagtccctggctgtgcctggaggacagaggtggaggtgttgatggttctgctgtgtcgccgcgctgcgtttgagagcagaggcggaggggcctggtgtggtttttgaaccgcagcttagaccctagtcttgctccaagcctcttggggccaggtggaagcgcgtctggttttgatttctttttccttcgccagggtgaatgacggtatctattgcttccttttagtccactgtgaggggacagtttcatgggcatagtgatgtccttccaggtaatgccatgggtagcacctcgggcaccttgtgtcgggcgtccttttttgagcatttgtccttaagcgattaagaagagaggtaaaaacttttgggaatagacttacactcacattagcttgtcaaagtaccgtttttctaggagctaggggtggacagtgcaacacgtttcccatcacaacatgagtgtcttcccatgtaagtaaacagtgccccgctccacagtcagtcagtctgtgcttgtttacctccgagtttgtagctgagctagtgctagttaaggcttggaagcaattcttgatgcattctgatttttagtgatccacagtgatgtctgtatgcggcagcggcacagtttgctgaagaactcgggtagttttcatgaggttaaaagatgacagtcgtgttgtaggatgaacaaacatggaagtctctacctggttactttgcaatggagtgattctgttttttt

SEQ ID NO: 5862 - DNA, 6000 bp, Homo sapiens
ttcttaatttgaaagaataatataaacaaatgtttttatgaaaaaaaagcttaagtatccatccctaaaaactaaattattcatctcgtagatgattacagtgtaagactactacatgcaagacagatgactgttgtcattttacgtattaaaaaagttctgtatccaggcgcggtgactcatacgtgtaatctcagcactttgggaggtcaaggtggaaggatcacttgagcccaggagttcaagaccagcctgggcaatatggcaaaaaaaaaaaaaaaaaaagaaagaaagaaaaaaaaaattagcccaacattgtggcatgcacctgtagtcccagctactaaagagactaagctgagagaatcacctgagcctaggaattggaggatgcagtgagccatgattgagtcactgcgctctagcatgggctacagagttagacactgactcctcccatcaaaaaataaataaaagttcttataacatgaattaacacccttctacctttaatgctcataggtgaggagtctatggctcactattggcttaaatggatgagatgatgggaggaaacccaataacccagaaatctggaaaaaaaaaatagtagtagcagaagtagcagcaatgataatgataaaatgataataatagtcattaagttcttgctatgtgcttggaactagcactttatgtgcactgctttttttaatccagaaaaaaaacctaatgataaatgttgtattcttatgtacatattttagatgacaaaactgagacttggaggggttttgtacatttttcaaggtggcatagccaattagtggtgaagctggaattctacccaaattctgacaccagaaaacatttaattaattatctgtcctgcaaagagaccaaaaagtcagtatcttgagaaacacagatataaagtgaaaagaatagtaagatctgcatctatataaaaaataaacaaaaaaatagaaaaatttagagaagtcaattatttttcttttttaaagaaacaatcctgggtaatgatatttataaatagcttttaccagacaactactgtggctactaaagatataaagtttaatgatgtatgagtcttaattaaatgtaactctttttttattatttatttattttgagacagtctcgcacttgtcaccctggctgaagtgcagtggcgggatctcggctcactgcaagctccgcctctcgggttcacgccattctcctgcctcagcctcctgagtagctgggactacaggcgcccgccaccacgacgggctaattttttgtatttttagtagagacggggtttcactgtgttagccagatggtctccatctcctgacctcgtgatccgcccacctcggcctcccaaagtgctgggattacaggcgtgagccaccgcgcccagccggattaaatgtaactctttagtatcattgatcaaccaggtaattctggcctttccaacaacctgcagaattttcttgatacctctctcacgttaagtattctttctgtggtttacagaaaccttggctaagtttccacttaatgaatttctagttctaatgtccctaattcccactcttgccataagacacactttcctcctcagtgccccaatccaatttagtttctattctgatcctgtagcctaaaatagatggcaaaggaagcatgaaagtagtaaatagatgaatccaataaaaaaggaataaagaaaatattgaaaatgagatcttgatcagagcaaaatgtgaagaaaaattaataacacttttttaacgaagaaagaggaaacaaaacattaaacagattttgtaaaagttctgaaaataatatttttaaaataccatacaatcaggggataagttaattctcaacagcaaaagtactctagatgtaaaagtacttaagaaatggaatgataagagtgacaaagagctctctctttgtctctacagaacaattgacccgatcttccttttaataaaaatgagtctgcttcaataggcaaagagatgatacacacttgcggcaaagtataatgttgtgtcagcccagtagatccaggaggacgtcttcaacacattcccaagagcttggagagaatttaggaataggagggagagttaaaatcttagtatagctacagtcaccatataaatagagtcttcttattatttatgtacagaaaatgttatcaattctaaagttaagcacaatatacatgtaaagcccatttcttattttaacctgcagtctccctcaaggaacattgggttacaaacttctgataccattcatgttgccaaggattctggccactgaaatagaaagattgctaggtaagatgtgaagtaaacaggaaaagaaattgactaaaatattaatgacaaaatcagtgtctggagcaaaaattttaaaatctgtatttgtattctattgactaatttattctaaaataagcatactttttttctacatgcagctattggtaaataggataaatgtgccagttttaatcactggaatctagaaagtatgctaggcatatatttagaataaagatctatattaagtggatattataataatcttctcatccaaagatatttattggacaacaaaattacagggttacttaattcttcttcgtcttctcttcctccttcttctccttttcctccacctcaccatcctccttctcctccccttcctcctcctccaacttcttctactttttatcctgtcgtttttcttccttctctgtcttctcctcctcctctccttcactaaataactgaaataaaatttagaccaaattcttttatcttatttctccaactatgaaatgattttaaaataaggtttggagactattttggaaaatggaaagtgaatatttacatgaagtcacaagtctggggtgcattattttcacacttctacctctaatgttaaacttcctattattcaagcatagcccaaatacaagtgtttgtcacttagaaggatatatttatatcacgttgccttcttttcccgtatacttagaataaggatcttaatcttaaacattacataagtagaagagatttaattaaaaacttgaagaaatgtgttactgttaattgaattcttgctacatttacctttgcacaccaatgttaataaaactccagttcaaagtggatgggtttggggaattgagatagctatttatttccctacctgagatgccaagataatcttctcagtaaaataaagaacccaattaggagagttctcatttgtagctattgatcaagtttacacaaaatgctaggatttctaaataaaacaaataagaggttcaaaggcctttaaacgaggttgagggagggagaaagggaaatagttctctccgttttgaaatcctttcacctgtggagcagataatggacgggcccctctcccagctgggctccgctcccgcccctagcctggcgcgcggtcccttcccccacccgctgagccttcctgttcggtatttcggtattaccaagctataaattgcctgagagcttagagacaatcaggtcaccaccgccctcacaagagaaaagcttcttacttccgagcagaacggttcagctgggaagagaggaagcagggagagaatctatgctttagtcgtcactgctctggcaaggggtcgagagagatgggggagggaggtggcaaaaaataaaaatgaaaaaataaaaaagcatctccaacaatgttgcacttgacccaagtgtacaaacttattggtcgctgcaatggaaactcccagtgcactctccacggcctggcagccgccgctgatgggtggagtcgcgctcccggccccacctatgggacggagctgcttctcccgcatctcggctccaccgcacccttcgcgggaagtccccaggcttccagcaaagctcagcttatcccgcccccgcttccaacccggaaccccagaagaacagcatgatgagcctccggcagccaggtgggccacctccccgcggctcagtttgaggacacttgtgcggaaccctttcacatccccaccctacccagctttcacaactccgccgggttaaatggccaaagacaaacttctacctctcctgtccccggtcccagcttttcaaaaacccacagctggcgaacccacacacatcgaaactcctaggtcgctgttgcagtctgggcatgctcagtatcagggtaggttttgattgagagtaaaaaaaaaaaaaaaaaagctttgtattatgctctctttctcctgtgcatactgcttgctgaacagcttgtggggcattcctgagtctacctagaggttttatcagacgcccttgattgtgtctccttgggatctgttcccctcttacttcaccccctcccccaacccgcctccaccccgcttcccaggtccctgtccgctgtggggatggagagacactaacagaactgggatgggcgatgttggctgaacggatccacctattattagtgcgcggggattggctccttggcgcagcgtacccgaggtggagccaatcaggatgctggggctcggagatgatgggcggccgcctcctcactggagggattcctggagaagctgcagtgtggggatgctctagaccgagtactgcccccagtgtctttccacctcctcctgcagcagcggcagcggcagcagcagttagcagcggcaacttgaggctgcaccccgggcaagtccccagggtggtgctcagccgagaggggggcttggcgccccgaaggggtgtgtgtagggtgggggcgaccacgtgggaccagctggtggccctggaaaacctcccacacacccacacccacacaccccttttgtgttgcaggctgcccctccaagagcggaggcagcgagagtacgcgtgtgcctcgcgccggtccacgcggggagagcactggggaccgagacccggcaccacctcccggtccgccctccaggtaaggaagcgggactggcggcgcggccacctcggcggtgcctatctgctcgaatccatcccaaagattttcttctcgatacacttgggttttagtggtgggagtctgagacctagggagggatccccgggtggcctattgtgagaaatatgagactacatgtgcatctcctggaaaagcactttgcacagcgcccgtgatttagagcctggagttgatgttgggcatcccccatcttcttgcttcctctttccttctcttgttctctctcctccgtcccccacccccaatctcaatcttttctctctttctctcccacacctcccctctcgccctcctcccaccctaagcacgcacagcgtttctttctcctcctggagaggattgcctttcttagaggaaagagggggagtgaagaaaggagaaagatttctttctgttggggagagggatatgggggggggggggaacgtaaacaagatagaatacaagctctgcgaaaatcagagcacataaagcaattaaactgaataaggggagtagacaaccagtccagcttgggctgtcagagagaggaagcgtcaagtttgacttgatttcctccttgcaagagtctatgtctctcacttgattcgttcaaatggaacaaaaataaaccgacaatccaacccactttcaactgcttaattgcttttgcttttgagtgccaaccatctgacttttcctgtttccatctgtcctgtggggctaacaatttggtattgcacatcagtgttaatatctgaactttgaaagctttcttgagtaacaaaaaaaaaaaaacaattaaaatagattattactttcctgaggtttcttggtatggcctgttgttgggggatcaaaaaatgtaaagtttcaaaacatttgcaagggacaacaattttatagggaggcttggatttctactttgag

SEQ ID NO: 5863 - DNA, 6000 bp, Homo sapiens
gcatacttcatgcagggtgaactccagccggtctagaaaaacactgtgatggttgatgatttaccatactttgctttcaaccagtaattgtctcagattcttaaccactgatggttttggtgaatgttttggagaaaaggctcgagagaaacttcatgacactaaacatactctctgagaagtgtggtgctagaatgctaaggtgatgtcctagacttcgcagtctcttaaacatatctgacattatattatgctatggcatgctatgctatgctatgctatgctatgctatgctatgctatgctatgctatgctatgctatgctatgctatgctatgttatgtctttttaggcaatagctcatccctccctaaagcagagtgaatgctcttatttagcttaaagacagtcattggactttgagtaaagagtcattttcttgtacgttccactccaccctccagtgtacatttgcactctgctggcgaatgaccatgagctattaaatcatgacaaagaaaaagatgacaactgtaatgttgggagtgacccccaagtcccacctactgaaggaacaccacaagccttcctcactttaaaccatggcatgggggcactatcaccaagcataagaatgcccagcaatcgtctggggccatgttgggtgggcagagaggatgaggcactgagttccttcagccacgtcttaactgtgccatgtcagagagacttttcatgttgattgaactgtgtccaactcatctctcagcaccaatgcgaacttattaaacagctcttcctctaatcttttttcaaccatctactcatcagcagactagaaagaagactggctcatttctttttcctgtcagccaccaaaagggcctgggagctttgataagggcctcgatgtggaagaccacatagatatcagcaaaactgtggaggaagaagtggtctgcttaaaacctaagaggacaatacaggtactattccacccactgggtggtatttccaaattctgcacagggggttgtagctatgtagatgaggcttagagagaattcactgaccaccagaacaaatattctcagttgctttcaatctctgccagccaagtcatgctacagaccactgtcagatgaaaaaaaaaaaaaaaaagaaagaaaatcagaaagaaaactgaagcaccaatgatagccatcttgtgactgtgaccaattgcctactgaacagttcttaatgtcctgggccccagcaggaaaccactgaatctataaagtcctgtccaccagaaatgagtctgattgtggatggcctggttaacccagattgccttcggtgcctgagggacttgatattttctcattatgaagactttcccatctagtgaacgctgcaaataaaactgctcagaatcggtctgaactgcctgtttccgtggtagcaggcctctgtctggaggataaatctgcaccatcttcttttttttttttttttttttgggtttcagccagttgtgttacaaggagttccgaaatgtgctataagtgacacccaacaagatgggctcggccagttggagagggaagctttgtcaccaaagggacttgcacccctgggccagacggtggtgtccaagagaaagtgatcaaagagatacagaacccgcatgcctaaatatttatttcagttgttcgtatttcccacacttttcaaatgtgaacttgtgtcctgaaggtggagctttagtacacaagaaaattgggaaggggcaaacatgtttgtacaaaatgggggtagaatcagcaaagaatgcatttatatgcttcctcgtcgcctacgtttttcatgccaaaaagttagcacagattctgatttctttcaccgtaggagtctgcatacaattaaatgggaggcaaaagaagcccactcttaagagtggggcttatggtcccagtagaatggcagggaactgtagccatcaaagccatttatacttcttgtgggtagtatttttaagatgttgtttctttttcaaaatgaagcagcaatgaactgagtagtgatcaaaatgccgcaccacagagtatgtttaatccaaatagctcccaagatggtctgtgactgattgtaccaactctacgggacttagagaaatgacttggttaccagtgaagtaaaactatctctggaatggaattgaactgttgcttctcagcacatagcgacactgccaccgctggttcacggagccagtgaaggtcactgagttctgcatcagtcacagggaaaactgtcaaaacaccagcgcataaatcccctactatgctgtggagggggtctctgagcttcggatgaggtttttaaaatattgatcttcccacttccagaggtgcaaaaattctgaaagcattccaggagggcagggagtgggggagcaaggccagatattttggagcaggtgaaacatctgacttgtcttgcctgagatgtcccgattaacaccaactgggtactttaggcctttccccttcttcctcccctctccttatggacactccaacaccatcatcacagcacaaagggcaacctcatatctcgtgggaaggcattttctgcctcctgccaggcaaagataatgttatccaattgcaaatgaaaggcttatgaatgaaaagatgaccactctgactttagtgtatgagagccactgctgaaatgataggatccttgaacttcacatctagagcagaaactcacacttctcttcttctccctccacctcacccttctttccttaagccttccagaactcctgccatatccctcagcactggggagaacttgaagcactgttggagaagtttgaaacctgcaaccttcggcaggactcagcatgggacaaaagccacctcattcctttcccttcccaaaacagcatctcgagctggggaacttggagggaaggaagaaaggggatagcagccaattgccctccctggggcctggggtctggaaatagcctgggaaggaacagagatcatttcccaacgatccatagaggtcctcagcaccctccactcctatgcaccccctggctcatctgccagactgtaagggtgctgatggtgcccgcagctgccccgggaagctgggaggcatttgtgcatcctctgggaagccccattccgagaaatcatgaacctattccccagtgggcaatgattccctgtgcttcagaaattcttggcggctgtgggggcaacccagctgttattcaccctctgggtgaggtggtgagacctcagggggtccaaaggataaaagtgggtaatgatgagacagatggagagcctcgagggaaatacggggacttgggtctaatagtagaaagcagggcgggggctggttggtgcatttaacttgaggaacttttcagtctcactacagagaatgatctctgggggattatggcaatggccacaggtggcacttaactagagccaggtatgtaagaggccctggggctagatatggattcgaatctcggctctgatatctaccagcagtagaatgccagcacgttccacaacctttctataaccattctcctggactactaagtagggatgacaataacagtcactaattaatagggctgttatgagaattatgagtcttaacccatgtggtgagttcacaagcgcacccggcacgtagtaagtgctcagtaaatgttagccccgctcattaggttagatggtgagcagaactttccaagtgctaggcttgagagcctgggactctgttgccaagggagattagagaacctttgcaaatatgggcgctccggccctggggattgtccagaacgagagtgtggcgcctgcctttctgccacctcactcatccgacccggggaaacccacaccctgtcacaggggcgccttggtccccggagtctccggctcggccatgtctcccgcgcgcctccccggggcctccctctcgccgctccacacctgtcagccgctctcgcagcagccctgtggcccgagcccggggcctcagctgcaaccccttcgcaccctggatcctcgctccgcgcgcctggcgtatccccgacccggctgctgtcgtaaacaaaaccgggcgttggagcagcaccgcgggcggacgggcgcgggagcccgctccgtgcgccgttagcgcgccccgggagccccaggcgagccaagggggcgatggtggcggccgcggcggccgcggcgggcggctgagctttgttatgaatagatgaaagaggccacctacacagtaacccaaattacgagacctccctcctccctatctcaccgaatcaagaggggaggggagatgggcgtggagggagggcgggcgggcgggcaggaggcggagggcggaggaggaagagaggatgaggaagggggccagttgcatcccactttcacaatgggaaagtgaaacgcacaagcgcacccaacctctccagccctccccgcccgcctcgctcctctccgcccgtcccctcccttcccctccgcgcctccccgcgagcgccagcgctgcacacaggaactctccggcgaaggagggcgaggaggaaacggtgccggagcgcgcagggcttgctgccgccaccgccgctgcacaggctgccggagcgagcctgccgcgcgccgccctccccgctctccttcctgggcgagctgcggggatggggcggccgcgggagcccgagcgcgcgcaggaaccgccgccgccgccgcccgcgtctccgttgccgcgcgcctgagccgccgtcgccgccgcgcgccctgcccgggggcggcccccccagccccatggaggtctcccggaggaaggcgccgccgcgccccccgcgccccgcagcgccactgcccctgctcgcctatctgctggcactggcggctcccggccggggcgcggacgagcccgtgtggcggtcggagcaagccatcggagccatcgcggcgagccaggaggacggcgtgtttgtggcgagcggcagctgcctggaccagctggactacagcctggagcacagcctctcgcgcctgtaccgggaccaagcgggcaactgcacagagccggtctcgctggcgccccccgcgcggccccggcccgggagcagcttcagcaagctgctgctgccctaccgcgagggggcggccggcctcggggggctgctgctcaccggctggaccttcgaccggggcgcctgcgaggtgcggcccctgggcaacctgagccgcaactccctgcgcaacggcaccgaggtggtgtcgtgccacccgcagggctcgacggccggcgtggtgtaccgcgcgggccggaacaaccgctggtacctggcggtggccgccacctacgtgctgcctgagccggagacggcgagccgctgcaaccccgcggcatccgaccacgacacggccatcgcgctcaaggacacggaggggcgcagcctggccacgcaggagctggggcgcctcaagctgtgcgagggcgcgggcagcctgcacttcgtggacgcctttctctggaacggcagcatctacttcccctactacccctacaactacacgagcggcgctgccaccggctggcccagcatggcgcgcatcgcgcagagcaccgaggtgctgttccagggccaggcatccctcgactgcggccacggccaccccgacggccgccgcctgctcctctcctccagcctagtggaggccctggacgtctgggcgggagtgttcagcgcggccgctggagagggccaggagcggcgctcccccaccaccacggcgctctgcctcttcagaatgagtgagatccaggcgcgcgccaagagggtcagctgggacttcaagacggccgagagccactgcgtaagtcctgcccccggggcgccgcggagagcgctgctgccggggagccgccgccgccgccgaggcagaa

SEQ ID NO: 5864 - DNA, 6000 bp, Homo sapiens
agctgttcaatcatcatagttaattttgtctgagttttttttaggcagaaaataactgaaaaacccttcaaatcctagtgagaaacctagttgtaaatgtctattaaatcaaaccctccatttagtaagtcaagtcttaagagaaagtatgaatgccttaggcctcttcccaacggcccatcttactcagtacgactgtcaagttgattttatttctgtaaccattatcaaaacatcctacctctgggatttttcaaagaattttttaaaaattagttttggcagcctggcatagtggctcatgcctgtaatcccagcaccttgggagggcaaggtgggaggattgcttgagctcaggaattggagaccagcctgggcaacacagtaagactccgtctccatgaaaacaaaaaaaatagtttcgtaaaatgaagagttcttgagattggatgtaccatgtgaatgtacttaacacttctgaactatacacttaaaaatgagtaagacggtaaatttatcttatgtgctattttaccacagttggaagaaaacttcatctctcatcaaattaatcttttactttccgtatcttagaaccttgtcagaagctttagggtcatttaaatatcatttttaaaaaatccctggtaccaattttactctttttaaaaaatgcgttttgtacacaaatctgcttccaagagatataaattcctgttctagtgtcacagaaattcaattaactacgtatgtgctggagttgattcccaataaatatagcaaagtcctattacgtacataaaaccctcaacgcatactcactgaattcaattaataactgtgaacttgggcttgccattgttagttaactgtgtattgaaggaagtcacagacataactcagggagctggctaacctaattgtgggccttgtacagacctggctgcctcactttccttccttataaatgggggagttgaacaggcctctaaagcccataggaatctgagatgataacttctgagacactcatttcagaagaacctcatgtactgtggcctctgtctcctgcgttgatgttttttcagttcacctttgtctgtgttcagcataagacacaagctccagaagggcaggcactttgtctcattcactgatgtatcccagtgctaacaacagggcctgggaataatcacagctgccacatacacatactctttaatatgtctccataacagaaaatttcttctttaaaaataatcacattcaaaaatgtacatccattttaatgtagaataatattttgaaaagttagcaggaatcaatttcaatacgattattgaaaaattccttaattattaataggaacaagtgttcaactaagtcactggtagagcaatatccaaaatccttcattatttttttttcatggctctattttggaagaaacacaactcaaaaaataataagccattatattatggtctactccaatgtgaaataagtgcatgacatttggcaataaatctagcacctttggatcttaatactgcatcaacagtcagacccaaagcttcttagagcaaagcagcaaatcttttatttacacagctgtttggctccagggaaatataaggtaagaaagtaaagcactagtaccattttactaactattacaaacatactcgtcatctgttacacacagatggctgtggttcacgtgtacactctctggctactggaccagccaaaacgcaaagcacagacaatgaagacagtgacctgtacatgttcaaaaggacacaaaatatatacctatatatacctataattctctctccttttttctttttttttttttttttttgagatggagtcttgctctgtcacccaggctagagtgcagtggctcgatctcggctcaccacaacctccgcctcgctggctcaagcaattttcatatcagcctcccgaatagctgggactacaggcgcaccccaccacacctggctaatttttgtatttttagtagagacagggttttgccatgttggccaggctggtctcaaactcctgacctcaagtgatccacccgccttggcctcccaaagtgatggaattacaggcttgagccactgcgcccagcctctcctttttcatatacagcttaaaataattctgaaatctccactaagggcagattattttatagatgtagaaaaacaaagcaagcttttctgctggatacatataacctagatgttctacaacattccttttattttcttaaattaaaccaacccttccaaataccacagattagattcaaaagcaaaaatcccctcccttaacttcaagtaactttcctaaacgtttcaatgaatttgactattgttcccaaaaagcaccataatcagcttgtaagaactatgtatacatataagaatgggtagaaataaaaccccagttctcttccatattccccatctagacaccagaaagaattatgataaatccaacagatgggtgagcaaaaaagtagttgatgcttctcagccagcaatgctaaaaaccaaccaactcggctagacacaggaagtgtcccactttaaacaccacaaaaatttctgtggatttctttaattgtaaagttgataaaatacaaaaatagcttgcattattttaggataattcaaatgcaagaatcatgaacttccagtctgggccctagaaattgggtttacataaatgtgaaattacatgcttctgtgcctgttccttataaactgttaagactggaattgaaaactgatacatataagacacggttattttaaatacatttgacacctccaaaaaggaaagagctaaaactggctggaaggattttaaaatttccaaccacttttaatttaaatcaatttcttgaacgaaggtaaggcacagaaatgtaggatgaaaataatttaccttatgtaagtataaagcctccctttggcaaagaaaagagagtttataaagatatctcatataagtgcatataacatcaaaaaggaaagacccacacaacacccacttcttgctttcttttcctattggctaacttcttgtttcgtttgttgtaatctgatcacagggagcaatgcaacactacaatatatctaggctttagaaataatacaaatcagaacatttgagtgctgttggacagtttcaagttgcaagaattttaaacaaatgccaagaaaagcaatgaaaatttaatctgatacttaagtgctgattctggaagtaaccttgagaagaagctttaaactatttcactataaaatttctaatgaaagtttcaacgtggacaaaaacgtaaaataacccataacactctacttaatacataagttctggtttaaaaattaacctatgtacttacgaagtgaacgtaacaccactttggtaattattttgtaaaacagaaattgttccttaagaatgttcagaaacacaacgtctagaattgctgaaaatccacacaaagatagaggctttgtcatttggatgaaggggaaagaactatgggaggcagacagaaaataaagctttgtttaccctaatcaggtagaaacaaacaaaataattgtaattgggtgcagacaagcaaaaaaaaaaaaaaaaaaaaaacctcaacaatctcaactcctctgcttctcaggtaacagaggtaaaaccaccaggacatgacaatgtctacgcctctttaaaatgggtaaaaggtttaccagcagatacaaggttgaaagcgactcacttagtggccaaattgaacacgctgagaacactgcctttacctataataactgatctattaacttgggaatctacactattttcacatgcaaaggcgaagtcctcgcactgctggagagatgagcgaacgcccttcacacatcgcatttcacctggtgcagagcccccagcacagtcccccttggaagggagatcccgagaaatcccgggtttccaaacagcccctctgggcaggaaaagacgagaaagccggcagcgaatcccattagctccgcgcttgccgaggtgctcggcaaaggtacggggcacacaactcgcccaccccggcgaagaaagttgctcgcgagcccaagcctagcagcgctcgccacaaactttcccgcggcagcgcgagcgccgtcacttaccggctgcagaagtcatgattccccggtgcagctcgcttccccgctcggcccctcaatccatcttcccctttcagtccattgttcccacagttcgggtaggagagaaaagcccccgcagcgcccacattccgtcccgccgccccgcggcgcagcctgagcgccacacaaaggacgcggccgactctagcgaccctgcggcgctcccgggcgcgagccgccggggtcgggcgggcgagcactagcaccgccccgcagagcggcaggctgacagccaggcgcgggcacgagcagtgctctcttcggctccgctggcgcgtgcccttctcgggctccaaaaatcagcagtgctccgggcgccccctgctagtcgcggccgtaaaaggcagacaaaagccctagcctcctccaatcggagggctcgagcttcagctcgctcccgcctctctcgcttacacgctcactctcttctccaataagcgggctcgaaaagggggcgtgagcggcgaggcatattgggaattgtagttttctggacccacgggacgggcaggagctggagctccgtgccgcctgtactcccgccttcatttcccatcgtgctgaggcgggtggcatggcggagaaggatgacaccggagtttgacgaagaggtggtttttgaggtaagaggaaaatggcggtgggtgtggattgcctttgtttgagaaggacgagacggaaatcgaggaagcaaggcgttcccggggcgagggatcgggtgacgcgctccagctggcctcgaccaccgaaccccagcgatttcagggcctagagtccgtcgtcgcctgacaggtgtagccagaggcgccctggccgtggccggcctctatctcgggcccgcccagaattcccagacggtgcccggttgccaggctctgggctggagcggtgtctcttccttcctgggaatggatgtgcggcgggggggactgcgcccggctggggcggggccgaatcgtgccttttagatagtcacaacttagcctcctccttttccatccgcgatttttttgggtcagtatccagagtgcttcaggtcactgttcaccgtcaaggcgtggccctcggaatgaaggcagcaggtgcccgttttctaacacggtttaaagtctatttgtgggacctactgtgggtagttagggccagggcatctcagcatctagattcgattcttttgtcctttgctgttgcgctaggtgtagccagttcttctgactcggggctctagatgtgagtgcttttgtgtgggactattttaagacgttctctgccatcttgaatgaaaaaaatcgggcgagtgtttttgatgccatttttttccatcagacacaggtcaaaactcgcacccctgtacgtatgtgtattgcatgtatacgctttactttcatttatccaactagattttaagaaaatttaaaaatgaagtggcccatgccatacagcgagagagcgaggcacagacaggacagaatgctaaatgttgaaatatgtacaaactgtcattgaaggattaatttctgttcttgcggcctcccagaggctacacccagtacgcgatatccgaggtgaatctttaactatgaattggattagaaaaaccggcaggagaaaatgtattacagggaaagagaactgattatgccaagcttgggaagtgtgaaagtacctggtgtgcatttttagggggcggggtgtggagggtggctatgtaaagtggcttgatgtggctgcaatgaagaagcagtggaaa

SEQ ID NO: 5865 - DNA, 6000 bp, Homo sapiens
gggattctcccacctcagcctcccaagtagctgggattacaggcgcatgccaccaggcacggctaacttttgtattttcagtagagaggggcttccaccatgttggtcaggctggtctcgaactcctgatgtgatctgcccgccttggcctccccaagtgctgggattaccggtgtgagccaccgctcctggcccctcttattatttttttttaagatggagtcttgatcggtcgcccaggctggagtgcagtggcacgatctcggctcactgcaacctctgcctcccgggttcaagcgattctcctacctcagcctccctagtagctgagattacaggcgcccaccacaaggcccagctaattttttaatttcttggccaggctgagctcgaactcatgacttcaagtgatccgcccaccccagcctcccaaagtgctggaattacaggcatgagccacgacgcccggccgagaactaaacattttttaaggtttttagcttcttactattttacatcacttaaagtgcaacttaccctcctgtttgaggtgacacccttaaattcacaaccaatcctccgcaaaatgggataatgaaaaacaaagccagctgtatgttaataatattaagaacttcaaaaaaagaatggaggcagttatccaggtgatttttgtttgtttgtttgttttgagatggagtttcgctcgtgttgcccaggctggaatgcaattgcacgatctcggttcaccacaacctccgcctcccgggttcaagtgattctcctgcctcagcctcccgtgtagcttggattacaggcatgcgccaccacgccaggctaattttgtatttttagtagagacggggtttctccacatggtctcaaattcccgacctcaggtgatctgcctgcctcagcctcccaaagtgctgggattacaggcgtgagccaccgggcccacctccagatgatttttttttaagttatgggaaagttttctgatttaaaaaaaaaaaaaattgcatcaggccagacgcagtggctcatgcctgtaatcccagcaatttgggaggctgaggcgggtggattgcctgaggtcaggagtttgagaccagcctggtcaacatggtgaaactcttgtctctactatattacaaaaaaattagctgggcgtggcagcaggcgcctgtaatcccagctacttgggaggctgaggcagaagaattgcttgaacctgggaggcagaggttacagtgggctgagattgtgctactgcactccaggctcggcaacagagggagactccatttccaaaaaaaaaaaaaaaaaaatttgcatccaccaggcacagtggctcatgcctgtaatcccagaactttgggaggctgaggcgggtggatcacctgaggtcaggagttcaagaccagcctggtcaacatggtgaaacccagtctctactaaaatacaaacaaattagatgagtgtattagcaggcgcctgtagtcccagctactctggaggctggggcaaggagaattgcttgaacctgggaggcggaggttgcagtgagccgagactacgtcactgcactccagcctagtctctgttggacattctgaccacagtcagaatattaagacttctaaaaactctcatttccctgtgaaattttctgaattaaaattacttttatctaccaatgacctggaacaccccgagccccccaacccccacttttattaatagttgtcccgcctttctggaagggaccaatctacatcttacacatattgattttagagacagggtctcactctgtcacccaggctggaatgcagtgacaggattatggctcactgcagcctcaacctcccaggctcaagtgatcctcccacctcagtctccctagtagctagaactacaggtgggcaccatggctaaattttgtatttttttgtagagagggggttttactgttttgcccaggctagtcttgaactcctaagctcaagggatccgcctgtctcagcctcccaaagtgttgggattacaggcgtgagccacagtgctcagcctttgtgttttttgtgtcacattgatcaaatattttaaaaattatcttttatgttgaaacaagtattaaggagatgatggaaagagtcaattccttgagaagggtgagagccagagtacaagtggtggaatttccttctgacaggacacatctttcactgaaaagaaaaatgcaagagaaaatgaatgcaaattggaaagtctgacgttgaagcattcctcataggtggtttttattttttgaagttgaggcaaggtcaccagctaaaaatgagaggtagggaaaaaggatgtgaaatttgaggagatgtgaacgtatgaatggttaacccagagactggaatagcattgccagccagtgttgagtgctcctgagaggactgaggtcatgaattaaaaccagttagcttgttatatgactgacttttctccagcagcttttgctgtttggatgtaagcaatgagaaagttcagctggagcatggtttagtccaagcaaggctgagattctttcaagcaaaaaaggagacattgagatcagagagttgaaaatgtttgtaaaagagtgatgaaaaggactgatcagggaatttaagtcaggtgagttgcaaaattattacatgatggcagaagcagaagagttgagtttttttaagtgttggggttaatagcgtggaggtcttaattaggtaagtgagagtaccataaattagctgggaaaaaaaggctagtgattgacaattgggaagcttgaaactgagatttcaactgatgacaaggttcagaatctgactgataccgaagtggttaagacgcaagagaggaacaaattgttggagatgaagaggtcagaggtctaagaggccaagtgttggtgttgcatgggtcacctacaagcatgctgaattcagatagaatgtagacaagagggatggtgaggaaaacctacggcaagcagctctataatttctggaaagtgaccaggaggctcgtggatgatggcaggaaggagagtagaaagtgatttagccagaagatatgaacttcaaatatttttgaagcagaaaagagcagaaatggtttggaagtagcaatcaggaccaaagagaccacccaaactcaatagcccaacctcttagccttagggtacgcagaatctgaaaagtgtaatctcaattttggagctctacagcagtaaatctgcaagtaaccacctgtagctaatgtccagggattaaaaaaaagataatgaaaatgtttttgcccaggaaacattaatttcaggcgtatctagaatgcagttcttgcattatacgtactgggttaccagtcattgcaaagtcatggtcctttgcctctcagctcagttccccttctgaagataaaaacatttgcctatgtgtccagggaagctgtgaggacaaaaaaccaagcaacttttacaagggatcataaaaacctacctaacaacttgctaattaaaacctgatttttaatttgcattattgagcttaataccattgcttaaatgtatgtgaatactgagatttttataaaggaattagttacctctaggaaaataattatcactaaaagaaataatatcgcaatttgaataaaagtaagtcgcttaaatcataggaaacatttttagtgaaggcgtttgttttaaatgtattctaacctagcaatgtagaaagcaggcaaacatttaaaaaaaatttaaccagtttctaaaacatagtttggagctcagattctggggaaatgattaacacaccctacatccaaggtctcctttcctttctagaaagaaagcatctttaaacatacatattcatcagaaatacaaatatttgtcatcagtgatactaatttccaggcaaacattttaattgcagtcaatgtattagattctaccaggttttaatttggatcggtaatacgggtttgattagggttctaggcctaattataggtcactagtcttcctttaggattatgcaccatctgttattttaaattgaccattgagggggttcccaagggttctccttcgttttgttatcaaacgttaggtttaggattcttgcgggtggtgggatccaaagccagagacggtttcaacaaaaatgcaagcgcgaatttgtcttgcgtctgaacgcactgttcaaattaaacaatttagacatgccccaactatgacactaagaagtgaatggtatagtacacttttgtcacaaattcaagggtaatttaagtgcccgattgtagaggtctggcttcccctgggtttctggaacaaaagaagcgttcgcgaggagaggggtaactccccgccctccccctcccaaagtaaatcaaatcaaggaatatgagtgcctgcagacaagcctcgcttcttttcttccccttcagggctagcgtttggggaaggcaaggctgcggctactcttggagcttcagtgtcccgggaggaagaaaggcccagccaagggtcctcacactggcgtggaattcggcgcgttcgtaggcgatcgaccccagagacgaaagctgcttctcaagctgggggagggagaggaaacggcgcacaaaagcagtacgacctgtcccttatcggcgtctaaggggaagggtggagaaaacgaaaacagaagcgggccgggagcctcggctcccgccccagcgccttttaaactgcgtttctacctcctctcgctcagcgcggcggctaatggaacccgcgcgagccgtctcgccaatcaccgccgcgcttcctcccgtcgcccgccaatggcggcgcgcgttcttggggcgtgggcgaagcaggctgctcgcctcctgcctgtagtgtgtgggctggggttggtgcgagcttccagcttggccgcagttggttcgtagttcggctctggggtcttttgtgtccgggtctggcttggctttgtgtccgcgagtttttgttccgctccgcagcgctcttcccgggcaggagccgtgaggctcggaggcggcagcgcggtccccggccaggagcaagcgcgccggcgtgagcggcggcggcaaaggctgtggggagggggcttcgcagatccccgagatgccggagttcctggaagacccctcggtcctgacaaaagacaagttgaagagtgagttggtcgccaacaatgtgacgctgccggccggggagcagcgcaaagacgtgtacgtccagctctacctgcagcacctcacggctcgcaaccggccgccgctccccgccggcaccaacagcaaggggcccccggacttctccagtgacgaagagcgcgagcccaccccggtcctcggctctggggccgccgccgcgggccggagccgagcagccgtcggcagggtaaggacgcggggccggggctacaaaggcgggcgtttggcggttgccgcgcgcgctcgccgccgtttgcagcccctccctcccgggcgccccctcgggcctcccaggtgcggggctgtccctgcgccccctcgcgtcgccccttccccgcggggctgcaggcgccggagcggagaggccagaagttggggccgcggggttcgcgttctttgacgtgtgggtctgggaggtgtggagttgcgttggcggcggttgttttgcacgcagtcgacgccgcttccctggaccaccagccgcctgcagcgggcgtttagacggggacttccgtgccctttcgaaagctctggaggggtggccccaaaatgctataggttaagttcgagcgttttcccgctttattaactgaaatgactcgcagcagagtctcagagcgctccctggagggcaactgatgacactctaatttctaaccaaaatttgaaatgaggaaattcccgcctttttatacttttgcgtgtggagggctttttgaaccgtttatgttt

SEQ ID NO: 5866 - DNA, 6000 bp, Homo sapiens
tacaaaaaaaatcagccgggcattgtgatgggcgcctgtagtcccagctactcgggaggccaaggcaggagaatggcgtgaacctgtgaggtggagcttgcagtgagccaagatcgtgctactgcactccagcctgggcgacagtgcgagactccatctcaaaaaagaaataaaaataaaaaaaagaaagcaaggtgttgggttgaccaagcagatgctttggattggtttgcttcttctaattatgttggataactgggggaaagaaaatgataacttagggctttaacttctcagttcaacatcagataaaggaccagaaagccttgactgctttgtttgttttttgagatggagtctcgctctgttgcccaggctggagtgtgatagtgtgatctcggctcactgcaacctctgccagcctcctggcttcaagcgattctcctgcctcagcctcctgagtagctggtaccacagccgcgcgccaccacgcccagctaatttttgtatttttagtagagacagggtttcaccgtcttggccaggctggtcttgaactcctgaccttgtgatcgtccaccttggcctcccaaagtgctgagattacaggcatgagccaccgcacctggtcgccttgactgctttgctgtatctgcaagactgtactttctaaaaatcaaactcaaaatctaattctgaattacaatgcaaattgaattcccaatctcatagtgtttaaagttagggcaatgttttgagacccaaaattttggaatagtgacacctgggcagattatgattccactaggaccatgaacccccatattctttttttttttcttttttgagacaagatctctaactgttgcttaggctggagtacaatggcgcgatctcggctcactgctacctctgcttcccaggctcaagtgatcctccctcctcagcctcttgcgtagctgggactgcaggggcatgccactatgcctggcttttttttttttttttttttaagagacagggtttcaccatgttgtccaggctggtttttaactcctggactcaagagatccacctacctcggcttcccaaagttctgggattataggcgtgagccaccatgcccagccagaacccctaaattctgttgagcctccttgtcagtcaaagaagcccttcctctcctgtctgaggaggttatgttcctcgtccctgtgaaatctgtaatggcctcacctgaggtggttgcctggcgggatctgctgattcttcttaaaacctactgtccactttgggaggccgaggcaggtggatcacctgaggttgggagttcgagaccagactgaccaacatggagaaaccccatctctactaaaaatacaaaattagccgggcatggtggcgcgtgcctgtaatcccagctactccggaggctgaggcaggagaattgcttgaacccgggaggcagatttgaatctccacagtggagagttatggtccttcaggcaatttccctacttgtgtcaggttggaggccgagagcctcttgaatgttaaggaggccaacccccttgtcttagtccatacctgctgcaataacatcacctaaagacggataaaaggattttgtatcctcttttgggtagaattagcttgttcacaattgtccaagggacagctgcttcatgttaggtagaagtctgattttgctctttagtttttgtctggaagttaaatatgattacaagaggtgttcattgatgccatgttgacaaccgatagactctggtactttttttgttgctgttgttaattagtttttatttcataatcataaacttaactctgcaatctagctaggcatggaaaggaacaaggaaaacatagaacccaaagggaactgcagtgagagcacaaagattctaggatactgcgagcaaatggggtggagggtgctctcctgagctacagaaggaatggtctggtggttaagataaaacacaagtcaaacttattagagttgcccacagtcagcaatggtgatcttcttactggtcttgccattcctggacccaaagcactccatggtctccacaatattcatgccttctttcaccttgctgaagaccacatgcttgccatccaaccactcagtcttggcagcacagatgaaaaactgggaactgtttgcgttgggtccagcatttgccatggacaagatgccagaaactgtatgcttccggatgaagttcttgtcatcaaatttctccctgtagatggacttgccaccagtgccatcatggcatgtgaagtctccaccctgacacataaaccctggaacaattctgtgaaagcaggaacccttatagccaaatcctttctctccagtgctcagagcatgaaagtttcctgctgtctttggaaacttgtctgcaaacagctcaaaggagatgcggcccaagggctccgtgtcaaagaacacggtggggttgaccatggctgatagcacagggctcctggcagcagcggtgcctgcaaagcccagtggtgttttttttaccatgtcaacttagctaggctagaaccacatttcctagattcctttccctgcatagttttgggttagggctagctataagagaaatgtgtgcagtttggaaggcagaagtggagcaacagtcattacattctgaaggtcaccagctcccacatggggtaggagctgggcctgcagctccttcagttaccactgtatcttctagatcaacttctgtgagttctgggccacgagcatgtgcagccccatggtgaagggtaccagctgttccagctgaaaaaatgtgcagcaaagggtcacggtattacccggtgctgggggaagggaataggaagattcactacagtcatatatttttacataatatttgactttttcatgacaaaggatttttaaattagaaaagcaccataaagttgaattaaccaaaaaagagagagagaaagtccagacccttcagtgactacctctgtctacataagatcagactcctcagtctggtatgtgaggccctggacaatcaggtgctagtgtacttttttaactttatctgtcactacttcccttcctgtgccctccactctggaattcttcctgggactgtaggactttagttgggccagaagggctgggtctgggatagggttgcttagagagtgccgtgatgccgcagcctcaatgctaacttttgtttttttgtttttttttttttttgagacggagtcttgctctgtcgcccaggctggagtgcagtggcatgatctcggctcactgcaagctctgcctcctgggttcacgccattctcctgcctcagtctcctcagtagctgggactacaggcgcccgccacctcgcccggctaattttttgtatttttagtagagacggggtttcaccgtgttagccaggatggtctcgatctcctgaccccgtgatctgcccgcctcggcctcccaaagtgctgggattacaggcgtgagccacctcgcccggccaatgctaactttttttaggtaacatcttctgtagacttttagacattatctcattgagttctcatagactctgcaaggtaagtattactcccatccagaaccagacacctgatttgcagggtccagtgcaaactaaaaaaagcgtggccccttgttcatacatgtattaagaatttcaagccgggcatggtggctcaggcctgtaatcccagcacattgggaggccgaggtgggcggatcacctgagctcaggagttcgagaccagactggccaacgtgacgaaactctgtctctactaaaaatagaaaacttagccgggcgtggttgtgcacgcctgtagtcccagctactccgggggctgagacaggagaatcgcttgaacccgggaggcggaggttgcggtgagctgagatcgccccactgcactccagcctgggcgacagagcaagactccatctcaaaagaaaaaaaaaaaaaatcaaaatgacagcagagcattaaatgaagtgtaaggccatgtgtgactgtaccagtgtgaacctatgaggccagtcccacccctatcttacatctagggaacaggtacacagagatgaagtaaattcccaaggttactttgtcaagagcttggaaaatataagagtcagaagtctaacaggttgaatccctattaaactctccccaactaaactacgcccctccctgttgagctgaatctaatgaaagcttcctaaatgtattaaccacacacacgcacaatctgctatcagtcactttcagtagttcatcgctgtaacatctcaggagttcaatgtttcaacgtgttctgtagattactgtgataacgcggcaagctgtcgtaagacttcttgctgcacatttctttttaaaatattctccaggagtctgatgaaaaatacagacatacctatgtttaatgtcaatggatggaacttattttaaaaagtactgtaatggcagaagttgtgacacaaagtactgcagtgatgttgtaactccaacacctaaatatattatcaagcattcgcgttttgttttgttttttaagtgactactagatactgtgattcacttaagtgaagcgaactgaagcccgtggtcaaggagagacacctgaaggtgaagggacaaagcgagcagggtaagagctcgagcccgacccctctcaaaaaatatagacccggaacgcgcgcctgcgcagaacgaatcctcccgcgcacaagccgggcggaagagctggggcgggcaggggcgggaataaggttgctaggagaacgcgatgacgctacgggctcggcgctcttctccaccaatgggcgacgcgtacttgcagtggcgcgctgtgtgcgtcacgccgacgacgcgcgaagggcacacatcttaggacccggaggacgtccggcctctgtgagccgcaacctttccaagggagtggttgtgtgatcgccatcttagggagtgagtgtggccgggccttctcctgtggcgggtgtggggagcggagcccagagctcctgtggggccgctgctttggcggtgggcccagccgggagcagcctctttcgaaggccgccgtgacctcttcaagggcgtggagacgggaaggaaaaggccccggttggggttccagggcgccggtaacgttaaccggcgccttgcctgtcctctaaccgtcgctccctcctcccctagaaagatgttctcgtccgtggcgcacctggcgcgggcgaaccccttcaacacgccacatctgcagctggtgcacgatggtctcggggacctccgcagcagctccccagggcccacgggccagccccgccgccctcgcaacctggcagccgccgccgtggaaggtgagatcagaccctgcccaatacagtcgtgtggtctacttgtgggccgcccagcctttgaggcctggacccggcttggaggacagggaaggacgagtccagcccgctgcaccgtaggacggcgcccagttgcttgccctggggtatcggccttttccaccataggcgggtgtcagatccttggccttccctcaagggcgtggaagcgctgaggccctgtgtcccttcgtgacctccgtgtgcccgagggaagagaggccgtgactagctctttctccgccgtgagctcgcttggtcagcaaactaagtactgggtaaactctcctcccgaaactactgaccacccacagttctactaactatattacctgtcctttgatttgcccttagttttcttaaaaatagtcctttcctaagttttatatttgtcgacgccaggtcagtcatttttgcacttaattgtatatgagataactagatgtcctgttttcgtgcgactggaggaggcagcttgcagccctacataggcaatagaaaggagataattggtgggcgtccctttggtgtgattat

SEQ ID NO: 5867 - DNA, 6000 bp, Homo sapiens
aaatccacccccaacacccccttctctccctgccattatctcttccacagttttaaatttttctcccaggaagccttcatcaaatccctcaggcaaggtggcacaaagcctgcctgaaatggagggggcgtggagaagtggaagtaggaggataacacacacaaatgaatatttcaataaattatcatgccatgaatgtcaaagtgtgctcaagaaatgctaatgtccttactgaggagcagcaagaggcaggcagggggcctggaaagactccatagaaagacctggatgatctggtggatggggccagcagaggcgctggcaggggcaaagtgaaaaaaacacagtgaaggcacctggtggggtgaggaggggtactggggtgggtggagggccaggagctgaaggtttcctagttatgcagatagagtttaggagttgatcaggggccaccagttgagaaatatttgagagggatgagtggctcacggaactgatttctgggctgtgcctggagacggggaggtggccagggctatccagagggcagctggagtcggcttagggtagggcccaagggtcccacagacctggtcctcagtaagggagggagaggagtctttcgggcctaaactaggtggaggagcaaaggcggcatcagaaagtcagacaaggcctggcgcggtggctcacgcctgtaatcccagcactctgggaggctgaggcaggcggatcacttgaggccaggaattggagaccagcctggccaacatggtgacaccaatctctactaaaaatacaaaaattagctgggcatgggggtgcatgcctgtactgaagctactcagaagactgaggcaggagaattgcttgaacccagaaggcggaggttacagtgagctaagatcacgccactgcactccagcctgagtgatagattctacctcaaaaaaaaaaaaaaagaagaagaaagtgagacagaataatgagggatagtcctttcctccttcctctcctctctcctttattttcttctcttccttcttccctctctccttcctccctcttcatcttgtcttcccttccttcctccctctctcctttccttcgtcctttcttcttttctctccctttccctctcccatccttcctccttctctttcccaggcaattcttttcttttcttccccaaccctttctcctctccttccctcccccttcgtctcttcccttcccctctttttctccctttctctttcccttcttcaatccctttctctcttgctgtctttttctccaccttgttcagaaaagcctgcaaagcagagcctgctctcagagtcatgtcacgagtaacccatttgtgttacttgcggtttacctacctgtagaaaatttgtaccctaagatctccacatactgcgggcaaatggtttataattcaacttcacaaatatttactgtgctctggttaactgagtatcctttgtgctagaggtgccagagagatgcaaatggcagcgccagtccttggaggagccagtctggggcccctggctgatgttggcagaagacacatccctctctcccttcaaggatgctgaagagctctctgtctactagtaccctgggcccacttttctctccaacaaggtgcagaaaagggcatcgttgccaggtttgcaagatcgtaacaagacagtgcattgtaggtataatctgccggaatgaggaggcgctcagcctgcgcggattggaagggccacataaacatctgtcagtccattgacaacagcacccagaagcccgaattgtgacttcacaccgatttcttcccctgctataaattctacaagatcgtcaacataaataagactttctcctcaaccagtttttcagggccatgccaggctttaaaatgggcaggcccctggccgggcgcggtggctcacgcctgtaatcccagcactttgggaggccgaggtgggcggatcacgaggtcaggagatcgagaccatcctggctaacatggtgaaaccccgtctctactaaaaaatacaaaaaattagccgggcgtggtggcacgtgcctgtagtcccagctagtcgggaggctgaggcaggagaatggtgtgaacccgggagacggagcttgcagtgagccaagatcgcgccactgcactccagcctgggcgacagagtgagactccgtctcaaaaacaaaacaaaacaaaacaaaacaaaaatgcaggccccagtttcacttgcatgttgttgaatttggagagtcaatcaatcaagccaggtcccacaatgagcacaatgccaatctgcagaatctttcagggcaaaagggaatttagaaagatgagggagaaaggatctgaagactgatccgttcctctttcaatgttcaaagtataaaatttttctcctcagttttatcagttaatactgtcctttacttggctaatatttattatatagcataagatgtaacaaaattttcttaggctaggaatggaaagaaagcaatgattctaactgtagttgggcagtttagagtgtgatgaaggagaaaacagaattttttcatcacccctcaatgtgcatagaacaacagaatcacagaccattaccactgacctttgtcatagattttagaggtgatctaatctaacttcctagtccaagtaggcattacctctctgcctctgacttatttgtacctactatgtaccagtcattgtgctgggcattagaaagagacagagatgaagacaacttggatctccaggaaggagttcagcctagtgggtacagtggcccaaaagaggtttggacctagtgctcacagcgcagaggaggaaagttgcaatttcaggtgagaaaacagcaaagacttcttgggagaggtggtagcttatgtgtcacagccttaatcctcactgtgtttgggcaggttcctgattgtgggaatgcaagaatggatgttgggcatgattcaccatcctcccccaccatgtgggccaactccatgatctctgtgactcacagggaattggacttctgatctcttccttgaccctgtgacttcccaaactgccttgtgcatgtccaggctttggggcaggtaactgaagtctttggcctatgaggtgagaggtcacttgggtgacctgggagtaaatcccttcccctccctggctctgtaaagccaagtgttaaatgagagacttatattccaggcaaaggctttgtgcaaatgcccatctaagccatgccctctgcaaggaatcccctttcttagtgatgatggtggggaggtggggagggtgcagtgcaactcccattcctgatctcctatcaccagagcagaagaatcactggagaacgactctgtctgaagcttgttcagcctggcttccttgagcaagcaacttattcacaggtaagtccaaattaatacagcgcacaccggctacataaatattgtgctttgattgtcttctgtaatcaaaggcaaggctgctgagtttgttactttccccaccatgcaactgctggaggagaactctgggggaagggaactgaggttgcccaggtggtttttgttgcatgtgtctaactgcaagttgtgtctctgtctatcgaggggaggataaggcccattacattcagattcaataagaatttatcaaatgcctattttgtgagaggcattgaaagacacagtatcttatttcatttttaattgaattagtaatgacttgataaggcacaaaggttagtctaactaacattttttttttccctgacatacgagtgatccctacactattggctgtgtccactttattgattgtgaaacagcctaaatgcatggaattggaaactggaagtcattctacacaatacaagaaagcagcaccatctttccatgtacctgccagtgctatggctggcttggcttttccagcagttttctggacttggttgaggtggcttcctaggggcattttctcaccccctcccagctaagactgctgttaattttgaataatttggaggatgctctaccctttggggtagcagagttttgcaacccacagatcccttttgccttgaggaatggtggtgatggtgggtgtcagagattctgtctgtataagtccccgggaaagctcagctgtcgcctgacccgagggtcgtgcagtttccttaaccctgactttaagtcagccctctttaaccccgactcccaagctgggctgtcctttgaaagaaaaacgaaaccgcccagttctgagcgtcggaaaatgggcactcgctccctgggggtttggggcaacttccccgctacgtcgcccagggattttaaataattgccagccaccagaaaccccctaacccttaattcttccctccgagacccagcccgctgcttgccacttccctctccaaacgctggcgggggtgggtggcagcaccgaggcgattttcttcgtctttttttcctccgggttttgtcatggaaacgctgacacaacctccagacggcggccgagcccggccggggactgagggcttttgggaccctgcgggagcgcggcgcgcacaccgcactccccgggcaacagctggacgcgaccatatcccgggtaggggcggggggagcgcgacgctccgccccggcgctagggtccctccctcctcccggctctccgcaggcgccctcccctcgccgggggccgcgagttgcatttggtaaaacccagccccggaatatatagatcgttggagcgcaatgaagtagcctttggagagaagggagagggcccgtcggacagccacagcggccagcgcagcggcagcggcggcggcaccaccatcaccgctcgcaccccagccgcccggcccgcgaccaggcagcggcggccgccggcgggatcggaggaggcggcggagcggcgaggaggaggagcaggagcgcgcagccagcgggtccacgcatctcagcacttccagaccaactccggcaccttccacacccctgcccgggctgggggctccgagagcggccgcgaagcgactccgatcctccctctgagccttgctcagctctgccccgcgcctcccgggctccggtccgcgcggcggggtccctgctcctgcgccccgggcgcgcttcccggacaccccggtccccgcagccaggacaaagccatgaagccagcgctgctggaagtgatgaggatgaacagaatctgccggatggtgctggccacttgcttgggatcctttatcctggtcatcttctatttccaaagtatgttgcacccaggtagggggcgcgttagcgtggttttgttggatattttcttctctctcgcgctctagctcgctccgcctgatttctgcctcttccaaccctacctctccgccttcggcctcttcggggctcctggctgcccagagctcctggctgcccagatctacccgggtcaccgcgtcgggatggggaggagaagggaaggtgtgcttcgccctcttcttcctaccggctccgggctggaggatgggaccaggaggggcggtagtttttttttttttttttttcttcttctttttttctttgtgtcccttgtctgtctgtctgcgaggtagcagggaaacggagaggtgtgggaagcaaccgggggtgaggggctggtttgaggagaacgaaactccctccctgctgctgccgaggtcggaggatgaaagagttacccggagccggctgctctgcgcccgggcgagccgcctcttcctggttgccgggccgggggcgaagggtgtacgccccggcgaggttgcgagtccctgcagcaggctgggagcccgggactgggctcccacgtgtcccgggctccgcgcagagctgagcaggtgtggagagtggtcgggtgcccagcgttgcccctccaccacgcgccggccgtttgcccccggggtccgg

SEQ ID NO: 5868 - DNA, 6000 bp, Homo sapiens
ccctaaacatgggtctagagcatgagaacattcaagtatacacagaagttcagtgcctgggttaaaaactatcaacagtgcaagtgcacaatgagatataccgactgtagtttatatagaaaggactctcttttgagttgactgttagcacaaatctacagtgtgcagcggaaaagatccagcacaaaggtgggcatgacaactcctctgcaagaccatgcccagacttttttttttttttttttttgagatggagtcttgctctgtcgcccaggctggagtgcagttgctattacaggagcatgccaccacacccaactaatttttgtatttttagcagagacggggcttcaccatgttggccaggctggtctcaaactcctgacctcatgtggtccacccgcttggccccccaaagtgttgggattataggtgtgagccacctcacctggccccatgcccagacttttgtattcagtactgggtacctctaggactggatgacaaagttgctgagggattacaaactcatgatctaggaagaagccgggaagagacttttttttttccctagatggagtcttgctttgtcacccaggccagagtgcaatggcacaatctcggctcactgcaacccctgcctcccgggttcaagcaattcttccgcctcagcctccagagtagctgggattacaggtgcatgccaccatgcctggctaatttttgtattttttttttttagtagagatggggtttcaccatgttggccaggctggtctcgaactcctgaccttgtgatctgcccgccttgtcctcccaaagtgctgggattacaggcgtgagccgccgtgcccggctgagaagagactttttaacacagtagatagcttgaaatactcaaagggatctcacaccaaagagggatgaaattcatttggaatggttccagagagctaaacaagatccaatgtatagatgaagttagccaatgggaggtggatccagcctagaatgagactgctttaatgattagagctgtccaaatacagaatggactgccttttacaatctccactgctttacaaggagctgtagagcattgggaagttggctggggcctcttttacaagtcacttatttccactgtccatttctgtctaacttgctttttaaaccagcttgccttttagcagctaatgtcctcctttattaatgcctttgaagttctttaatcaaatcatccatctttctgaatcacagtttctgttttctctccctgtcctcaattgattgaatgtacctgcaatccttgctgaaaaatagagtatttctaaaacctattcttacttttaaaaacccttcttaacaagaagcaagtacaacacgatgcataaaataaattaagcacaagtttatttctacatgagagaaactagatatttctgcctttgggagactgcgtttctgataaattttggcaacccatcaacaacagctttcagagacaccagcaggttgaggaaccaagagcataattgttatgatgatgtctaagggggccaattctgggcttaaaatcacactgtttcagcttaagagagtattccagcctccagtaaatagaaagcttgcagagaacagtctaggagggcaatggcaacgtggtaacagtaccaatgtgaacttgaaccttccttctttctgagaaacctgtaatgctgtctagctttgtttttgtctgtttgttttaaactgactacacttcacagtcattctcatgaggcaggtagttcagagaggccctctagtttatttcacaaattggaaatcaatgaacttgagttcactgaaaatttgctgaggccttcctatgggggaggccctttgcaagtcacttatgggctagggatggtgggactaattcattcattcaaacagcaggcatttaataaatgaggagcatagactagggactgttctttgtactgaggatggacaagatggacaggccctgttcttatggagcttctgtcctagagctccatgagacactaggagacaagcagttaacagctaaaccaaaatacaacatcacaagtaagcactgtgaagaaaactgaccgggcacggtggctcatgcctgtaatcccagcactttgggaggccgaggcaggcagattacctgaggtcagttcgaagccagcctggccaacatggtgaaaccccatctctactaaaaatacaaaaatgaggcaggcatggtggcgtgcacctgtagtcccagctacttgggaggcggaggcacaagaactgcttgaacccaggaggccgaggttgtggtgagctgggattgtgctgctgtcctccagcctgggtgacagagagagactctgtctcaaaggaaaaaaaagaagaaaagaaaactgaaaaatgtgatggaaggtgaattgccgagagtagccactttttaatttatttattatttaattttttttttgagacaaggtctcactctgttgttgctcaggctggagtgcagtggcgtgatcacagatcactgcagtcttgacctcctgggttcaagcgatcctctctctttagcctcctgagtagctgggactaaaggttcaggccaccacgcccagctaatttttttcttttttttttttagtagagatggagtctcgctatattgcccaggctggtctcaaactcctgggctcaagggatcctcctgcctcagcctcccaaaatgctgggattacagacgtgagccactgtggctgggtagccactttagacagcaaagacatctctgaggaggggacatgtaagctgcgatctgaatggaaagagaacgacacaagtgaagaagatctgtgggaagagcattccatacaaaggctgaggtcaggaactcctccagaagctcataattgcaccagaggtgcttacaaccccaagcagtgacagtggcacagaatattcaacatcaaatgcctaagctaatttccaggctgagaaaggtaaaccatccttctcctgcctgcagtgcttctatcggtcctgaaagagacagaggaggtaagggagaagaattggtacgaaatggtgcagagctggtctcagagggcaacaacagccagccctccatgaccacactcccaccgtgcactcacgtgcccctcttgaagcggctctgatcctgtgacctaaccagtttccacctggcttctctcagtgcgttgccatatagtataattttttgtttgtttgtttcgtgtagggttttgttggttcttttccaagtatcaatcaaaactacatgccaacgtccactccttggaaataattaaatgacatgacgtgcctgattttttcagctggtgatgcactgtaatttgcatctgctgaaggaatttatcttaagtcctgaagcccagccacttgagacaactgaggtgatttttctgctctgcttttgctcatgcggatggtgcgttattgttaaacacaaaagtggactaattgcttcattctgcaacctactccgtgaagaaagctgctcttctttgtgaagagaatatgttcatgttttgttcatgaattccatgcaatttcccatccccttgttaagtaatgtagcttctttatattggcaaaattccctttatcttgctgtgacctgcgctttgtcctcccgagcagagcaaatcatctgtggtttaagagcagctttggattcaagtccccttttctcctgtcgagggaagtgagtctatgaaatggccttcatctgaaagccacagcgaagcacctcctagcccaagtctagctgctgtgtggcagctccagcggcgtgaactgtgactgccctgcagacacctatcaagcgctgcgtcagctattaataataaaatcaactcttctccctcccccccgcgaggggggttccctcgtcagggcccagaacccgctggggaagaatcggggctggcgtgcgaaggagctggcggcagggggtgtaggatgcggtgttcccgaggcgacagatgaaggatttgggttgtgtgggaagtgaactgcggaattcctccccttggtttctgaggggggctctgaaggagccagattaggatgcagagcgcagcccgggcgaccgagggcgaggaggcgagccaaggacatcagcccgagggcgcctcgagacgccccgcgtggaccgcgctcccagctcctcggcctcgccttccaaccatccgcccaccggccccagagcagcgtgcccactgtgagcgccccaccctgcgtctgcaggtgggtgggtcagagaaccgcaggcacagaagagggtacccagcttcccctccgccagccccgcgaccgcggcgcgcgcggcctcgatccgggttcctaggggcggcgcgcgggagggggcggggcctgcgcggcagcgtgggcgccaggcgcgcgggaggagggagccgggaggagggggcggggccgcgccgcccgcgccgcgctgggcgctctcggccaatgagcggcgtccacatgccgcggcggcggcgaaaggggaggcagcggccgataaatgctattagagcagccgccgcggagccgtccccgacgccacctccttttccttcgccgcagtttcctccgccgctgtcgggcgtgcggcgctgagggacccgggcgagcgcgccgcgcaccgccccgccggctcgcctccctcgccgcgttccgccctcagtggtctgccgggcgccccctcctccggcccgggcggggcctctgatcgcctcaagagagcggggagggggctcgggggccgcggcctgccctcccggcgggcggctgagggcgagggaggccctcccttctggcgaggggagggagggtgggtcaggagcccccaacccgccctgcggagctcggggccgcgcgaggggcggttgtctgggggagggggcgcggggtgattcagcgcccggcgaggcggaagcggccgcaagaggaggaggggagagcccgtccgcgcctgggctcccggggtggcacgagcccgcggccggagtgcgaggcggaggcgaggaggccgcggggacgggaggcgaggccggccgggcccccgaagccatggagaacgcgcacaccaagacggtggaggaggtgctgggccacttcggcgtcaacgagagtacggggctgagcctggaacaggtcaagaagcttaaggagagatggggctccaacggtaggtgcagggcgctccgctgcaggggcccggcgcggccgggagagccagggaagatggctgaccgggctccacctcgtgggcttcggctccgcgcccgccgacagctgcgggcggagggtcgggccagcgcgccggccccgcgggagagaaaggggctgcggtcctcgcctcgccttccctggacctcttcgcttctcgggccctcgaccttttcggcgcgcaaggctcggaggcttctctccagcagcagccggccccggtggagggagggacgtggcttctgcagctaggttgagcccggcaagacgttttctcgtcccctgccgatttatgaggagtcgaggtcgttggaaggcctctgaccgttcttgtcctacccaaagttacacatctggcagaagtgatgacatcgctgaaaccactcctaggttcaggagcccgaagtgatttcacgcttagggctagacctcaggccattgattacaaagagtgcatgcttccttgagatatcttcgtggtatgccctctgctaaaaaaatcggatattcttatagctaggtctgtgttttaaagatattgatgcttagaattgtagcagttctttttagaaaaacgaagtgctaaaatgtctctctctttttttttttaacctccctcttgacacattgcttgacgaatttctacattctacagagttaccggctgaagaaggtaatcttaacatgctgtttctgttt

SEQ ID NO: 5869 - DNA, 6000 bp, Homo sapiens
tctattaaccccttttggggatgaaaatgtggacatcttttggggccattattttgcctaccacacttgctaagtgaaatgggctatctcagtgcccatttccttgggagacagaaaagcacagaggaccttgagataaactgttcagattcacaccccattctccccctcttcctggctgtgttatcttgggcaagtcacttgagctctccatgtctgatttcctcatcttgaaaatgggtaaatagcacaacacaacctcctttcactgttgtcagtcatgaatagtgctggggagataaagcatggcacctggtaaatagtaagcacctgccccctgcaaaaggagagatgattaggaattaggaatgccagatagcataatgatcataaattcacagggtcttggttcaaattccagtctcaccacttatgaactcaatggcctcaggctagttgctttaggagtctcagtttcatagaacagaaatgaaaccattatcatcctgaaatgggattgttgggaggatgagatgatgccgctgcacatatacaaattgtgcaggaggtagtgggtagcatttgttgctgtagctattactaccttcatcatttcccatcctctttggggtgatggaaagtcttactgggctgcctctgctccataaaacaagggtagagcaaggcagcttgctgaattgcggcctgaggaatcttcgcaatgttctatcattgaatgaagcctcgagagagtcagaccctggccgggctcagccttgagaagtctgggttttgaggtgtctccctgctgcagtgccacaggctggtggagtttacagcagcagctggttctttgaacaaagggttctccagaagcacccgggacagaagaggggtttggcagtggtgaccagggaggtgggcaggatggggcaaggtcccctgacaagacaaggctagttcctagatggcatggtgaccagagagggtggagagctcaggtttcaaccatattattattttttaattttggtgcaaaatccttgtttcaatgaaggcttgggcagatgcccagtatgcaaaacagttaaaagcaccactaactgttctagttgaaaccagagtggagggtcagttgaggcctcttttcatttccacaggggcctctagggggcctggtttaggaaaaactgacagggtcatgaaaacacaggctttggagtcagacagacctgagatttgcatccctgcctctgctgctccctggttgtgtgagtttgggggcttcacatcatctgtctgcttcttgtctgcaaatggggcagtaatagcacccacttcaggtagctgtgaagtgtggggataatcactgtaaagtgcttagtacaatgcgtgacacatggcaagtgtctaggtatgcagcaggtggtagctattgtcattccctaagggagagctgaattcatgagaggccctcccagaatacatgcctaatggctggggaagctgtgagaaattctttgggattggaagccaagaggcctgggaactacttgggttctgattccaccaccagcatcctaaatgactttcatttctccctgggcttcttgaatcactcttcaaatgtttattgaggcagccaggtgtggtggctcacacctgtaatcccagcactttgggaggtcgacgtgggcaggtcgcttgaggtcaggagttcgagaccagcctgaccaacatggcgaaaccccgtctctactaaaaatacaaaaattagccaggcgtggggcgcatacctgtagtcccagctatttgcatggttgaggcatgagaacgtcttgaatccaggaggtggaggttgcggttaggcgagatctcaccactgcactccagcctgtgtgacagagcaagactctgtctcaaataaaacaaacgatattgtttattgagggtttcctatgtgcctgggactgccctaggcaatagaccacaggtcctggcatctgaaaggcttgcattctatactcaactctgctacttcctagctctttgattatggacaagtcaattctcgtctctggtcccgagtttctccatctgtaaattgaggacactgaatttatgtcacaggatcatcccagaaaatattcgatgaaaattttcccctcaaacttgtagaatgcatttgaaatgaactctgagagacatcctggagcatgttctttggaatcatacgacactgagtttgaatgctgtgtctgtaacttactgtgaagccttgagcaaggaattttatttcttgagtctaagttttctcatttgcaagatgggaataatactagtgtcctgaaagggtcatggtgaggacttcagaagatgatacatgtaaagttcctagcagaagagctggcacatagtaggttttcaatagcagccatcattgccaccaccaccaccaccaccataatcatcaccatcaacatcatcagcataatcattgtcaatcaacaccatcactataatcatcactatgattaccatcatgatgacaattactaccaccaccaccaccaccaccactgaggcaggtggttcatttgaggcgaggagttcaagaccagctggggcaatatagtgagacccatctctgcaaaaaaaaaaaaaaaaaaaaaattagcagggtatattcgtgtgcaccttgagtcctagctactggacaggctggggtgggaggatcacttaagcccaggagttcaaggtttcagtgagctatgattgcaccactgcgctccagcttgggtgacagagtgagacactgtctttttctttttttttttgagatggagtttcactctcgttgcccaggttggagtgtaatggtgcaacctcggctcactgcagcctctgccttccaggttcatgtgattctcctgcctccacctcccgagtagctgggattacaggtgcacaccaccatgcccagctatttttttgtatttttagtagagatggggtttcaccatgttggccaggctgatctcgaactcctgaccttaggtaatccacctgcctcggcctcccaaagtgctgggattacaggcatgagccaccgcgcctggcagagacactgtctttaaaaaattgttttttaaatgagctctaaatgttctcattttaactcctgggtctcatggggagaagtaagtgacaaatgtagtagttaaccctgggccatctggatgggaagctttagatatgagtctccaatagagagagttctccttcactttgcagagaagttctaagcagatcttggtctgtttgagatttcctggcctttttccaatttgagccctttcccaaagttaggaggaataggactcttgagatatggagcactgggagccatgggaatccattcatctttatatatttccccttttgatacttttatttcattgtccatatagtgaattcacttcagaaagccagtctggatctttcggggaaggctctttggccaaggctcaatggtctgatttagacctaaaatttcccttcattctactcaaaccacctgctgaagggtgaggttggcacatgccatcctagctgggctgtcaattcctttatcactctgtccaaacatttgtgttttaggacaggttatggaccatgaaatcatggcagttcacagcttgggtattcttattgttgcattttaacctcttgcttcctatctttaggaaaaataaggtcattatgttatcattttcacagatgggacttggaaacattaaatgacttttccagagttgtaagggggctggatctgacttccagaaaaccatcaagtgcttattcaactaagccaccctgccccttagaaatttccatttcttaagcctcagcttttctgctctgaattctgagaaactccaggtacaggtcaaaaatctgcagcaatgggggtgaggacaggtcatctgggcgaaactttgaggggcaaaaccacttagggagccccccacaccggtgccaagctcttgtctgagcagagaggagcaatgcaggactgggggcgtgtgggagacaggggctgtgaagttatagttcctttgctctgagagtgagcgacagtattagaaaaagtgtgtggtaggtaagctgtcactgactagactgtgtgatgtcgagaagtcccgtcccccacccctccggactccccccttctctgctttaaccatccaattacttaacttctctgcctaggggttcgcttcccacccatcccctcctccaaggcatcttagcgctgtccgtggtgctgaccgccaatcccctggttgccgtttcgaccagctgggatctctggtgcgcccaacctcccctcccggcctcccacctttctttctccaggcaccgcacacataaatcacgggtgggaggcaggcttggttcccgcttggttccccctgcactgggaagctgccgccccgcttcccttgctcacacagggctttgcagtagtggtggcagccgcggcagaaactggctctggggaagcaattgattcgtctactgccagcagcccggagttgcctacgcggactggaaaggaagggagaagggagagagagagagagagagagagagagagagagagagactcacagagctaaaaccttcatccatgtggaggacagtctgagggagccactgtcccttgtccactgactcactggctggtccgagttttctccgcttctggcagtggtatttctttttgtcttggtcctgcatgatttaggggtagttgatgtgtctgtgtgtctacgtgtgtgcactggtgctttgattttattttgggaagagtaggagagtcaaatgaacaattttctttcaggcacctccgctgagcttttaaaccaagtcattgggacttagcgtctttctacccggcagggaagggaggagttggcaagaatttggctcacccattccccctgcaagcctccagcgtcgcggtaagtgatattctcccgggttgtgcagatgggctaggggtgttggaatcccaattgtgatgtgtgttcatgagctggtggggtaaagggtagttgggaggagaagggtatcgaggaacgactatgcttatttgcctacatcctgcagtgttttatcacctaagcggcatcccaaagccaaatgagattttggcttagtgcccagggagggggtaaaatgtgctcatgttgtaggcaatgcgatcaagattgtggcttctgcccaatttgccctctcctttgcagcagaagctggtgaaagtagccggcagttctctgagagagttaacccttcgtggggctggctagtctagcatggagggactctgggtactctgacttagcaagtgagtgcttatccctggaggggagggggtcacctgagactggaagggtaacttttgcctgggcacactgggtaagatttgcacaggacagagcttagattgtaccctcttctaggaacagctgagtaatttaattgtggtgatttttgcgaggttggctgttcacgctttcctgagatggaagacctgggagccaggaaagggccacactatgcctgggatgagtggtcaggctggccagaagggagcagccactgcctgcagaggagatgatgttttattttcacaggtggcgtaacctgtaagtgattgtatgggggagcgtcctggcactagcttgggagattctatccttgagttcatctcagaaggaaggaggggaacaaagcttgttcaaattctggggaaagattccaggcttcagcttcagttttgttccagggtagaccgtccccctgcactagtttctttttccaagatcctgatggggaaaggctgcaccaacctgttagtgagtgggaagtggaagtaccttgaaattgaatccaaaagctcacatttaattttgaaatgcttttgatgctaat

SEQ ID NO: 5870 - DNA, 6000 bp, Homo sapiens
aatcagagttctccagaaaaaccaaaccattagaatagaggaagagatatataaagagatttattatgagggtttgacttgtgtgattatggagtctgagaagttttgtgatccaccgtctgcaagctggagactcaggaaatccagtggttgtagtttcagaccaattcagaaggctgagaaccaggagattgctggaataagtcccaatccaagtatgaaagcccaagaaccaggagcatcaatattcgagtgcagacgacagatgcctcagctcatgcagggagagaaaatttgctgttcctctttttgttctattcaggcctccagtggattggaagatgcacactcaccctggtgagggctgtcttctctactcagtctacagattgaaatactaatctcttccaggaacatgctcacaggcacatccagaaataacattttaccagccatctgggcgtcccttaaccccgtccagcagacacataaaattaaccctcatgtatacctaggagtggaattgctggatcacgtgataactctatgtttagccatttgagaactgccagactgttttccacagtggctgcaccatttatacacacccacccctggcagtgaatgaaagttccagtttctctgtatccttgccaacactcattgtccatcatgttgattatagccatcctagtgggtagatgagaaagtgatgatatgctgtcaaaattatcaggtctgctcaatgtggtcaggaccctacatggtaaaaaagaatagggccctgacacatagaatgggaacatacaggttgatgccactgagaatcttttttttttttttttttttttgagacagtgtcttgctctgtcgcccaggctggagtacagtggcacaatcttggctcactgcaccctccacttcctgggttcaagtggttctcctgcctcagcctcccgagtagctgggactacaggcacatgccaccacgcctgactaatttttgtgttattagtagagatggggtttcaccatgttggccaggctggtcttgaactcctcacctcaagttatctgcccacctcagcctcccaaagtgctgggattacaggcaagggccaccaccccggtcccactgagaatcttgaatcctcagattcctctgactcctagagctgtaaaagtgacctatccatccctccctgttaagagctaaccctcctcccttgcttggaaaccctatagaggcatccacaagacgtttgtccctgtgcccacctcctctcctgcccacaagggttgtaactaggcttaaattccagcataaacaagccagggatgtgacgggcctcataggggaggaaagggcctatatcccaaagtagctggagggccaagccagcatgaccagcagaagtcgggtgagtttgtgcaggagtcaaccttgagggtgctcgatcagggggctgcagtgtgaggtcagataggaaagggtttattgattcggaagtcctttgggagttcagggctgcacacccaggcaaggactccaggagaaggtgtaaacttgctgccaggagggctcctagaagacgggaaaaagtaggaggccatgctaagtgagatccaaatgccagaattgccaggggagacggtggcagatgcgatgaaaggtcagggaagtggcaatgcttgggaaggctgcataaggcccagggagccagaggcgacgatcttccatggaaaggccaagattcccctttaccaagtccacgaggaatggaccaggaagagaacaccagccagcatcacagagaagctcagaaagcctcctctgcaggagatgccatcacaggatggtgggtgaggccccttgggagctaggctcactgatagcaaaagggatggtggaaccctggagtaagagaggccaggagatggcacccattaggggacacagtgctcaccatgagtggtagggcccaggattggccaggaggggctggcctgcagaacatggagatgacccttaaatcttggtgttcatagggacagactagatgggccacaagcaggcagctactcaacttacgccatcaaaatacctcaagaatgaacgccgaggaaacttcccccagtaaaaacatcaccattgctttcctagtgggcttcccaggaaacacgtctgtcacatacgtcagctaaatgtcatgtgtgagcctagatgttggcgggggtgcggatgctataaagaagagtattggaatcgttggtaaatttttcaatataagaatgtatttatggctggatgcagtggcttacacctataattctaccactttgggaggccgaggcaggcagatcacttgagcccaggagttcgagatcagcctgggcaacatggtgagaccctacctgtacaaaaaaatacaaaaattagtcagacatggtggtgtgtgcctgtggtcccagctactcaggaagctgaggcagaagaatcgcttgagcctgagaggttgaggctacagtgagccgagattgtgccactgcactccagcctgggtgacagtgagactctgtctgtctcaaaatatatatttatacaatatttatataataaacgtatatttattatatatgttatataaattatatattatataaattatacaaaattatatttattatatatgttatgagatgatagcattgtatcaatgataaaagtctgaattggaccattgttctgtgcttctgtaacacaatattcttgctcttaggagatataggttgaagcatttaggagtaaagggacataaatcatgcaacatgcattcaaatggttcaggaataaaaatactcatgaagggctgggcgtggtggctcaggtctgtaatcccagcactttgggtggctgaggtgggaagatcgcttgaggccaggagttcgagcccagcctgggcaacatggtgacatcatgacccccatttctaccaaaaaattttaaaaatttagccaggcatggtggtgcatgcctatagtcccagctactcaggaggctgaagtaggaagattgcttgagcttgggagggtgaggctacagtgagctataatcacgccactgcactccagcctgggtgacagagtgagactctgtctcaaaaacaaaacaaaacaaaaacctcctaaaatgtataaatagcaagaaaatgaggggcaaatgtggtaaaaaatataatggctaaaaagtctaaggaagttctttgtgtgcatcttgtaaattttctcagcatttcaaattacttcaaaataaagtgtttttttaaataacaaataaagcacaggctttggagtcaggcagtgtgttagtgtgagaacctagcctgacaacttcctagctgtgtgatcacgggcaaatgtttccacctttgtgagcctccatgttctcatctgaaaaaggaaccttaggactacgcctgcccagcctgcctacctctcggtgttgcagtaaaagttggataagggcaggaaaggcccttaatgagcatgtgcattaatcgaggtttttccagaactaacagggtatttatatttattttgaggtatttattttaaggaattggctcatgtgattgtggaggctggcaaatccaaaatcggcagggtagactggcaggtgggagacccaggaaggagttgctgctgcaagtggaggccaaggcactgcagccgaattccctcttccttgggggagctcagtctttagtctattaaggccttcaactgattgaatcaggcccaccaccttacagatgataatccactttactcaaaaaaaaagtctaccaatgtaaatgttaatcttatctttaaaaaataccttcacaaaaagatctaggataatgtttgaccaaatatctgggtacctgggctcagccaacttgacacataaaattaaccatcccagtatggaagggccctggtcccccactacatcttggagatttttgccttctctgtgaattattattgctgggccaaggcagctggctgggagtcctctgcgagttttgttttcaaagctctgggcacaggagttgcatgtctgtctcctttctggctcacacacttggggtgtgttttcttgcccttgcgaggctggacaagtgcctcatacggtccctcggctgtccacaagtgtgctgagaaactggacacacagaggttcccacccgctgaccacacgggggcctgtgtttacccagaagcagaccaaaacctgagtccagctaggtccctgctttgctgtgtgtccctgagcaagtcagttccctctctgggtctctttttcctctctgccgctttccctgaatgtgagttccctggccactgagaacagggggaaagggacagagcctcaaaagatgacctgtgcgcccctgcttctaagcactttgcaggtattatttaatcatcaagctaatcctacgagagagctgccattttcccccagcttacagatgggggaattgaggcgcgaagagggcaggcgatgtgctcaaggacagacatctagcaggtatgaagccctcacaatggggttctagaggctgtttagttaacctcaagttttggggagcccctgaagggctggtcaccacgctgccggggacagggaaagcctctgagcttgagtcagttttggtttccctgctggggtgcaggagtcagtaaaccttgctgcaaggggcggggaagagcatttgagcttaagttagttttggtttccctgccccggatgcaggagttggtaaactcactgcaaggggcagggcagagcctctgagcttaagttagttttgtttccctgtcccggatacaagagttggtaagctcgctgcagtgggtggagagaggcctctagacttcagtttcagtttcctggctctgggcagcagcaagaattcctctgcctcccatcctaccattcactgtcttgccggcagccagctgagagcaatgggaaatggggagtcccagctgtcctcggtgcctgctcagaagctgggttggtttatccaggaatacctgaagccctacgaagaatgtcagacactgatcgacgagatggtgaacaccatctgtgacgtcctgcaggaacccgaacagttccccctggtgcagggagtggccatagtgagtccagggctgaggttgggtctctgggaggcaggagattccacggcggcagcaaggccgagctactgggtgctgggtgcctattatgtgcgaggcccacacttgggtgggatgtggtgtaggagtctcaggctctggagcaggcgcttgctccagagctgtgtgacactgggcaggctacttaacctctctgtgcctcagtctctgactctgtaaaatggggagaggcataatacccacttcagagtatcgtaaggcttgagcacatcatgttcttagcaaaagactggcagtgctcagtgaattcactgtgattactcactgcgattttcttctatcctctccacagtacagaggagtaaacttagggaggctagagaactttgttcaaactacccaggttgccttgtggtttctccgcagcaagaaggagtggcttttatcagttagaaatatttggttttgtggacacaaatctcaggactgaggctgaaaattctggacctctggggaggaagggggactggggagatgccaggaccctagaattgggggcgtgggggtcctgatggcccaatactatcctcttagcctcctgagctgctgacgtcccttctctgctgctgccacactttttggtctctaccccttgcacacatccgctagtgcctcaataaagaaatctagacacgtggtgtccccagccctggcccaggccagcaagctaaggcaagtttggttaatagctattgtcagaactgggattttaagcctgggtaattggcttgagggcatgcatgt

SEQ ID NO: 5871 - DNA, 6000 bp, Homo sapiens
cctcgggtgtagacgagtgtatgagcatcaacagggaccagtaaggaaaaataactgagcaccaaattctatggggtcacagagatagatgatactgggggtctgccctctaaagctgacaatctagctcggcagaaggttgagaggtgggggtaggaacacagaaataagtaatagctatcactgtgcacacccgcccccacgtgtcaggctttctacctacattgacacatttaagctcacaacatctctggaagatccagttattagccccatttatgaatgaagaaagaaaggctcagagtaaagcagattgctctaggtcttcctagcaggaagggctagggccaaggctcaaacctgggtggctcaaggtctaaatccagtgttctaacctgcacagctacgctattcagcctaccccagctggaccgccccctcccactgcaaggaaaccaaccctgacacccagccttctatgccttctatgcaaacctctaggtgcacttcagtcagaaatctttttttttttttttgagacggagtctggctctgtcgcccaggctggatcttggctcactgcaacctccacctcccaggttcaagtgattcttgtgcttcagcctcccaggtagctgggattataggtgcccgccaccacacctggctaatttttttttaagacggtgtttcactcttgtcgtccaggctggagtgcaatggcgtgatcttggctcactgcaacctctgcctcccaggtcaagagattctcctgcctcagcctcccaagcagttgggattacagatgtctgccaccacgtctggctaatttttttttttttttgtatttttagtagagacggggttttaccatgttggccaggctggtctagaactcctgacctcaggtgatccacccgcctcagcctcccaaagtgctgggattacaggtgtgagtcacagcgcctggcctttttttttttttttttttttttgacagagtctcctctgttgcccaggctggagtgcagtagtgcaatcatgtctcactgcaagctctgcctcctgggttcaagcgattctcatgcctcagcttcccaagtagctgggattacaggtgtgtgtcagcacacccagctaatttttgtatttttagtagagacggggttttgtcatgttggccaggctggtctgaaactcctgacctcaggtgatccgcctgccttggcctcccgaagtgctgggattacagtcatgagccactgcacccagcctctctggtggtatcttttggaaagatatctttctggaaaactctttccatcccagcccaaacttgtctctgactcactcatttatttgagggtaggtgacttagatgtcatatcctacaggagggcagactgactgcccctccaaagccaaatgccattttgatcctcttctattgaccctgtaccacctcgatcaagacaattctttgtttttttttcttttatggtcaaaaaatttaagactagttccaacttgaagtagttttgtttcaacagatcaagataattccttgttttttttttttttgagacagagtttcactcttgtcacccaggctggagtgcaatggcacgatctctgctcactgcaacctccacctcccaggttcaagcgattctcctgcctcagccttccaagtagctgggattacaggtgcccaccatcacgcccggctaatttttgtatttttagtagagacagggtttcaccatattggccaggctggtctcgaactcctgacctcaggtgatccacctgcctcggcctcccaaagtgctgggattacaggcatgagccatcgcacctggactagatcaagacaattctaacagttaacaattattgagcactcattttgtgccaggcactgtgctaagagtgcagtatctcagagtggttaaacatggaggctttggggccagacttctagatttaaattctggctctgggtcaggaacagtggccgacacctgtaattccagaactttgagaggctgaggtgggaggatcgcttaaactcaggagtttgagatcagcctgagcaacatagtaagaccccgtctctaaaaaaaaaaaaattagctggatgaggtggtgtgcacttgtagtcctaactactcaggatgcttgttaggtgcagtggctcatgcttgtaatcccagcactttgggaggccgaggcaggtgaatcacttgaggtcaggagtttgagaccagcctggccaacgtggtgaagccccatctctactaaaaaattcacaaattagccgcgtgtggtggcgcacgcctgtaatcccagctactcgggaggctgaggcaggagaattgcttgaacccaggaggtggaggttgcagtgagccaagattgtgccaccacactccagcttgggtgacagagcaagactccatctcaaaaaaaaaatttgttatacaaaggaatgaataaatgcatattacattattacattcctattgtagagaagaggaagcatagctggtggcaaaccagagatttgaacccaggagttcctgatccctgtcttgaacactttctttttcttttttttttagagatggtgtcttgctatgttgcccaagctggacttgaactcctgggcttaacggatcctctggcctcagcctctcaagtagctaggactacaagcaagcccggctagcttagaccctttgtatggccccagtgtggggcctcatataccctttggctgtgtttgaggacgtgtttgacagatttgatgatcttgattgcaccctgaagtataaaaacttaggctactcgagaaagatttcatgctaaatcaggtagtaaagctctagtaatatgatcctaaggttttgtcttcatgaaactgcatgaccttaaggcatcggtttcagctaacctgcccaaggccacacaggctgtaagggaacaagatgtgagcccagccttctcacactagagtccctgtttgttctcctacccggacttttttgttgctgttgttgttttgagaccagagtctcgctgtgtcgcccaggctggagtgcagtggcatgatctcagttcactgcaaactccacctcctaggttcaagagattctcttgcttcagcctcccatgtagctgggactacaggcttgcgccacgacgccgaataatttttgtatttttagtggagacggcgtttcaccatgttggccaggctggtctcgaactcctgacctcaagtgacccacctgtctccgcctcccaaagtgctgggattacaggcgtgagccacagtgccggccttttttttgttttgttttgagatgggagttcaactcttgttgcccagattggagtgcaatggtgcaatctcagctcactgcaacctctgcctcctgggttcaagcgattctcctgcctcagcctcccaagtagctgggattacaggcatgtaccaccatgcccggctcattttgtatttttagtagagatggggtttcactatgttggtcaggctggtctcgaactcctgaactcaggtgatccactcacctcggactcccaaagtgctaggattacaggcatgagccactacatgcagcccccaggagctcttgatctgaggcataaagatgcttagagggtttccaaatatattttatggtcacctattctcccaacaatgtgtgctatactgtgtgtttacacataggtgtgtctttagaggaaagggttcaaagctttcattagattctttttttttctaataaagaaaaaagctttgttgcccaggctggtctcaaactctcaagctcaagcaatctgtccgcctcggcctctcaaagtgttgggattacagccatgagccaccacgctggtcctcattacattctcaaaggggcctattgaaaaaaaaaaaaaaaaaaaaaaaaaaggccgggcacagtggctcacgcctgtaatcccagcactttgggaggccgaggaaggcggatcacaaggtcaggagatggagaccatcctggccaatatggtgaaaccctgtctctaccaaagtacaaaaaaaaaaattagccaggcatggtggtgcgtgcctgtaatcccagctattcaggaggctgaggcagtagaactgcttgaacctgggatgcagaggttgcagtgagccaagattgcaccgctgcactccagcctaagcaacaagagtcaaactccgtctcaaaaaaaaaaaaaaaaaaaaaaaaaaaaaagatgagactgttgagtcaggattaggatccaggtctgctggcaccaatttcagtgctctttatactttctgttgctattcattcattcatccattcattcagcaaatttatatcaagtatctggtatgtgccaggtatgattccaaattacaccattcccagattattctgagaatgctgcagtgccaaactcttggtatcacagactttatattctagtgggggagacagacaaaataataatataacgacgaaggtgcaatgttatgtgctatgagaaaacgcagtcggaggatggcgaggaaggggaacggaattttagatagggcggtctgggatcagaacctccagatgcccgtccatggactccaacgaagggagcgattccaggtaccagggcaccctgcacaaacctctcttgagcttccgcctcgcccaggtggggacggtagggagaccggagggcacacgcatgcgcacgaaggaaacggtaaagcctgaagggaggtgcagagcgcatgctctctcttgcccgagatgccgaggattttgacaaggactccgtcgtcccggatgatagtgctcaggttaatgccagtgggagggcggcgcccaatagtaacttcctttggaggttgtagtaccgcccccagagccaattttccacttccgcttccggcgctgcggcagtccagatcaaaaatggcggtagttggtgtgtcctcggtttctcggctgctgggtcggtcccgcccacagctggggcggcctatgtcgagtggcgcccatggcgaagagggctcaggtactggggccggggtcgacgggtcgagcctcagccccactcgggcgagacagggagggactgtgaccttggcccgaggccttgcgggagggaaagtgagacccgggcccgccccataccggcgctgaacgtttgtggcttctccgcagctcgcatgtggaagactctcaccttcttcgtcgcgctccccggggtggcagtcagcatgctgaatgtgtacctgaagtcgcaccacggagagcacgagagacccgagttcatcgcctacccccatctccgcatcaggaccaaggtacgcccttgtacatctcttcaagcgtccgttctcttttcgttatgtgtgccttagtgcaagttcttcattctctgaaggcatgggtgccaggcgtgtacagcttgtttatcctcacaaacagaaaatgtattttcttccattttgtggatggacagctgacacttgggattacgtctcaattctcttcttcaaggtcatacaataagtgctcttcagtttcccttttctccgattcatcctacctcctgccttctgagacagttcttttttttttttttttttttttttttacttctgagacagttctgaaacaggtgtccgttgtgtaaagcctggaggtttgggaaatccaattagagtggcaaagtctgaaggtggttcgcgtaagcgaacccagcagctacatgggaggctgaagcaggagaatcccttgaacctaggaggcggagtttgcagggagctgagatcgtgccactgcactccggcctgggcaacagagcgagactctggtctcaaaacaaaacaaaacagcaacaacaaaacatgggcatctggcagctactagttgcataatgaagagactgacagctttctctattccccac

SEQ ID NO: 5872 - DNA, 6000 bp, Homo sapiens
tgctgtagactcgtacagatttgtggctacaaacaattttatcaagagttcctaaaagcgtatatctgggaccaggtgcagtggcttatgcctgtaataccagcactctgggaggccgaggtgtgaggactgcttgagcccaggagttcgaaccagcttgggcaacatcgcaaaagaccccatctctacaaaaaaataaaaaaattagtggggcatggtggcacatgcctctagttccagttacttgggtggctgaggtaggagtatcccttgagcctgggagatcgaggctgcagtgacccatgattgtgccactgtactccagactgggcaatggaacgagaccctgtctcataaaaaaaaaaaaaaaccaaaaaaaaaacatagatctagcagcttcttacagtacaaggtggggggtacaagttcagaaggcaagaactcaagagactttctttctttcttttttttttttttttttgagacggagtttcgcttttgttgcccaggctggagtgcaatggcacaatatcggctcaccacaacttacgcctcccgggttcaagcgattctcctgcctcaccttcctgaatagctgggattacaggcatgcaccaccatgcccggctaattttgtatttttagtagagatgcggtttctccatgttggtcaggctggtcttgaactcccaacctcaggtgatccactcacctcggccttccaaagtgctaggattacaggcgtgagccaccgtgcccggccgagactttcatttcagagtagcaatcggttgagtgccttggcttgtgccaggcatgaatctgtcaaaaataaaatcagatcaagttaaaatttcaggagttgattgtgcatacaaaggaagagtctgtgaatcgggagattacaagattggcaagaagtctgaattgacagcagttgtagcacaagaggaagtattttgaccctttacatgattggctgatatatattttttcaaaggcaaatagagctgcttaagctggtttgtctatggctgattggtttaattctgtggaatcatgctaataagggaagaaaacttattcttgtgctttgtttatgtttagagttagcattttggaaaatcaggtgctaaaattttggttatgtggctatggtggttggtctcggagtatctaaacaattgtttcagctctttatcaattctaatgactttattatatgcattaccaccttctcctcctcttcttcatgcggttttattaccttctttaatcctcacgtctgccctctgaaatagaaactattccaggccaggtgcggttgttcacacctgtaatcccagcactttgggaggccaaggcaggtggatcacttgaggccagaagttcaagaccaggctggccaacatggagaaaccctgtctctactaaaaatacaaaaattagccaggcatggtggtgcatgcctataatcccagctatctgggaggctgagacacgagaattgcttgaacccaggaggcagaggctgaagtgagccgagatcatgccactgcactccagcctgggcaagagtgagactctgtctcaaaaaataaataagtaaaataaagtattccagtcatgtgctacataacatttcagccaatgacgaaccacatacacgatgatggtcccgtgagattataatattggctgggtgcaggggcttaggcctgtaatcccaggactttggaaggtcaaggcgggaggaccgcttgaggccacaagttagaggccagcctggacaacatagtgagaatctgtctccacaataaataaataaataaataaataaataaaattttgtgtgtgtgtgtgtgtgtgtgtgtgtgtgtatatatatatatattttttttttgagactggatctcactctgtcacccaggctagagtgcagtggtgcgatctcggctcactgtaacctctgcctcccgggttcaagcgagtctcctgcctcggccttccgaatagctgggattacaggtgcgccccaccatgcccagctaatttttgtatttttagtagagacagggtttttccatgttggtcaggctggtctcgaactcctggcctcaagtgatccacccacctcagcctcccaaagtgctggaattacaggcatgggccactaggctggccaatactgtgtttatactgtatctgtgtttagatacgcaaatacttaccattgtgttcaactgtctacagtattcagtaaggtaacatgctgtagaggtttgtagtgtaggagctatcagctataccatatagcctaggtgtatagcaggctatccccatctaggtttgtgtaagtacactctgtgatctctgcacaatgacaaaatcgcttaatgatgcatttttcagaacgcatccctgtcattaagtgactcatgactgtatctctatttcacaactgaggaaactgaaactcagcgaagtacatcacttgcccaaggccacacagtgggtaaatgggactaggcatgggatgcaggcagcctgtcttagatcccacgctcggatcccataccctgcctccagggtctcagactttacgttttactgaaaagacagcctaattcatgagcagctggatctcagaaagggagccaagctccttggtacacagatggcccaaccacgaatggtatctgaagggctcaataacaggagccagccgggtatcttcttcaccctctggggtgaccaaagacacgaaggactgagagaaagcctttagaggcctcccccaaaatttaatccgtttttgtgattgtttctcctggactagactgccttgaggataaaataaacatgagcgcctggtggcagtgcaatacctgagtggtacgtgggctctgcaggccaactgcctggagggaggaagccccatcaccactacttgtgtttctgttccccatttgcaccacacccctcctttgagggtaactgaagcctctgagttgtcaagatccttaaaagatgacagtttgagagagagaatagtagaattagaaaccccaagaggccaggtgtggtggctcacacctgtaatcccagcactttgggaggccgcggaccccgaggtcaggagatcgagatcatcctggccaacatggtgaaactcggtctctaataaaaataaaaaaaactagttgggtgtggtggcgcgcgcctgtagtcccagctactcaggaggctgaggcagcagaatcgcctaaacccgggaggtggaggttgccatgagccgagattgcaccactgcactccagcctggcgacagagcaagactctgtctccaaaaaagacagaaaaaaaaaaaaaaagaaacaccttggacaggaaacatgtctatgggaggaagtaaggccagatgcttgcaaaataggggggaaagtgagaccgggagggaacacttccaaaagttacccccatggggtctgaatttggggcctgggaaggaatttgggtgcatttagatccaccactgatagtctctattttggcaccctgttttgttcccgtatagcacttaccactgttctaactaaacaattaatttcattatgggttgtgcaaagtctatgattctcatgcgggaccccaggtgtgttttttgttcatgtagcacaaagctcattgcctaagtagtaggtaggattggtagataaaatacaagaagtccagttgtttaaattttaataaacaatgcatttttttttttagtataagtgggtcccatttgcttatctgaaattcaaatataactgggcttctcctattttatctgccaaatctgacaaccctggtagcagggacttgatacatttttttccttttagggagaatttctaaatcgaccagtatttatggaaaatgcataagcgtttttttgttttttttgtttttgccttgactctgccctacacttgcggtgcgaccctttggcaaaattcagtccctttctatgcctcagtttccccatcggaaaaatgggagtttgaacagcgaccgaagcgcagggatcgccagtgtgggagagcgccaggtgaactgtgaaggagcagggagggagttcgggccgtgcccgtgcgggacaaccccggtatccactctgggcaccgccggcggcgactcccgccagcgcctagggtgcctcggtcccgcccctacgcagcggaggccggccagaggccgtcgccatggagacgcgagcagcctggcacccactcgctctcaaagccacgcgtttccgctgcgttggagccttctcattggacggccgtctggacgctaccacccgccccgagcccgctaaggggagggggcggggccttattctcatgggattcgttccctggagacctgtgtccgcggcctctctgggaaagcatgggtcctctccctcacgcggggaaaaggactgcgtctcttaggtctggagagtgtccattgcttctcctactagaatttatgctcatgctgctccctgagaaaagaagagggggcgggaaagtcggccacgccccctccagagcctatttggtctcaggagctagagcaccggaagtgctggcgacatgtcagtgcgccctaccctaaaccttccccccccaggccacctttcccattcagctgtgggattccggggccgcctgggcgctgcacccgccacttccgcatcgaaccgccgcttcaaccgaactcactccctctgcgcgcgctccatctggtgcccgactgctgggccggcgcctgggagaagccacgccctttcccgcgcctgacagccaatgagcgggcgcctcccggcggggtggtgggtaattaatgagggccgggcgctgattggctgcagcgtcgtggccgggggcagggcggcggggtaggttgttcctgaggtgggaggcggtacccgtggctgagaagaaggaggcctgagagcgacatgtccccggcggctcaggcggagcggcccgtggcgctgtttttctgagtccggggtggcctggcagccggccgaggacgagggtcggcgggggctgcccccgtggtggtggccgccatgctgggagcctgggcggttgagggaaccgctgtggcgctcctgcgactgctgctgctgctgctgccgccggcgatccggggacccgggctcggcgtggccggcgtggccggcgcggcgggggccgggctgcccgagagcgtcatttgggcggtcaacgcgggtggagaggcgcatgtggacgtgcacgggatccacttccgcaaggaccctttggaaggccgggtgggccgaggtgagagtccccctgccgagccgcgggatccagggcctgctgtgctgggcgcagccggccgggggctgcgggccccgagcccctttcgaccctggggccgcgtctctggagcgaagtttctctctgcagcttcttcgggggcccgctctgagctcagggcctggcactggctccaaggtacctagagtcatacaggcagagagttggccagaagttagttatatttggatttctcatcctgcattttctcaacccctcactcccatccaagctgggagagaaatgacgaaggcggccttttgctacctccaggcctcgcgggttgtaggtcatgggtgcccctgcttctcctgtcgagacagttcttgggagattctcgtcgacccaggaatcggccgctttccttgccccttctgcaggagcggggcttgattcttagccagaataggaaggaatcttcgaagagaatgggccaggaaagtttgattgtagcctcctcccccgccctcttttcgagcgaagaatatgtgtgcttaaaagtagaatcggcaggccgcccccagagggtggttctatcgaagccatcctgcacgtgaggctggtggctgtgtgtgaactgggtcaaccagtgtaagaatccgaatggtctatc

SEQ ID NO: 5873 - DNA, 6000 bp, Homo sapiens; identical to SEQ ID NO: 669

SEQ ID NO: 5874 - DNA, 6000 bp, Homo sapiens
tgcatccattggtttaagaggaaacctctgtagatattatcagcagaggccaggcgcagtagctcacacctgtaatcccagcattctggggaggctgaggtgggcagatcacctgaggtcaagagttcgagaccagcctggccaacatggcaaaaccctgtctctactaaaaaatacaaaaacaaaattagctgggcatggtggcatgcacctgtaatcccagctacttgggaggctgaggcaggtgaatcacttgaacccgggaggcggaggttgcagtgagctgagatcgcaccattgcactccagcctgggagtcagagcgagactccatctcaagttaaaaaaaaaaaaaaagcctgggcgcagtggctcttacctataatcccagcactttggaaggccaaggtgggtggatcacgacgtcaggagatcaagaccacaagaccatcctggctaacacggtgaaaccccgtctctactaaaaatacaaaaaattagctgggcatggtggcgggcgcctgtagtcccagctactcgggaggctgaggcaggagaatggtgtgaacccaggaggcagagcttgcagtgagcagagatcgcgccactgcactccagcctgggcgacagagcaagactcttgtctcaaaaaaaaaaaaaaaaaaaaagatattatcagttgaaagagacatccgggaaacaggcgtatcaatgtgttgttaaggatagaggaagaggctctaggctgtctccctccagtgacggcactggagtcacattacagaactgacctgccagggaaagcaggatgtctgccagtctggaagatggggaagtaggggatcaccagtagaactcttcagttcaataatacagttaacccttgaacaacgcaggtttgaaatgcatgggtccgcttatatatggatttttttcacctggctgggcaccgtggctcacatctgtaatcctggcactttgggaggcggaggcaggcggatcagttgaggccaggagttcgagaccagtctggccaacatggtgaaaccctgtctctactaaaaattcaaaaattagccgggcatagtggccggcgcctgtaatcccagccacttgggaggctgaggcaggagagtctcttgagcctgggagacagaggttgcagtgagccgaggttgagccactgtactccagccagggcgaaagagcgagactccatctcaataaaaataaataaataaataaaagttacaccaagtatgccgcctctcatgcctctctctttccacctccaccacttcttccacttctgccaccccccaagacagcaagaccaacccttcctcctcccctcctcttcagcctactcaacataaagatgacaaggatgaagagctttaccatgagtcacttccactacatgaagagtaaatatattttctcatccttattattttcttaataacaatttcttttctctggtttattgtaaggatacagcatgtaatatatataacatacaaaatatgctaatcaactgtcattggccaggcacagtggctgatgcctgtaatcccagcactttggaaggccagagtgggtggatcacttgaggccaggagttcgagaccaccctggccaacatgttgaaaccccatctgtactaaaactacaaaaattagcctggcatggtggcgggtgcctgtggtcccagctacttgggaggttgaggcaggagaatcacttgaacccaggaggcagaggttacagtgaaccgagatcacatcactgcactacagcctgggcaacagagcgagattccatctcaaaacaaaaacgaaaaacaaacaaacaaaatgctaatcaactgtcattggtaaggcttctggtcaacagtatgctgtcaatagttaagtttttgggctgggcgcagtggctcacgcctgtaatcccagcactttgggaggccaaagcgggtagatcacctgaggtcaggagtcgagactagcctggccaacatggcgaaacccagtctctactaaaaatataaaaattagccaggcgtggtggtgggcacttgtaatcccagctactcaggaagctgaggcagaactgcttgaactgggaagtggaggttgcagtgagccgagatcgtgccattgcattccagcctgggcgacaagagcaaaactccatctcaaaaaaaaaaaaaaaaaaaaagttgtttttggggagtcaaaaatgaggccaggcgcagtggctcatgcctgtaatcacagcactttgggaggccgaggcgggtggatcacctgaggtcaggagttcgtgaccagcttggccaacctggtgaaaccccgtctctactaaaaatacaaaaattagccgggcatggtggcgggcgcccgtaatctcagctacttgggcggctgaggcaggagaattgcttcaacccgggaggcagaggttgcaatgagctgagatcgcgccactgcactccagccttggcgacagagggagactccatgtcaaattaaaaaaaagaccccaggattttggactgtgcaggggtcggtgccccaaacccccacgttgttcaaggtcaactgtacactgtcatagtcgggaaaacttcatcactgcagctgctcctgtttcttgaaacctgaagcgggaaactggatcctgggacactactgccccctatcgcctgttggtcttcaaagaaataatcccttcaattttgcaaggcctgtggtgtcattcccttttaacagataaggaaaccgaggccaggacgtggtggaaaataatcaaggtcacacatctatgtgcaaaagtggagtaacaacccaggctcctcattcccaggtcagtccagtgacctcaattgacatgaaatgtgtgaggtccttctgtggccctgtggcagggcctgaagaggacagcgtatgtaaatcaagtcttgtgccttcatgagtgaggcagagtagaaaataacagtaattcactaggaccgaatctgcattgtaaacagagaggaaggggctagtatttggcagaaggatgtcaaggaacattttagagataagaggtgacatttgggttctgagggatgagtaggagtgtgccagggtgcaaaggatgaaaagacagctctagcagctggtaagggctaaggggcatggagaaacagcaagactttggggaactggtagaattctaattctggaaaatttgaacaaggtaattttttgtgtgtggttaaggtattacatacatacagtaaaataaaatgcaatagttgctgggtgtggaggctcacgcctgttaatcccagtactttggaaggcagaggcgggtggatcatctgaaggtcaggagttcgagaccagcctgaccaacatggtgaaaacccgtctctactaaaaatacaaaaattacctgggtgtggtggcaggcgcccgtaatcccagctacttgggaggctaagggagaagaatagcttgaaacccggaggtggaggttgcagtgagctgagattgcactattgcgctccagcctgggtgacaagagtgaaaagctgtctcaaaataaaataaaaatgtaatagtctaattgatttttttaaaaaatgtagacatccacgtatctaccacctaggtaaagatactagagattccagcaacctgggaggatccctcgtgcccctttcaggtctatatgagcctccaccgttccccagtcccctggaaggagagggggtgggagaggcaacatgaaacctaaaaaccagtgggcttcgcgcctgtaatcccagctattgggttggctgaggcaggaggatcacttgcccaggagttggaggctgcagtgagctatgatcgcgccaccgcactccagcctgggcgacagatcaagaccccatctctaagcaaacaaacaaataaacacccctcaaaacccatggcttcaggcctggcgcggtagcttacttctgtaatctcagcactttgggaggccgaggagggcggatcacttgaggtcaggagttccagaccagactggccaacatggcgaaaccccgtctctactaaaaaataaaaaaaaaaaaaaattggccgggcgcggtggctcacacctgtaattccagcagcactttgggacgccgaggagggcggatcacgcggtcaagaattcaagaccagcctgaccaacatagtgaaaccccgtctctactaaaaatacaaaaaattatccgggcgtggtggcgggcgcctgtaatcccagctactcaggaggctgaggcaggagaatcgcttgagcccaggaggcggaggttgcagtgagccgagatcgcgccactgcactcctgggcgacagaaagagactccgtctcaaaaaacaaacaaacaaaaaacacaaaaattaaccaagcgtggtggctcacgcctgtaatcccagctactcgcgaggctgaggcacgagaatctctggaacccgggagacggaggttgcagtgagccgagatcgcgccactggactccagcctgggcgacagagcaagactccgtctcaaaaacgaaacaaaacaaaagaaaaaaaccttagtttcagcccgcacattccctcaactcctatcgctgcctgcaaatgtttcgccatcttcttggacaatcctaagagggcattgcagaggcttccggacactgtcgttttcctgggaagtccacaggaactttagcttggacgagaaaggactagggaaaaatttttggtccttcggagccgccgtccaggctcgggccgcgcagagtcgcttgtccctcggcggctgccgtgcctccctttacgtggcagctgcgggagcccgccaatccactgcgcccgcatcagcccccactggtggcgcaggcggaaggggcggagcttaggcggcggtggctgagaaggcagcggggcggcggcggcggcggcggcggcggctgtggaggccgcagtccgggtcctggcttcggcctcagccccaccatggtgacgcttgctgaactgctggtgcttctggccgctctcctggccacggtctcgggctatttcgttagcatcgacgcccatgctgaagagtgcttctttgagcgggtcacctcgggcaccaagatgggcctcatcttcgaggtggcggagggcggcttcctggacatcgacgtggaggtgcgggctagctgcccgcagctgaggcttggtcgcgtggccactcggggattggtggcacctgggaccggcgcggggcctgtgtggggagtgggcttggaagtcgctgtccgagtcctggagaagcccaggccgccaccccccgccccgccccggccacggcgacctcctaacggccccttttcccgcgacttgcctgggttccgggatcccttgggggctccttcggcatgcttggttgctttgggttttctccttgaacgacgggttcctgttggaacctctcgctgagctttgtgaatcaggcgccgcgtgtcagtccgggccccaaaggcgcttctcagtcacagttagctggtggcgggtctctatccagttagcacctgccttctttcgtgttacggattaatgctggaacgtggcacggaaacttttccaaaaaattgattaaaatcgattgaggattaaaaacctattgagtgctaggcatactttcgcgttgtgtttatttttcatagaagcaaccttaaggttctactctttacgcctccagctacctcgtttagtctcttctgccaaggagagatggggagttgggtcatgcgttttaggagtaagcagtgcagtgaagtatcaggagaagacaggagtttaagaaaccagcagtccctaaatctccactcatgttttgtaaaccaaaagaatgatgtgttgctagtttttattttaattcacctgctagcatgattaattgggtctaaggagtttccatttgacagtgtactcagtaggg

SEQ ID NO: 5875 - DNA, 6000 bp, Homo sapiens
tggccaggctggtctcgaactggcctcaagtgatccgccctccttggcctcccaaagtgttaggattacaggagtgagccaccacacccagcctatacctacactgttatcaaaagagttaagaaatactgctgttgaattttgtccattgtttttcaggggagctgcattctcagtgtgttgctaagggcttactgttgctgttgttcctcacattggccttgttcctcagcaacccctggaccagaatatgcaaagcctatagttagacaaccacctggcttttatttttttgagatggagttttgctcttgttgcccaggctgaagtgatctcggctcaccacaacctcctcctcttgggttcaagcgattctcctgcctcagcctccggagaactgggattacaggcatgcaccaccacgcccggctaattttgtatttttagtagagacagggttccaccgtattggccaggctgctctcgaactcctgacctcatgatccgcccatcttggcctcccaaagtgctgagattacaggcatgagccaccgcacccggcctttttttttttttttttttttttgaggcggggtctctgtcacccaggctggagtgcagtgcacaatctcggctcactgcaatctctgcctcccaagcaatcctcccacctcagcctctggtgtagctgggaccacagatgctccaccatgcctggctgtatttttggtaaagacggggtttcgccttgttgcccagggtggtctgtaactcctgagctcagatgatctgcccacctcggcctcccaaagtgctgggatcacagacgtgagccactgcgtccggtccatctgacttctcaaagactttagaccttgacttcagtgatttgttgtagtcttgtatgcttctctataaaattttaataaatgaaatgtcttatttttgtagaaaatttttattaagtgccctgtgactttaattcatatatgtagctatccaatgcagaatgaatattctcatcgctggcctgaactgagtaaaatgcatgagaagaactcaaaaatgttagaaattttagcttatcacaaattagttaaagtcataggagttttatttataccagagagaatcagtcttttctttagtttttaatacattcgtgttgattgatgtttcccatattccgtagaaaggattaagaaatccttaaaaatgcatgtaatacaaaaacacaaaatcactgatggggaaagatatgggggctgcgggaggaaaataataagagaaaagtaaaacaaaaccaggggcacatgtaagccctaaaatacatgccagaggttgcctttagcagaagcaggcccctaattcattatttatttatttgttttttggagacaggttctccctctgttgcccaggctggagtgcagtggcacgattatagctcactgtaaactcagacacctgggatcaagcgattctcccccaagtagctgggactacaggtggcacacagctaccacgcctggctattttttttttttttttttttttttttttttttagtagatgggggtctcgctatgttgcccagcctggtctcaaactcctggctttagcgatcctaccacctaagcctcccaaagtgctgggattaccagcaggagccactatgcccaaccaagaccccagtttacaaaaacccaagtatgattagctataggaattatgaaatctattcattaatacaggaattatgaaatctattcattaaaaattaactggttatcaatgaaggacagtttttcctagctgagtcttgacaaatttctcccatgggccgtcacatgggaacagtcaaccccactcagtggggagaatggattttttttttttttttttttttgagactcggtcttactctgttacccaggctggagagctggagagcagtggcacaattacggctcactgcagcctcgacctcctgagctcaagtgatcctcccaccttagcctcccaagtagctgggaccacaggcttgtacctggctagtttttgtattttttttttttgtagagaagggggtctccctatgttacccaggctggtctcgaactcttaggctcaagtgatctacctgccttagcctcccaaagtgctgggattataggtatgagctgctgtgcccagccctggaatagatgtttttagccacggtcctacagtggccacatggcacatcacctgtaagttttctttgtgtgccaggtaacttagttgtttcagatggattttctatgttatttaagcctaattttgaaaaataattattttcccttttatactttttgatcgaattcctagtgcctgctgatacccagcaccacataaaatgtgctgtttcatcttcgctgcagagttcctgcccaggggcaatttcaaattttcctccagtcttaagtccattttcttttttctttttttttttgagacggagtcttgctctattgcccaggctggagagcagtggcgtgatctttgctcactgcaagctccgcctcccgagttcacgccattctcctgcctcagcctcctgagtagctgggactacaggcacccaccaccatgcccagctaatttttcgtatttttagtagagacggagtttcactgtgttagccaggatggtctcgatctcctgacctcgtgatccacccgcctcggcctcccaaagtgctgggattacaggcatgagccactgcgcccggcctgagtccactttcaaatagggggatgagctagtcactgcagaggtcctaagtttctgcatgatggaaataccgtgaatttcagcatctgtactgtggtggtgttgggccttcacccgacccctctagggctgactcaggaatctgggtcagtactggactgacggagctggggtctgagtcaattattgtctgaacttcagcctttgaattcaccttcacagttcttactgtatctttttgttgttgttgtttcttttgaaacagagtgtcactctgttgcccaggctagagtccagggatgccatttcagctcactgcaagctccacctcccaggttcaagcgattctcttgcctcagcctcccgagtagctgggactacaggtgcccaccaccacgcctagctaatttttatatttttttagtagagacggggttttgccatgttggccaggctggtctcaaactcctgacctcaagtgatccacctgcctcagcctcccaaagtgcagggattacaggagtgagccagggcacccagcctagtgtaactagctttggatttcaggtatttatggaaaataaatttaaaacttccaaatgacaggtaatttagcttgattttgtgggctttgtgaggacgccttttgtacttaaaagaaggaaaaaactcagtttggcagaatggggtctggagtgtctatggttttaacttttttaagtttatacatttatgtatgcattcatgaactatttattgagtggctactatgtgctggggcttggagataccacagtggcagaaacaatgtccccaccttggtggagcttccattctagcagggaagactggcactaacacacagacaagataatttcagatggtggcaggtgcagtgaaggaaatagaacaaggatgtgactccagggacagtctcaaggaaggggatatgtaagcagagactcgactgggacagcggtgaggttgcggcctggggcggggggccactgcttcccggtcagtgtggggaacacacactgggtgctgtgtgattccatcgacaggacaagcctggaggtggcaaatttagcgagacaaaattgtcctgtggtggccaggccgggcgggaaggggagactgcaactgagcaggaggagtcttgcgaggtcggtgggaaatgtttgaaaactggattgggatgctggctgcacactccaacttcacgaagaagcctaggatccctccgggcggcggatcacgcctgtaatcctagcgctttgggaggccaaggcgggaggattgcttgagttcaggagttcgagaccagcctggccaacatgatgaaaccccttctctataaacattttaaaaacaaattagccgggtgtgatggcgcgcgtctgtaatcccagctcctccagaggctgaggtgggaggatcgcttgagctcaggaggtcaaggttgcagcgagccgagctcgtgctactgcactcctccctgggccacagagggaaaccctatccataaaaaaccagcagcagggccgggcgcagtggttcacgcctgtaatcccagcactgcggaggccgaggcaggcggatcacctgagctctggagttttgagaccagcctggccaacatggtgaaaccccgtctctattaaaaatacaaaaaaattagctggacgcgggtggcgcgcgtctgtagtcacagcaactggggagtctgaggctggagaatcgcttgaacctgggagacggaggttgcagtgagccgagatcgcgctactgcactccagcctgtgggactgcgtgagattccgtttctctctctctctctctcacacacacacacacacacacacgcagcagcacagggtcgtgcactaggaacgggtgagcttcgcggcgtgcacactcggcgagactcctccaggaaagccggggagccgcgcgggatttagctctgcgtccagtccggcggagcgccagctgcagtggtcgtacccgccgggttcgcgctggttggccctgccgccacgtcgtgcggcgacaacctcgggcgtccattggtcggccggcggggggggcgggacgcgggggcggaaccggaaccggcagtggcttgggggcgggacctcgcggactgctgtggcggcagctggagcggcggccgcggtggcagaaccgggggcggccgctgcagtctggagccccatagtgcggggccgcggccaggccacaggaagagctcgaggcccgggccgcaccggctgagtgtgcgggcccgcgcggctcggagccgccgccgcccatcgagcccctccgggcgcgggtcggcccgccatggggtccctgttccggagcgagaccatgtgcctggcgcagctcttcctgcagtcgggcacggcctacgagtgcctcagcgccctgggcgagaaaggcctggtccagttccgagacgtgagtgtcgcccgggagacgcgggccgcacctgctctcctggcgcccccaatcccgcgcatcgctggggccctcccgcggggagcaccgaggaagggcgcgccccgtccccattgtccagacggggaagatgacaccccagctcagcggccaaagcttcccggagcgcggggctgactccagggtcgccggccgtctgtgtggtcggcggctgctctgccccagttagttaggatcgcccgtgtggtcttcatcagctccgggcaccgagctcagcgggagaacaaatcccacaaaggcctcttggagtccttttggaactttacgggggttaggggggcgcattaaccaaataaataggtcaaccagaaaaggtttgccataaagaagaaacggggtgatgtgaaggtgattcgggcgggaggtgagtgtgaagggattgtcgaggaagcctcccggagaaggtgatatttcagctgagacccaaatagaaaggagccagccgtggggaagatctggggagagggtccttgttggagggaacaggaggagcccagacagagccagaaatgggaaggagctggatgtcatctgcttgaggagagggatttttgtgttttggtcactgatgcttaatgctgtacataccattgtgtgtaaggacttaagaactcagtcattgtttgtcgagtggaagctgtctccccaacaagtaataataaacatttgtttgtccatttacttgtttattgtttgtctcca

SEQ ID NO: 5876 - DNA, 6000 bp, Homo sapiens
caacctgtgtgaccctctgttgccttctcgctttcctctttttccctcttttctccacgtgtggtgacgacgccctctctgcaaacgccctccccagagggtttcatgccggactctggtgcccttaccttgacagactcctccagctgggacagggcctcctcgtaccgaggaaccagcggctgcagcagcttgctggagagctcgtgccgctgcaactcaggtgccccagcttcagttagcattcggaggaatctcctctcctggagagaagctcatggtggaagggggttcttgggccagccccttaacacccaccaacagcagaaactcccaagaccctcgcagcctcacctgcactttcaggagcagtgtgaaggcctgtccagttttcccagcgcgagctgtcctcccaaccctggaatcaaacgcagctatctccagactggcccctgagccttcaagagtctgacggaacgacagcttctctccacaccaaccccaccccacgccagtcaagacggtcccacatcaacgcccaggagctcacaaagccccagaccccccagtggccgctgcgccagcgctcaccggtgcacgtaggttctcaggtactggggggcgtcgtagttcaccaccagctccacaccctgcacgtcgatgcctcgcgcggtggcgtccgtgctgatgagcctgccgggacacgcagcattgtgggcccgacgtgccaggagcaggggccgtggcagcaccggccctgcggggggcagctcaggcctttctgggaactggctgccatggggctggggcacaggaagccaatttgcagaaggaagcaccttttagagagccccaggctgaccctggagtgggcacccccaccccacagaggccttgcccctgcccaggaactcacagctggatcttcccctgttcaaactgcttcaggatcatcctcctctggccaggcccgtagcgcgaggagaactcagccacgtccacacccccaaaagcttgcaccagcaggaagagcctaggcagagagaaggctgcggccaagtgatgctgggaccagaggccacctctgccacccccgcccagccggggcctcacctgtgggagttctctcgggagttagtgaagcagagaaccctcgagaagcccatctccaggaccaggtgcaggacgaccagcggcttagagctgaggctgcagggcacgtagtggtgctacagggacggcagggggtcggggtggaggtgagggttggttaggggccccaggttcccagtgcaaccctctgcccacacggtatcccactcaccgtgagcccaacaggaaaggcatacttccccgaatccccgtccccatctgtatcttccaggcccctgtgtgctagccctgtggagaaaagccggggctggtggaggcccagctgctgcagcttttcagggttctgggtcagagtagctgagaagagcagcttctgcaggggcatctggggacagcaggtgctggaagagaagggggtgttgctggcaccctaccagtggctgccccgaacctccagggaacaggattcctcatgctacgcactgtagagactgccgcagaccaggagcaaggtgggtccagctcacgtgacagtacgatgcggttctgtgcaccagagctcaagccacccttatctctgggcattaaggaaggagagctgtgtgcagaggactctgctcaggggaggccagcacctgggcgtgctgctggatacctggcggctgtcacagcctgggcctgccttcgctggagcagggcacaggggtccgcggggtcctcgctctggaaggcggccgccaccacccgcggcagccaggactgatgcatgctgtcaatcatccggtcagcctcgtcgataatctgcaggagacagggagcccgggactgggtggcgcggccctgagctcaaagcccaggcccctggggcggggacctaccaggaagcggagctgctggaggctgaatcctggggtctggtcgatgtggtccaccaggcggccgggggtggctaccacgatgtcagccaagcagcggtacccatcagctctacagaccagagagcagctcgagagaaggaagctttctcaagggcttccggatagcaagacgctgcctcaccccacagccccgactccaccccacatgggaagggggccggtgggagctcctcctcttcacgggaacaggtggttaaagatggtggcccctcctctgctcccacggtgcctcaggccacctgcagggctgagcagggaccccctgaaaaacccgcaccctgacacaacctacgttttctggacgaggctctcctgctccttggccagagacttctgtcccgtaaccagggagactctcagaggtgtggcatctgtgtagatgttgaaaactttgctcacctgcaggagaagtctgtcactggcctggaggtagctggtgtccacctactgcagcaaaaaggaccccagatctaatctgggtcccccaggggctgatcgctgtgcactcagcagggaagctgaggcgggcggtgccacgctccaggtctagggtccacatacctgctgggccagctccttggtgggcagcacaaccagggcacggatgtggcagaccactctcgaaagcagggcctgagggggaaggagcgcctgcgtcagcaaggctgttacctgtcctctgcacacccgctgtagagaaaggggaccctcacacagacctgcaccacagggatgacgaaggccagtgtcttcccactgcctgttggggcagaaacacagaggtcgctaggccggtagccacctctgcccaccagaaacccacaggctgcgctctccaggagggcaggaatcacagctgcctggactggatgaggaaaggcgagagagaagtcgtgtttacgcctaggcctaggcctgccgcttccctgcctgtgacctctgggctgggctgctctgctggaggcctgggaaccgctccccagagggatggcaccaaggcccagaggaacgccagcctcaggagacccaagtgggaaccatgagcttgagagtgctgagaccacacttggcaccgatgtggcagggacgcctgacccacggccactcacagccttgtgtgtgggtgcccagggaggtgttccctcagctgcctgcccggggctggggcacctggaaagtaggacgagatgccgtgtgcccgcagctgcttctgcaggtcaggatggacgtcagggatgtcctcgataggaaccaggtcttcggtgacattccttctgacacagttaggctcagccagccaccttggcaggaaaggctggacctgccatcaaaaagaaagagaggccaggtgagcgctttccaggctctcgcgcagaagcccacggtggaaaaagctaggggagggaggctggggaaacctctgtcgtcttcagctccttctcagccccaggatgcgctttccatacagccttcagaagttaaacagtaaaagcagatgccactccctgagcaaactcactctgtagcctcccatcaacccacagtggcacccaccctcccgcagccaggaggtcctgtgacctggcgctcgcctgccccagccacgccggcgtccctgcctcgaggcctctgcctggcacccccaacccccaaccttgacctggcttcaagtctttgcatcccaactcaaagagaacctcctccacctgccctacctaaggtgcccgagcactctgtcaaacttctcgctttcttcacctgtctcgccggaaatctctttaccgaaaaccacacgtgctaagcaaaaacaccaacggtcaggagcttgcagaacggcctctgacttactcctgaggcggtgagcgcacagcaggaaaccccgcacgttcacgcaaacacatcttgcagaactggcgcggcgcggcgggaggacaggggcaagcctagcagaggaaacgggagctctgcacgtgcaggatccagacccctaggcgatgaaactgcagacctggcagcgaggcgcggctgtgacccgggaacattcgctgaacgaaatcttccggggcgaccgccgcacttaagaatccgcgcagcctaccctctcacgccgaccaccctcccgcccgccgaggctcaccttcggcgccttcctcttcccgaacccccccagcaccaggccggggaccaggggtccggccgcctcctccagggccggtccatctggggccgcctcggcgctggcgctggtgctgcgctcccccggcgcctcctcgctgctccctgcgctgggctcccctggcgcctcctcgctgctccctgcgctgggctcccctggcgcctcctcgttgctttctgcgaggcagacacccacccggcagcgcgtcagcaccgagtcgccggcgccccagagggagcccgctcgccccgcggcccacctgcgcccgcgtcctcgccgtccgccttccgtcgctttccctgcggcgcctccgggctccccggctccgcgtcgttcacccgccgccgccgccggggccgccgtcgcctcctggtcgccggctcggtcgatgcagccgcctcggtctgcgcgggctcccgctgctgctgccgttcgcgggcccggctctgcagccgctcgagcagcgcgcgggccctgccgtgcgccccggcctccgcgccctccggccccgccgcagctgccgcatcggggcccgggtaccgcgcgacgtagaacagcgccatggccagccgcacgcctgggactcgggcgtggcgcgctgcgatgacgtcggcggcacgcctgcgactcgggctccgcgcaaaagatggggttggggtacggcgcgtagagatgacgtcgggttctacgcgcagtggtgacgtcacgggagcgccggcggctgagaatccgcgttgttccgtgttgggggcggcatggagcgggagccgggcgccgcgggagttcgccgggctctgggccgccggctggaggcggtgctggcgagccgcagtgaggccaacgccgtgttcgacatcctggccgtgctgcaggtgggcctggcggcgtcgcagggccggagtcgcggcacgggagcgggacttgaatggggggctgcggcggcaggtccccaggaggttccgagacggcgttggggggtcagggtgggaggcgtgtgggtcacgggtcgggggtgacggggctggcgtcccgagggggaagggaacgggttgggggcagcctaggcaggggcgaaggtgacagttggcggccgggcaccctgccgccgcctctcctgcagtctgaggaccaggaggagatccaggaagcagtccgcacgtgcagccgtcttttcggggccttgctggagcggggagagctgtttgtgggccagctgccctctgaggagatggtcatgacaggtgagccctggagggccccggggctgctcttctctttccgtgggtcggagggaggctttgtcaccatgggatgagcgcccccaaccctggcacaggccgtgcaggctggtgggaggacgcaccaagcccaccgtggaagatggatggtggcgttggggcaggggtgacatgggtgccctgcagctgagtgtagatgaacactggacaaggtacgactttttgtgtgctttgcaccccttttgtaatttgatgttgactgatcctgacacggtcgcttaaactcggagcttcctttatgtccccatcctggggacgtcaggtcttggagtaaagagaggggatgtggatcctgctcctggcagcttggctggggcagtcctggggtaggaggtgctcttcctgtttgcagggctcagggaatgtgctggtctcagcacaggtctgggggccttagcgacctgtttccacctgcggaggctgagtagaagacaatgggagggtggagccaggcctgagattttgggctgggccc

SEQ ID NO: 5877 - DNA, 6000 bp, Homo sapiens; identical to SEQ ID NO: 2775

SEQ ID NO: 5878 - DNA, 6000 bp, Homo sapiens; identical to SEQ ID NO: 627

SEQ ID NO: 5879 - DNA, 6000 bp, Homo sapiens; identical to SEQ ID NO: 619

SEQ ID NO: 5880 - DNA, 6000 bp, Homo sapiens
ttgctgcgtgtctgtgcagtcacttggaattcaggttctttgcttcgcagttgcagaaaacgccacgcactccttctccaagcagggcttgtcgtagggctcaaaggaggtaatgggtgtgagggtcctttccgtcacttggtgacacgtggtgtgaggtcatcaaactggagggaggtggctgagggggtgaggctctaacagcgcaggtgggactggcaggcagagagatgagaatgctgctggcttgggtcggggtcagggttgagggaaggaaggaaggagtacctcggccttagccagaggggctgaagcgacgggggtgggggtggggatgggggggtgtagggcagccgagtcagtgacctgcttccctagcctggaggggtgggcgctatatcttagagttcccagagaagaagacccaaaaggaagggagccctctcttgtctggaggccacacctgttagagaggaaaggcaagcagtgagagcctgggggcaagttgaacagggagagcagaagcagaggtggcgggagagttacagactatgcccagggctgcgggaaagcagcttgttaggcactgagcccaccaggctgcgcggggcctcagaccttgcccacatgaacacccaggtctcagatccacacacaggcatgcaggcaccagcccctccttatcctcagagacatgtgcacatgtgcacaaactcagagacgccacagccagctgagcattctcctgtagaggggcttgcaggcctggcttggatcctggccctttgacttactaactgtgtgaccttaggcaagctaacctctctgatccttagttttctcttccataaaacaggaatactgctacttacatcagtgttgttagagtccagcagatgctatagggacagctgccctggggacacattcagtcaaacccatcctatttcccatagctgcagccccaccacatcggactgtcagcatcacagaaaagttcaggaagagtttagagatatccttgctgtccccagtctcagactaggttgcactgggctccaggaaggaggctacacatttattgagctaagcattttttttttttttgagacggagtctcgctctgtcgcccgggctggagtgcagcggcaccatctcagctcactgcaagctccgcctcccgggttcacgccattctcctgcctcagcctcccgagtagctgggactacaggtgcccaccaacacgcccagctgattttttctattttttagtagagatggggtttcaccgtgttagccaggatggtctcgatctcctgaccttgtgatctgcccgcctcggcctcccaaagtgctgggattacaggcgtgagccaccgcgtccggccgagctaagcattttcactagaaggcaaggaagacgtagtcctaaaataatcctggtcctgtggcctgagggtgctactccacactcttcaccaagtgacaacacagagcagtactgtccaagataagcaggacctgagtcatctgagccctctgattctggggaaacaatgtcctcccagaaaagggaaaactgtaatcatttttcccccttcaagttccattcatccactcgttcatccatccatccgtccatcctccatccatccatccatccatccgtctgtccatccatccatccgtctgtccatccatccatccatccatccatccatccatccatccatccgtccatccatctgtccatccatccgtctgtccatccatccatccatccatccatccatccatccatctgtccatccatccatccatccatccatcctccatccaatgaacactgagtgcctattctgaggcagaattgtattaaatgctagaggcagaaataaagaattatgaaatgagacccctgacatatagatattcatggtcaggggaacagtatgcttcagtggaacaagcatagatttttggagccaagaggcccaggttcaaatcccagcaccatcacttacttgtgtgtggccttaggacaaatcacttagcttctatttattcaccccagtttcccgtctgtaaaatggggctaataatttttacatttcaaagttcttaaggggatgaaatgaagtaacatgtaaaactcctcgtccgagttagatgctcaggaaataagtcctattccaggccctctgaaagtatggatgagattagaagatgagggtggtgagaacattctgtggtggccagtggttcctactgcagcaaaggtgatagattcattcagctacctgtcgtcttcaccctgcacactcctcagtgtggaaacagcccagtctcagctaggctttccaggatgcctaccttttgcaaagatgagagtctctggcctccaggagtttactaaccagtctgaataccaagtgggtcttggaggctaggagaacttgagtgaggaagggctcaacattagagagtctctggcctccaggggtttactaaccagtctgaacaccaagtgggtcttggaggctaggagaacttgagtgaggaagggctcaacattagagagtctctggcctccagaagtttactaactggtctgaataccaagtgggtcttggaggctaggagaacttgagtgaggaagggctcaacattagagagtctctggcctccaggggtttactaaccggtctgaacaccaagtgggtcttggaggctaggagaacttgagtgaggaagggctcaacattagagagtctctggcctccagaagtttactaaccagtctgaataccaagtgggtcttggaggctaggagaacttgagtgaggaagggctcaacattagagagtctctggcctccagaagtttactaactggtctgaataccaagtgggtcttggaggctaggagaacttgagtgaggaagggctcaacattagagagtctctggcctccagaagtttactaactggtctgaataccaagtgggtcttggaggctaggaaaacttgagtgaggaagggctcaacattaagatggtgggactaaggccagaggcagtcagataaaaacagggagggaccaggtagctcttttgggggaaagtcaaactgtaccccctgggccaggtcaaccaggcagctgttctctgacaaggtgaaggagaggtgacaggactgctgggctgttgctgttcatcctcacagaaagcatgtcacactgtatgtgctaaatataatttttgagggaaccaacaaggaaattcaccatcttggcttgtctgatcctctcccctctttctcctttttatggagaggctggtgttttgttctggagtagctgtagctaggtgatcacatggactttgatgtcccctctgcaataactctgtggtcaatccatggtggacctgacatgcagggacaggccacacctgagcaccggggtagctcaagtatggattctggctgggccatgtcctactgtgccacagctgacccccagcccggcttctgctttcatagaggcaatgggtctgagagctgagacctgctctgccttcctcttcatgtggaaccccacaggagaggctgagaggggcccgagagacatatcgtgggggtgcttgatggaaaactacagactgagagtctcacttcacaccccacccctgctgggaagttctaaaatacacagaggaagcacatgtaaaaggaaatttccctttctccctgcaacttcctctcccttcataccacctagagctgaagaagcacctcctttgtcttgaaggaggcaccagctattctgaatgaagggcggtgggacagtgctgtaccccacaccaggtgggcgtgctcagggacagtgaccaggacgctgttctggaggagctcactgggcacacggcatagggcacatgtattcaaaaaatacccttccccattgatagctggcaggccactccagacaaattctagctaggtgcctggtgctatgcagtgaccagaggtgcctgggaccagacaccccaccatcccagcctctgcttccagaggacacacaacaaacacccacacctccccttaagcacctatgatatccctgcaccctcacagcaaccccgcaaagtagatattgtgttgttacctacctttgacagactgggaaaccaaggctgacccttgcctagctgtcgtgactgatacatgatagaggaggagaagaaactcaggtctgtctggtcccaatcctgggtcctctctacattgcttcttgaggtacgctctgggtgctttctctaggaaaatcccaaggagaagggttgtgaaggtccagggccttgcctagaagccacagagggcaggtacttggtggaaaactccagcgtgtgattcaccctcctcccttgccctcgtcagtgaggtcacctcccctcccaaggttctcagtttatagcctggagtctctggtaagagagggctgtcccctgtgctgcacatacccgtctcctcatccctgggaaggagatggttctggagggggataggggaaaagggggaagggggaagggcaaggaggaggaggaggggagatgaggtcagggtgtgagtctctgagccccttcccctgcccaagggagcagcagctcagcccagctctggaggggccatcatgggactgtgcccacggggagggcaccggtctggagacagtgggttcacagtgggagtgggatgggggtgggagcgctggggacagaggacttgacttcctgaggttggatgttgtaatctcggttcacaaacttttggcctcagtccctcctgctgctcctggtatttctctgtcctttcactccccaacacacacagcccccgccccaacacatacacacacggcttctttctgtctgggagtccctggacaagtcacatgggattctgcgctgggaggaacagggtaaggcgtgaacgtggagggcagtttccctttcaggtcccggctctcttggctttcccataagcagctgccttgggactctcctggagacctgatgcccacagccaagctgaccacaggagccggtgctggggactgaggtgagcgggaagtggaggggctggctctgtctttgcagtctccaactgctgctcagaggggctggagggatagagccctgggaagcgagactctgtggaactgcgtgtctgcagcggggggcaggacctgcaataacctcaggccaaagggcaagtctgatgcccacgactctcaggacaaggggtgccccctagctccgccccatccagcgtgggagcagctcagtgattagcctgtggagcaggaaagtccagcgatgggcagctggtcacggcagtgggtgaaagcaggggtggtcatctgacgaggggaggggaagcaggtggtgcccagcaaggtggaaggagaagtggacaggagaaacctcggggcattcccgagggcccaggaactgcaataaatgatcacaggtgaggggttcctgcccgctgcctgccggctgagcgtgacgagctgggtgccaggcgcctcccaggaggaagctgtcttggctttgggcggtggatgctatgggtgtgcttgtacccgaggggggcactcaggggagttgcaggcagccaccagctgagaccggcactcacggggtgtgaaggactacagagagagccaggttttggtgccatgcacacaggtatgtgtgtgcgaagggacgtgacgggaaatggcaccagtgtgtgtatgggaatgggtgttggtatgtgggtgtggactgaagcaggggctgggtgtcccatccccccgtgtgcagggtctgagctattcctatgctggactggggagcaaaggggacagagctgggatcccagcagcacatgggcagcagcatttctggtctcgtctgcacctctgctagccccagctgggcctctggcgacatg

SEQ ID NO: 5881 - DNA, 6000 bp, Homo sapiens
ttctgtgatgacacagcagcaccgaggtgacagtctgtgtgcacagcaaagacgtacatcttgataagccgcctgcgggtctggccttattgaggctctttgttaggttgtctgccagcggagctgagctgcgatcttacaggaaagctgcttgggaggaaggcacgagatcaatgtggagaggcagggcagagagggaaggcaagggacagcccagagagggaggacaggagggagggaagggacccaggtcagctggggcaggaggcccgctggggcaggaaggggtctgagatttgtcctcctctttcaggtcatgacaggccctcctggggacgaaggtcagggtctaaaacaggggcccaccatgcacaggcatgagggaagctttcctgataactcccaggaaagcaacaggaaaagccgagtgctttgcattccctcgggccctttgcctgaatttctcttcaccgaaaggtgtgagcttgtctgcaaacataatatcataaggtgttgtctcctgcacacagctggctagcaggagatgatgggaggaagggcagtcctccccgcaagtaaccactcacctgaacgagcagagcagggatcctgggggagaagactcggttccctgggtgtctggagtggaaaagcacaacttgggttgtgggactgcagttgacagaaggattcaatatgatgcaagccaggggatgcaagcggttgggcacggcagaacaccgttgactcactggtaaatatatttccgtgcctcaccgcctttactcccaatactgtgtcttgtcttcaacatcttatagttcttgccataaggaagttcttcttcatgtctcacttaaatccccatttcttagtggattgcctccgaagtcttcaagggacccagagcacagctaaacctccaggatctcaagttcagggacagtgagagggcacagcaaaatggagaggaaggaggtcagcaaggcccctgaagctgggagggaagggacagtgagacctggtagaattcggcttccccgtcaagtggctggctcaaattgaatttgcttacgtagctcaagaaaaatttatggagtcacactgtgataggtacgattctaggtgctggggatcaaaactcaatcccctgcctgctattagccccagacagacaataaatgagaaatcaaatagatgaacaaatcatgtcacttagaaaatttaaaaagtaataaggtagagagtgaaagtgagggaggtccccctggctggctttatctcgggaggccagggacagccactctaggagatgatattgggctgagacctgacgatgggaaggagccagccatgtaaagttctaggggaagggcattccaggaggagagaacagctggtacaaatgccctggggtgagaatgagcttaacatgtttgagaggtgaagtgtttctggatgaaatcagagaaatcagcagagccagttcctgtggccatcttgcaagtttagattttaagatcaatggggaccaggcataatgactcacgcctgtagtcccagcactttgggaggctgaggcaggtggatcacttgaggtcaagagtttgagaccagcctggccagcatggcgaaaccccatctctactagaaatacaaaaattagccatgcatggtatcacacgcgcctgtaatcctagctactagggaggccgaggcaggagaatcacttgaatctgggaggtggaggttgcaatgagctgagattgtgccactgcactccagcctgggtgacagagtgagactctgtctcaaaaacacaaaacaaacaaaaaagagcaatgggacgacattagagggttttaagccagggagtggtgtgatttgatcttcagaaagatccactctatgtggagaatggatcagagagaggcaggatgcaaggcgggggccagttcgggggtgcttgcattaatccaagtgagagcaatgttggcttggccaagggtggtaacggtggagatggagggaagcggacagatttataaagttttggaactgaggtgtgcagacgttggatgggaggagggaaagtgatagcaatcagatagaaaatgtgtcctgaaatggagaagtctcaaggagggtcaggtctgggggagaacacgctaagttcaaagtgagagctgaagccagctggacttcttgggtcgagtggggacttgcagaacttttttgtcttacaagaggattgtaaaacgcactcattagcgctctgtgacccaagggcagatgacatgccaataggcggttgcaatgccctaaatttcgcaaaggacacccggggcaagacacacagcttggcttggaggagcctggaatggaaccaagtgggggaaaatatgctctgtgccctgctccccccatttctgcccaaggagcctcaacacctacacccccaccctctccagactccccatgttagaatcgtagaattccttccagctcagaaatctcatgattctatgcgacttgacactgagccatcaaatggaaaggcagagtctcattctaggaataatgtgagacctctttgaccacggaggccaaggacaggatgaaggaagctttcttcaatcccgaagagctggtcattctgagcagtagcgtgattcgctctgatgatcctctttcatttagccttttcctacaggtgaaagaaatctgtctaaaatgaatgtctagggtggtcttataagggaaaagaaggagaagagaccgaggggtccccgcaaccttagaggggcacatgagcgggaggaggagcacagccatgctaggccctgagcacacctcacctgccgctgtgcgctgtgtctgcagctctcatctttgtcatgagccagcaaatgggtctccccgtccccttccagcccactcctttcagctacctggaactcaaagcaacaaagacacccccaaagcactcaaatgttcccatatcacaggacctgttcaagaaggccagccagccggagcaccaccccaggattgccatgagactccaagggaggggaggtacctctcaaagcctcggtttcttcatctgcaaactcagatgagctctagaacaacactgtccaaaacgctggccaccaaccatacgtggctatttaaatttaagttaattaaaattaactgttttttaaattcgggtcctcaggcgtgctagccacactccgagttctcagtagccacgtgtggctgttggctaccgtttaggacagcacagatgtaggccatcttcatcatcttaggagattcaattggtgaggctttaggacgggggttccctaaatatagtgcctggactagcagcatcggcaacccctgggaacacttcagaaactctcaggcccaccctggaccccctgaaggagaaactctgggggcggggttctaacaaaccttccaggcgattctgatgcacgctgaagtttaaaaatcaaggctctagtctggagtaacagcctcacacattatctcgcttgagcctcaacaatcttatgcaacttctgcccttccaggggaagtagaaccgtgactcatcttgcagctgaggagacgaaacgcaaagatcacaaccctggaaaatgcagggctggacctctggcctttgacccttccctgctctcatttttcccatcaaatttctctaagatcattccagagtgaaaaaacaaaaacacaatcctgtatctctgtgccatactggaactcccaccaactgggtactcgagaagtgagaatgactgtgacggacacagcgtaatggttaagaagccacatccgttcccgtttcacagatgaggaaacccgagcctgagcagacagcggcttgcctgtgcccgccgctccttcccgatcaccaggactcagtccaggtccagagaggaggcagcttcagggagagacaggcccaggctgcagtcctgcttctgtgattaacaagctggtgacttgggcaagccatgtgactctgaaaagtctccatttcttcagcttggaaagtcagaataataataggactggcctgctgtgggattcaatacactcatgcatgtgaggtgctggacacgttctaagcgcccagcgcagttttgatattattataccagacactaggaagctggcctagttttgaaattcttcttcttttcaatataacctgcctcttctttctattcattggccccaagttttcctggagctctttgtcccagatttctctggatatgtgagcacctgcttgggttctccaagcctatttgggaaccagaaagtcaggggtggcccttgtaagcacagtcatcaaaagagaactatttgccagctggtggtgcctgtagtttcctggaacccacctgcagccctgggcaaacccgaacctggctttgagctggaaaagagcctccttataaagcagggaagatcctgagcagacagagggtatgaaaggaatggttacaccaggttaagatccaaggagcccatgagttgctagggcaacggccctgaattccagggtgccactcttggtcacgtgatttggtcaaaagggtgggtctctctggcctctatattcccatctatgggaaaggggagactgagctgtcccatccaccggccttgagttcccagagatctaggatgaatctgccctcgttgttttctggaatgggagcctcatcactgctgggcattttctgtcgctcttcttccagtgggaacgagagaggctgccgtctctgttcttcccccacccctcccactccccagaaaccccagtttgcactctgccctctgactcagtcctcccatccgctgcggtctctctcctcagttcctgcggaagcacctcctctctttaacttgactctatttttttctctccccgtctcttccctggccttgccctctctctttctgccctgtagccgcgggcgtccaaatgaagctggaattcctccagcgcaaattctgggcggcaacgcggcaggtaggtgtgatgtcgggccaggtcggggctggggactcaccacgctcccctgggtgtgagaccccctctccctccccttggatgctccactgccttgaggctctcaggatgccctcccggcccctacacttctcagcccctcagctccccagcctgcaggccgggcctcagcgctggtccccagcccctgccagcccagtgctgagggcacgacccagagtcaccccttctcgccactccaaagccactggcatgcctccccgctgaaaagggagagccacctcgatccaccgtccaaggtccggggtccaggccctgatggctggcaagagatgccagagacgacagcggcttctggctgagaattcccagctctgcctggcctcgtcctgtccgttctactggctcctttcccctctgcttccccagagccctcaggtccctctgggcttctgagctgcccccttcatctccctcaagctccctcagcctcaatctcctgcaacgccgagcccctcggcccccatcacttgctgctgccgcctgactctgggcaagggcagggagcccaagagtgaatcgagagggatggagggcagggggctgcggtcacccaccgcctcaaccagacagccagtgcaggagccccacagagcccacaaagtcccctccccacaccagcaacgaggcctgggggctgcagagcctgcacctctagaagggctacctgggcccttccaccacccagggcctgccgaatgcagcacccgcaggccacataccacatgcataccacgcacacaatgctaacacacaccacacgcatgtgccctccacgtacagacaccccacacatagacacacacatgcacacacctcacacacgtgctctccacatacgacacacacatcccacacccacaccccacacaggtgccctc

SEQ ID NO: 5882 - DNA, 6000 bp, Homo sapiens
cgcctgctcgccggacgcttccagtccctcccccaaaccccttgccctgtccccgcgcccctccacgggcctagcatttcctctgagcagcggcctggcctgatcaccacccatctccccacagtggaaggcgggcacagagccatcttcttcaatcggatcggtggagtgcagcaggacactatcctggccgagggccttcacttcaggtaatggcgggcagagcctgctgaccctgacctttcacccttgacgccgacccagcagtggctatagtcggacgtgcaacaggattcaacgctgctcttttcccaccctcctcatccctgcccctaggatagtgggtgctgcgagaacctccagcagcatacaaactgttgttttccagagggacaagagaatctctccttgtctgtggtcgtggagaggagcaggccaaaaaacgcgtggtgaggggaaaccgggcaaggctagtgaaactgcggccttttctttttttttttttggagagggagtcttgctctgtcgcccaggctggagtgcagtggcgcgatctcggctcactgcaacctccgcctcctgatttcaagcgattctcctgcctcagcctcacgagtagctgggattacaggcgcccgccaccacgcccggctaatttttgtattttagtagagacggggtttcactatgtagatcaagctggtctcgaactcctgacctcaaatgatccgcccgcctcggcctcccaaagtgctgggattacaggcgtgagccaccgcgcccggccgaaactgtggcctcttaatacctatccctgtcctctccaggatcccttggttccagtaccccattatctatgacattcgggccagacctcgaaaaatctcctcccctacaggctccaaaggtaggtctgagcacttggtaatcacatggcaggtgggatgatcaaggtagctggcaagaaaccccaggggaatatggtagtgtcaggcctttaggcctctttccacatctgcaagagctgtaacaaaaatacctgcctcctggggtcaaagcagcaaattctgaacacactgtgtttgcgtgctttttactgtctcctccctgacgtgtattcaataagagtattgtttgtccctcgtcttgttcactgcctagatcaaagctttgttttaaagccttttttttctaactgcttgacttactatatctacagttacatccactagtacactctgttctggagaagtttgtccctaagcttgactagttcacctgttctctccttctagaccatacataaaagccgtgcctttgagttccccagacctcttcctcctccccacccacgcacacatatacaccctgggtcaggtagctcacctgtaacctgtaatgtacttctttgtgctatacctagtgcaggtcgcttattcatttactagactgggccctgggaataaaagattcattaaacacaattcttgtcccccaagtccttacaggagacatgattacggtacagcacgaaagcgcccacgttagaggttgcacagagtacagagggggaaagagtagtcagctctgctggtgacggggtttgcagttcaaggcttcacagtgggtgagggtgcatttcagctgtgctgcgtcttgtcttccttgtcagcctgattaactctcctccccccagggtagtgccaggctgtacaccattgcacagggcatacagggaggaacatgaaggagaaaatgcttgggaaagggtgtttggccttgaccagccactgctgacctcaatctcagacctacagatggtgaatatctccctgcgagtgttgtctcgacccaatgctcaggagcttcctagcatgtaccagcgcctagggctggactacgaggaacgagtgttgccgtccattgtcaacgaggtgctcaagagtgtggtggccaagttcaatgcctcacagctgatcacccagcgggcccaggtctgactcccaccaccatctgcgtggtgtcagcctttccttcctaggcccagagtattgggaattaggaaaggcagcttattagaaaagcattgtcaccctagtgccatttccacctaaaagctgtgctaattgccactgtgaaataaggagagccagcattagaactcgatagcactcggtgttaggaagcacagaggaaaatggccaagtcttggcttttcctgcacctcttcgagcagagaggcttatgttacaggtttgcctgacaggaagctaaggcagtgcatgttgtattgagagtgaagggttaggggtcgcaaccttcctttcagctccccagtcccctcaaaccacccctcccttcccctcttcacccctgccctcaggtatccctgttgatccgccgggagctgacagagagggccaaggacttcagcctcatcctggatgatgtggccatcacagagctgagctttagccgagagtacacagctgctgtagaagccaaacaagtgggtgagtcgcaagagccgtggggtgagggcttctgagatgcaggaggaggaaagactccatgggtggggctcctgacccaggacagggtctccctgactctctcccaccacagcccagcaggaggcccagcgggcccaattcttggtagaaaaagcaaagcaggaacagcggcagaaaattgtgcaggccgagggtgaggccgaggctgccaagatgatatccttctgctggagagatctcagcccagcccctagggcacctgagttccccattctccttcatgggcaggctgatgagactaaggcgaatgcgactccgtgctctctggcccttggctccttgttgggggtggggactacagatgagatctgaaatcttagtggtagtacctgagccatgactccccactgtaaggccagatcaatagcattggtggccttgccttcatttctggtgctgcccctagttcctggcagcagcctgcagggaggcccacaggtggggtccacggtagggctgggcacaagccacctgagcgcaaccttggatctgacagcccagaggaggactggagcaagggagtgtggtaaggacagggccagggattgagacctgcccttgcgtgtaccttaaccctcctcaccttggagaagcactgagcaagaaccctggctacatcaaacttcgcaagattcgagcagcccagaatatctccaagacggtgagtgtgtcagcccagcgtctctgatggggctgccttgagaaagtgctttcagttaaggcacattgaggtgagggaattcgaaccttgcttgttccggtttctactcagattggcttctctggccggcgcggtggctcacgcatgtaatccccgcactttgggaggccaaggtgggtggatcacctgaggtcaggagttcgagaccagcctggccaacatggtgaaaccccatctctactaaaaatacaaaagataatgagcccgctgtggtggcgtttagctatattcccagctacgcaggaggctgaggcaggagaatcacttgaacccaggaggcggaagttgcagtgagctgagatcatgccactgcactccagcctgagcaacagagcaagactccgtctcaaaaataaataaataaaaaattggcttctccgatactcctcctgtcaagaatgattcctctgggttccctgaccttttgttctaatcatagctgctgctcagcgctctggatccctaagtgcgagcagaaaccatgtgttactcattgctgcacccctgccctaatctgcatgtgttccatgttaagtagctgctgaattgcaggggtcggaattgaggtctttgcttaatgcaagcatctgtcttatttcctgccctgtagatcgccacatcacagaatcgtatctatctcacagctgacaaccttgtgctgaacctacaggatgaaagtttcaccaggtgagagatgtggccacactgtggggtatcaccaagaacgtgggacctgagtctggttgtttgggctctggagcctgctacagctattcatatggctcagagacattgaaccaaaattagaaaagggggtggttgacagtttctatcttgcatctcataggattgattttatgagatcaaataggattattcacataaaaagcactttaattataaagttttcatctaaccaaaaagtgatgaaagatgatactcagttttcttactcaagagccctcaaactcctctggtgaatggagggatgttaggaaaggagatgagaaatagcagtggccatgagaacatgcctcctcctttcatgagcctgagattcctggctgtcaaccctgtttatcttttctcttgggagcaaaggagggttcaaagctgagtggggcctgaagctgtcaattaacatgtgcatttctcttctctgtttcttgttcatctggcgatctggcaccacaggggaaggtaagctgttgttgcttctgtggggtcctgcaggccaccttctccagtacccgcctcctaccctaccccctttcccacctccccgaagacaaaccctcaatcagggtaggagggtcgtagagggaatggcctagagtgtcctgcctctcacatttatgtcccctaataatgtcattatctatcttttttttcctacagtgacagcctcatcaagggtaagaaatgagcctagtcaccaagaactccacccccagaggaagtggatctgcttctccagtttttgaggagccagccaggggtccagcacagccctaccccgccccagtatcatgcgatggtcccccacaccggttccctgaacccctcttggattaaggaagactgaagactagccccttttctggggaattactttcctcctccctgtgttaactggggctgttggggacagtgcgtgatttctcagtgatttcctacagtgttgttccctccctcaaggctgggaggagataaacaccaacccaggaattctcaataaatttttattacttaacctgaagtcaaggcttcacgtgttcatgaactgggtaactggcagcaagcatgcgcacgttcacatgtgcgctcctgggtctgtctttgtgtgtgccagcagggggcgcaaaagaatctggctggggcggctaaggggaagcaaggcctgggctccgaaacaggacccaagctgggaaggctggccctgagttctcgaggcccagctgtgctcttcacacaccctccatttctcccacatcacccatttttttaaggctggacagccatggctttgctgagccagattaaaaatctgatgaccccaacaggagctgcttccttggcagcagggttccttgtggctgtggggagcctgcctgtgcctgttgaggcacttctgtgcccagaagcccagtggatcgcgtggcctgctgtaggccccccagactccatttctcagtcaccaggcgtgaggagctgctagctaacaggcctcccctggggaggtgggcttttcatgcccgcagttccggggccaacagaacaggtgcctgtctgttcagtccacagataagctgacacttatcttcccaagacaggccttcccgaatctcaggcaccagagaaacagagccaccgtttatacctgaatctcccactactgcccatttcccatccctgcggggagacaaggaagatgtggaactcagacaaaacataggtgcaaagtatgtccaggaactgccaaatgcagatagggcagcaggtggatctgaacagagggactgggttaatctgcttcgatttttaagatatttttctctgcttggggttgagtatcatgaaagacaaagcagacgtcgcagccccaatcctgagttgctgggaggctaagatgagataaacaactagacaaaagacaggtcaagtgacttggatcagtcttcctcatgttccccttcacactttatt

SEQ ID NO: 5883 - DNA, 6000 bp, Homo sapiens
caaaaaaaaaaaaaaaaaaaaggtccattctcagctcttcattattcatagaggagtccttgtctaaagttttattatttagttaccagcctcccagttgtacagacactgcacagacactcagtccttcagtcactgctgaagagccagcagatgccatgtccagctttctctctctctagggtcttggctcctgaaattccttgttctgtggaagcctctctgatgcttcctaatagtttttttgtattgatccagctttcctggttggtctcagcaaacaattggtctgccacaagctatttaagccacaatccaaactggaagtttctgcttctcatttttgaggttggctttcatttcctcattgatttaaaaattctaaaaaatacatgctgtccatgagccctggtgcttctttttagggaaagccaaaatttagtagtagcattttaaaaatcaatcagatttttaaaatgaaatagatgctaaaagtgataaagaactaccaggcacggtggctcatgcctgcaatcttccgggttcactccattctcctgcctcagcctcctgagtagctgggaccacaggcgcctgccaccacgcccggctgattttttgtatttttagtagagacggggtttcactgtgttagccacgatggtctccatctcctgacctcatgatccgcccgcctcggcctcccagagtgctgggattacaggctgagccaccgcgcccggcccccttggctttcttgacacttggtgttatggtctgaatgtttgtgtctccccaaaattcatatgttgaaatcctaacctccaaggtgatagtattggaggtggggactttggaaggtgattaggtcatgagggttcaaccaaatgagtgaaattagtgcccttataataaaagaccccagaaagctggctcatcccttccaccatgtgaggacacagcaagaaggagccatatataaaccagaaagtgggcctttgccagacaccaaatctgccagtgccttgatcttgaactttccagcctccaaaactgtgagaaataaattgcagctgctattggccacccagtttacagtattttcttataatagcctgaatgggccgggcctggtggctcatgcctgtaatcccagcactgtgggaggccaaagtgggtggatcacctgaggtcaggagttcgagaccaagcctggccaacatggtgaaacctcatctctactagagatacaaaaattagctgggcgtggaggcatgcgcctgtagtcccagatactggggaggctgaggcggaagaatcacttgaagccggtaggtggaggttgcagtgagccaagatcgtgccactgcactgcagcctgggtgacagaacgagactccatctcagaaaaaaaataataatagcctgaatggactaagacactcacttttcctatttctctggatattcttctttgtctcttttgccacttcatcctctgcaaacaatacattcaaagttggactttttttttattattatttttttgagacggagtcttcctctgtcgactctgtctcaaaaaataaataaataaaaaaatataatctgatcctttcaccacattgctttagtgcctttaatggctctttctgctattggataagttaaactctcacttcaccctgcgtggtctgaccactaacttcctcttacacaagcccaatatctccacctggctagctataaaatagaatcttaaaccctaaggactgcttttctcattggtttctttctttcttttgagacagagtctccctctgtcacccaggagtgcagtggcgcaattgagaggtgacagcgtgctggcagtcctcacagccctcgctcgctctcagcgcctcctctgcctaggctcccactttggcggcacttcaggagcccttcagcccaccgctgcactgtgggagcccctttctgggttggccaaggccggagccggctccctcagcttgcagggaggtgtggagggagaggcggggctgcgcgcggcgcttgcgggccagctggagttccgggtgggcgtgggcttggcgggccccgcactcggagcagccggccggccctgccggccccgggcaatgaggggcttagcacccgggccagcggctgcagagggtgtactgggtcccccagcagtgccagcccaccggcgctgcacttgatttctcaccgggccttagctgccttctcgcggggcagggctcgggacctgcagcccgccaagcctgagcctcccacctctcccccgccatgggctcctgtgcggccgagcctccccgatgagcgccaccccctgctccaaggcgcccagtcccatcgaccacccaagggctgaggagtgcgggcgcaagggcgcggactggcaggcagctccacctgcagccccagtgcagtgatccactgggtgaagccagctgggctcctgagtctggtggggccgtggagaacctttatgtctagctcagggattgtaaatacaccaataggcactctgtatctagctcaaggtttgtaaacacaccaatcaacaccctgtgtctagctcagtttgtgaatgcaccaatcgacactctgtatctagctgctctggtggggccttggagaacctttatgtggatactctgtatctaactgatctgacggggacgtggagaacctttatgtctagctcaaggtttgtaaacgcaccaatcagcgcactgtcaaaacagaccactcggctctaccaatcagcaggacgtgggtggggccagataagagaataaaagcaggctgcccgagctagcagttgcaaccggttgcgagttgctttctgtgctgtgcaagctttgttctttcgctgtttgggtccacggttcttttatgagctgtgataccgcggaagtctgtagcttcactcctgaagctagcaagaccacaagctcgccgagagaaacgagtaactctagacgtgccatcttaaaagctgtaacaccgcgagggtacgtggtttcattcttgaagtcagtgagaccaagaacctatcaattctggacacacgatctcggctcattgcaatctctgcctttgggttcaagtgattctcctgcttcagcctcctgagtagctaggattacaggctagtgccaccacactaagctaatttttgtatttttagcagagatggggtttcatcatgttgggcagcctggtcttaagctcctgacttcaggtgatccacctgccacacacttccaaagtgctgggattacaggtgtgagccactgtgcctggcctcttactggtttctttgcttgataatatgttgcaaatatataacattattcacatagaaatctttttctgaaggcgtaaatactgacatattggggaggtttctttttcttcttggtttttattttatcttagaggtagggtctttgtcactcaggctggagcaccgtggcttgattatagctcactgcagccctgatctctaaggctcaggtgattctcccacctcagcccctcaagtagttgggactacaggtacatgctaccatacctggctaatttttgtttgtttgtttgtttgtttttttttttttggtagagagaaggtctcactatgttgcccaggcctcaagtaatcctcctgcctttgccccacaaagtgctgggattacaggtgtgaggcattgtggccagccaataagttttaagtggaagagagtggttgtcttttaatgttatagctggagtgatttggtgatttcctggcacacaggtttttaaaagcatgtacacaatagggtttgttttcttgctactactggaatcctcctgccacaatgtacgtaaatccaggctaatccgctagaggatgaccaaagagagacgtgaatcagccagccccacccagcccaccagcttattgcagagtgagctcagctgagatggaaccgatccgatccaatccaaaccagaatcacccagtggtgttcagcccaaattgctgactctcgggaactatgaactaattgaatagctgtgtattttaagttttaagttaattgattatacagcaaaacctaactgatgccctgtcctgattccaaacactgggtactcatgttaaaagagcatcaccggccaggcatgctggtttacatctgtaatcctagcactttgggagaccaaggcaagaggatcacctgagcccaggtgttcgagatcagcctgggaaataacatagcgagaccctgtctctacaaaaaaaatttaaaagatccccaggtgtaatgacgtgtatctatagtcccagttactcgggaggctgaggtgggaggatcacttgatcccaggaggtcaaggctacagtgagtgaaggtcgagacactgcacttcagtctgggcaacagactgatatcctgtctcaaaaacaaaaaatggccaggcattgtggctcacacctgtaatcccagcactttgggtggctgaggtgggcggatcacctgaggttgggagttcaagaccagtctgaccaacatggagaaaccctgtctctactaaaaatacaaaattagacagtcgtggtggcgcatgcctgtagtcccagctactcgggatgctgaggcaggagaattgcttaaacccgggaggtggaggttgcagtgagccaagatttagccactgcactcactccagcctaggtgaccagagaaagactccatctcaaaaaaaaaaaatatttctgtttctcactcagccagtttccatctcagctgggccagctgcactccacctggtcctcaagctaatagatttcacttccctgaaggcccacaaaatcttttttttctcttttttttttcgttgacacagaatctcactctgtcacccaggctggagtgaagtggtacgattacggctcactgcaatccctgcctcccaaattccagtgattctcgtgcctcagcctcctgagtagccgaaattacagacgtgtgccaccatgcttggctaattttttggatttttagtagagatggggtttcactatgttggccaggctagtcttgaactcctggcctgaagcaatccgcccacctcagcctcccaaagtgctgagattataggcacgagccactacacctggccacaaaattctttaaagaagccaatcccatcctccctcaagagccaaggggccacctcaccctcttgttacagcagatcctgcctcccacagtcaccctgctcccaagtgcaacctctgtctgaccctgcatggtgtgcggtgccctcctgcctcaggccgtgagtacatgcagctgaactgctgtcagtcttatctgtccagtgtcgggtgttgtgtgtccagccacccataaccctgggttgggactccctccctcaccaaccgggggaagaagtagtgagcaaaccatctaccaattcttatctagatttatcctcttcagctgtagcttttgcaatactctggtcatactcaaagcattctgctgggatgtcacctgagctgggcctacatgcaattctgcttttcttctgagaaaataatttgtcattctttctgcttttataatttgttctattttaaattatttttctcatttttgcctttgctcctttcttctcagcattgtatactcaaaggaataccctcatactctacattttaatccaagacagaggaaagcaacagggagaacccctgaggcaggggcagagggaggttcagggaactgtaaatgggaggtagacaagagaccaaacaggactttaagttgtttcagcaagtatacagcttagaaaggatctcattggtctgggtcctaaaatatctcaaaggatggctgctaactcaaaacttttttttttttgagactgagtcttgctctgtcacccagggtggagtgcagtggcacgatctcg

SEQ ID NO: 5884 - DNA, 6000 bp, Homo sapiens
atttttagtagagaatagagggatatcaccatgttggccaggctggtctcaaactcctgacctcaggtgatccacccacctcagctctctctcctaaagtgccggccttacaggtgtgacccacctcgcccggcatgtacattaattattgttggactaagctggctcccaatttagtcaatgagtagattttgcgctaggtataatctcacccaaagctggctgcatcagaattatgggggttgggattcctgagtcagctgaatttgagaatctctgtgtaagagacctgaaagttgtctgtaaaaaaataaatctgatgcacagcaggcttggaaatcacttttccaacctactttgcacaaatgatgatttctaatttcccttatgggcagatgggtaagaggttgcattgtatcatgtttacctagcagagtaaactatttaggtgagatgatgtaggggttaccttgcttggtgacactagatagcaaagtcattttactatgagaaattttattgagatgagtacatgtacattaggtttttgacgtgtagacattatgttaaggaaaagaattggcatacctatttattgcttgtttaaactgctcaagtaattacttttgcactagcctaatatatttccccacaagcttgacgccatcatataatatgttgagatttcttaacagtgttaattagccctagagcagcaggtttttcaataatgactctacaaatctcagtttcaaaacacaattatcttattttagaaaatatgaatatacatagtttacatcttacgtactagggatttaaagagttgtttcgtgagaaggtaaatcccaatgtagaggtccatattcataaaaaagactaataaatattgctatggaggcaaatactctgggtgaaataaactgaagtgaacctcggtaacctagataatgttcccttgttaacttgaggtctgagtccagtattttaatatctcttaactatggtagttatagcaactttagattttagcacagtgcctagcaaacaacataataatttatttaatatatattaaattgcattagtagctggtattatttcataaaacacttcaaaagggcctaggcctaggaaatacagcccaacctctgcttattcaatgagcaggataaggttattcaattagttcactatcaaattgagacatcgatgtccctatcaatgttttgagagtttggggaagagccaattaaaaaagcatttagctgggcctgatggcacatgcctataatcccagcaacttgggaggctgagaggcaggaggatcacttgagaccaagagtttaggaccagcctgggcaacagtgagttgctgtctcaacttataaaaaagaaaccagttagtaggaattacacctttatgtaagttagtgaagtggacataagcaagaggaaatggaacagtgggaataagcatttttagaagaaacaatgtaaatgagtagctagaattaagaacatttagagagagaaaggagggccaggtgcggtggctcatgcctgtaatcctagcactttgggaggccaaggcgagcaggtcacttgaggtcaggagtacgagaccagcctggccaacaaggtgaaaacccatctctacttaaactacaaaaattagctgcgtgtggttgcaggcacctgtagtccagctactcaggaggctgaggcaggagaatcgcttgaatctgggaggtggaggtagcagtgagctgagattgtgccactgcactcctgcctgggtgacagatccagactaggagataagatacagaagataattcatttgcagaagggatattagtattgaacgaaaacctagaaaaaggacttcttacccactgggacttttaagtttatttttgagggttctgtgtaactggtgtgcagaattgcatcaaagctgcatgttttcttttctcctaggtgttctattactcaacaggaatcttcaaggatgcaggtgttcaagagcccatctatgccaccatcggcgcgggtgtggttaatactatcttcactgtagtttctgtaagttggatggtttggtaattttgaggggagaaaagaatccttgctacagatgttcaaagatggattgcatgaccctaccatcatttagttacctttttgttgcttaattttcctttgggaaaaagagataaatttaatgttggatgtagtcttcactcttcaagcaaatatgggatggatgggaaaggagggagtatagaagggactatatagtatgctttgaacttggaattggaggaaaggtgcttggaaaaactctcaagctctgttactccactgtttttacactaaaacaacaataatcaacagaagttatctgtgatccccagaatatgtgagaatttttccccgtgaggtgtgcaatcagttccgtagtggacaccatctaggtgtcctgcgattttttaattatgacactgtctacctggagatagcatcagatctcacaggttggtggcccagttcccaagactgccccccactcctgatgccagtcacaagctccaggttgttttacctgtgcttctgactcaccagctgtagatcaggattcccacgacatcctctttgggtttgattaatttgctacagtggctcacaaaactcaggaaaattgtttcctagtttgatttaaaggatattttaaagcacagaaatacacaaccagatgaagagattcacggggcgaggtctggagggatcctgagcatgggagcttctgtctctgtggggttggggtgcactcctagcacatagatgagttgttgctgaccttcctgtcagcttccacgggttcagatatctggaagctccccataccctgccttttgggccttttatgcagacttaattggttctccatgattgaagcatggacaactgttctgacctgtgattggacaaaaagggaatgatctgaacccagctgggcctgtctgcttagatgatttgttggcctctctgtagcgtttcttcctctagggtgtggggcaggaccctctctgaaatgagggttttatgacccacagtcagattagcgtcctgccaagtgggagggcaggagaaagtcagagaagaattctgttatctgaggcctgctcctgaggcctgaagcatcccaacattatgacaaaagactctaccaagggctatggggattttgagccaggacctgtgaatggcacacaatatgtatgtatataaaatcataaatcacaggaggggtatccataacaagtgtcctgctgttggtaaggcagatttcaagtagctcagatgctgttttcatggaaaggaaaactgaagtttcatgtcatattcttcttccagctatttctggtggaaagggcaggaagaaggactctgcatatgataggccttggagggatggctttttgttccacgctcatgactgtttctttgttattaaaggtaggtgctctttgggtgaaaaaaaagggagggggaaagaagagaggttacagttgacttctgtgacacaaggggtgggttgttaaggttgcagtttgtcaataaagtcagaggagagaagcaggatgcccagagtttaagaaacatgggtcgtcagagaactggaggtaaactgttagaatccttacatttatagaacattattatagcttataaaataaattatctaatttaattcttagaataatatcaaggtaatcacacttaatagatgatgacatggtctcagtacaaagtgacatatatgagatcatatagatgggattgaaaaattcaatcctcagctgggcgcggtggctcacgcctgtaatcccagcacactgggagggtgaggcaggcggatcacctgatgtcgagagttcaagaccagcctgaccaacatggagaaaccccgtctctattaaaaatagaaaattagccaggagtggtggtgcatgcctctaatgtcagctacttgggaggctgaggcaggagaattgcttgaacccaggaggcagaggttgtggtaagttgagatggtgccattgcactccagcctgagcgacaagagcgaaactctctctcaaaaaaaaaaaaaaaaatccaatcctggctgggcgcagtggttcatgcctgtcatcacaacactttggaaggccaaggttagaggattgcttgagcccagaagttcaagaccagcctacgcaacatggcaagaaactttctctacaaaaaaacaaaaaaaaattttttttttgagacagggtttcactctgtcaccaggctggagagcagtggcaggatctcagctcactgcaacctctgcctcctgggcttaagtgtttctgctgcctcagcctcccaggtagctgggattataggcacgtgccaccacgctcagctaatttttgtacttcttagtagagactgtgtttcaccatgttagccaggctggtctccaactcttgacctcagataatccacctgccttggcgtgagccacagctcctggccaaaaaaaaaatttttttttaattaggcaggtgtggtggcacatgcttcaagtccaagcgatttgagaggctgaggtgggaggattgcttatgcccaggagatcgatgatgcagtgagctattgtagtgccactgccctccagcatgggcaacagagtaagaccctgtctcaaaaaataaaaataaaaataaatccaagccttttgactccacagccactctttgtattgtacgtcagggacaggaggagcttgccgttaattgcttctgggaacctagatactaggttacactgtctttaaatttaattttctctgttccttgctcttacaggataactataatgggatgagctttgtctgtattggggctatcttggtctttgtagccttctttgaaattggaccaggccccattccctggtttattgtggccgaactcttcagccagggcccccgcccagctgcgatggcagtggccggctgctccaactggacctccaacttcctagtcggattgctcttcccctccgctgctgtaagtaaactcaccttatcttaaaaccagcctatgtaagctgacatgaagatactccttaataatacagtagtctgggcctggcatggtggctcatgcctgtaatcctagcactgtgggaggctgaggcgggtggatcacctgaggtcaggagttcaagaccagcctggccaacatggtgaaattcaaaaattagctgggcatggtggtgcatgcctgtaattccagctacttgggagatcgaggaaggagaatcgcttaaacctgggaggtggaggttgcagcgagctgagatcgcgttactgcactctagcctgctcgatggaagcaagactccatccctaaataaataaaaaaatacagcagtccctcctcttcttcagtttcagttacctgtagtctaaaaatattaaatggaaaattgcagaaataaataattcataaagtttaatttgcggccagacacagtggctcaagcctgtaattccagcactttgagaggcctaggcgggtggataacttgaggtcaggagttggggaccaacctgactatcatggtgaaaccctgtttctacaataaatacaaaaattaggccgggtgtcgtggctcatgactgtaatcccagtgagcgagatcacaccattgcggtagcacacacctgtagtcctagctactcagaagactgaggcaagagaatcacttaaacccaggaggtgttcatggtgagctgtgatcaaccttctgctctccagcctgggtgacagagcgagattccgtctcaaaaaaaaaaaaattcataaatagagatggagttgcccaggttagtctcaaactgctgggttccagtgatcctcccaccttgacctcccaaagtgctgggattatggg

SEQ ID NO: 5885 - DNA, 6000 bp, Homo sapiens
aagtgctcaccccaactcctgcacctgcccgtctgcatgctctccctcccacaagggatttgagctcatgacagtcaaacagacagacatgcccgtcacataccctgctaagagggccagacctctcccatttcaccttaatcacactatttccctcaatcacactgggtggattagatgaggttagatggtactgcttattttttattttttatttctttttgagatggtctggctctgtcacccaggctggactgcaatggcacaattttggctcattgcaacctctgcctcctgggctcaagtgaaccttccacctcagcctcccaagtagctgggactacaggcgcacaccaccactcccggctaagttttgtatttttttggtagaggaagggtttcagcatgttgctcaggctggtctcaaactcctgagctcaagcagtcttcctaccttggcctcccaacgtgttgggattacaggagtgagctagcatgcctgacgcctggcattgctttttacaagaggtacatgtattcgaacttcctgacctttattcagttgtttgccctgcctgaaaaacattgccttctcctttctcctcttagtcaatatttacattttcttcaaatattaatgtaaatcttaatccaattcattgttatttattgtttaacattttacttacatatgttctgtatacatatgcctgatcaactttgcggtatgactgcagactgacacattttttccttcagtttccctactgtttgtaacaaatgctctgctgtaattttggtcggatagttattaattgtttagcttattaactttaaaaaaaagctcatttcactttgaaatccacatgtttaagctttctgtaaatgaaggagaaaatattaattatacttttctatgacaggaaatcctaccattaccaaattaaacagtatttagtatttgtggaaagcctggtaagtcaaaggcaaacagctttagtttaaaagtggtttatgttaaaaagtctcagaatagctatcaccagttgcaaaatactcacttccttttgtttctgtctggaatcattataacacccacagtggtcaacatcttgttgtctttctcttttacacatattttacatgtgtaaaatatatacaggacatccctgtatattgatcagtcttaaccacaatgttacgtattccactaattttcattcttactgcatgtactccttgtcattgttattagtgtctttaactcattattcagccttaaacatagataatggagtctatgaaagacttcataatgtagtcgaaagaatttagaaactgggtaaatagtactactttttacaagaagtgtaatgattaaaaagttcctcaaattgccgggtgcggtggctcacgcctgtaatcctagcacttggggaggccgaggcgggcggatcacgaggtcaggagatcgagatcatcctggctaacacggtgaaaccccgtctctattaaaaatacaaaaaattagccggccgtggtggcgggcgcctgtagtcccaactacttgggaggctgtggcaggagaatggggtgaacccgggaggcggagcttgcagtgagccgagatcgcgccactgcactccagcctgggcgacagagcgagactccgtctcaaaaaaaaaaaaaaaaaaaacattacccaacttgtaaatttttttaaagaagttcacatagctaaaatctaacactctgcttcataaagactaacctcatgatttttctccatgaatactcagcaccaatttcagtgtctgaaacataattaacattcattaaatatttcctttaaaacagacaatttagagtgttcttaatctgtaaaatattgaatgaataaaaggttttattttaaattcaatttcatcaggaaatttggaataaagaatttttttaggccaggcgcggtagctaaagcctgtaatcccagcactttgggaggccgaggcgggtggatcacgaggtcaggagatcaagaccatcctgactaacacggtgaaaccgcgtctctactaaaaatacaaaaaaaattagccaggcgtggtggtgggcgcctgtactcccagctactcgggaggctgaggcaggagaacggcgtgaacccaggaggcggagcttgcagtgagccaagatggcgccactgcactccagcctggacgacagagcaagactcagtctcaaaaaaaaaaaaaaaagattttgtttagctgtatatagtttccttagtgaagaaaaggagaagagaataagatattcaagcaaggttaaaatattgaagcagaaataaaataagctaataacgggacttggagggtgattaaaaggtaactagcaaagactctggatttgggaaaaggaaaagaagcatttgtgatatctatctctctttcctgcagttctctgcttaatttttgctgagtaactcaacttacatttatagaatgtggggagggagcaaaattagaactcaatgttatcaagggctagttcctttggccctgagagtctctgtcttcgctcagcttgcttctaacaccacaaagtcatgtgaggggggatacacagaaaggcaaacgtatattttgtggaacacagataagatataagactctcagactgtggctggaatgatcaaagatccaaaaagcaaggttaaattacaatgagaaagaggaatgaagcaatggaaagtccagagcctgagatataggaaaggaatatcttcaaaggcggagtgttaacctacttcaggcattaaatatgcagttctaagcattaaaggatcaagaactaatcctggcacattcctggtggtttacaaaaatacatgggacatgttttataatgaaatcagctgctcaagtcctagagaatgtggaaacctcaacaaagcaatctaattgttctctttaataccatcttaaagtttttgttaataaacaaaaaatgtttacaataatttaaaaattgtctcaatgtccttggatcttacctttacatatctgatttaatgtaacaaattaagttttcatatgtacctgtttggtacctaagagaacagagtaaagctttattggaaaagtgtcatttgtactataacctccacacattttcttttctctctgttactttgtcacagttatttattcgattattttttagtgtttctgtatattttaggtaacaaaacactgaaggaaagcagtgaccaaaagaacgtgaaagacaggggttactgtgacagaatagcctcaggacttgctgatgagtagatgtagaaaggaaggaagagagggaggatcaaaccccattccaaccccaatcttccagaaaagcctgaggataaatgatgggagagcgaagaatcccttttagctgaaacagaagttatgagaacagaagcagtggtagatgaatggtaagtgactgaatttacccagcttatgattgggaacccctgaatattttaactgagataagaaacacagcaacaaaaatggtgttgggatttaatgttttttaaaaatttttagtcttttcttaaaatttggcatttatttcaaatgtgtttttttttaattaagaattagttttggtaaaaatatttgaatcatactaagtttggctttccaaaatcagggaatgtcttttatacgtgttatgcttattcttcacctcattctcaaaataatttgaagagtatagagaaagaaatttagaatgaaagataattttaagtgaattgacaagaaattcagagtgaaggagatagcaggggagaaaaaatctacgggctatgccaaagggcatgttaataaacaaaatatctgctactgcagcccacataatcactatattgaaaagtctaacactctgctaagtaaagaaaaatagaattcaaattatttataaggtaaatgcctactacttaaagctttgctagtcatggtgatttaacaaaaataaaaatctgccataaaactatgtaagagttaccctatggcaaaatagacaacatcctccccaatattcctataataaatgcatcagctagctttgtatggctgttcttacaactactttcagtgcaagctaaaataatgtaaaagcccatttcataaagttaagtgtgtgcaatacatattatattgtgatgaaaaggtgctaggaaccattcagtctcaaatattcatctaagcacagctgtacttgaaatgaagtgatttcatcaaatcaaaattcttccattccaggaaactcactttaaagcacaaacactactaaagaacaatgcagcaagtcaccaactctgtattattttacttgatttgatagttttccttcaatacctaaatctaagcaatatcaggcctgcctcatgtggatccttcaaataaaaaaaagtatgaaatatgcaagaagttgtgtaaattctaggtcataatcaggaatgatctcttccaacacaagactatgaaacagctaatttagcccctatcagatccaattatattacacttgcttctcacaatgagataaactatatatctgctggtgagctatatccatgaattttcagcagaaatctctcatttgagcaatgtaatttagactaagctagggctaagataaagcatgaacttttgttcttagaaaggatgcacatgatggaatgtccctttatttagtgttgaagataaaaaaaaagcaggaagcaaataccttatctactcctttaccacaagttattattatttttgtgtttttgtgttcaaggtccatgtatctctgagcagctatgaagaagcttcctggaaaacaataagcaaaggaaaacaaatgtgtcccatctcacatggttctaccctactaaagacaggaagatcataaactgacagatactgaaattgtaaagttggaaactacattttgcaaagtcattgaactctgagctcagttgcagtactcgggaagccatgcaggatgaagatggatacatcaccttaaatattaaaactcggaaaccagctctcatctccggtaagaatgctcagagccaataatttggaaattaatttaaaaaatgagttgattcaattctttctttttctactattgataatatatatagtttaatttctttttcttgaatgatgttaatgctctaaagcatttgagtagtgttttcataagctcatacagacctatttagattacaaacatccaatatatgtgcagggaaaattgcattaagattctgagcgtttaatactcgagggcatagaagtcaaggggataacggaaaagagtggaaatttcattttctatatgtgagcaaatgagtgtgattcttcatttgctgtttattaaagcaattatttatggcatgggtgagcataaaacaaaacaaaacaaaacaaaacaaaacaaaaaatacaaacacatcaggccttaacagcaagtaatatttcagcttggagaggtaaagtgcattggagatgagaatggatgtatggtataggggtgggccatgcctattgttgatgatcatgaggagaacacaggtgagatctgccagcaaagctctttctattacttggaggaccctgagaaggcaggggcaggggcaggggtgagccttccccatagctaacccatactgcctgctccttgatgtctttattatatgcctacagttggctctgcatcctcctcctggtggcgtgtgatggctttgattctgctgatcctgtgcgtggggatggttgtcgggctggtggctctggggatttggtgtaagtgttgactctgccagaaatttgactggaggaaggtaatactgaagggtcatggcatatcccactaagcttctcaatggtcgctatttgtctgtttatcacttctacagttgtcctacagatagttgccaagagaatctca

SEQ ID NO: 5886 - DNA, 6000 bp, Homo sapiens
tattatcttcattctttcagcaaaaaggaatgtagtaggagggcagggtgataataaggaaaaaaacatgtgagcaatagaatctacgtcataattaagttcaagggaaggtactatgactggacgtgcacgtaagccagatttatgtttctctccacccaaacatctcagtggagtaaagaataacaaggcagcattgctgcaaacgtgtctcgcctcccaccatagggtggtttttcccccatctcagaattgaacaaatgtacaatcgggttttataccgacacattcagttcccaggggcaggcaggagacagtggccttcctccctttctacacagacacagtaacagtctgatctctctttcttttccctacatcactcacaccctttcttgtggttccaggttgccccaggctgttttcatctccagctcttcataacgccacttaataaaccaacaatactggactgcatatagcattttttattcattttaatgtctctcttctatgttttagagatttctgtctttggtattttgtatgttttaacaacattaccttgatttctaacgttttttttttaatctccagaaatcacccaatctaggacaccttctctaacaccattttctcacatttaatactggagacctattagaaaattgtcctttataatactatcatttaaaacacccagagtttgtgtctaccgttgtgaattacatactaatttaaaaccatctgcttctgtgtatgccttaaatagagtgtggacaactagatgataggaactgtgctttatactttattgaactttgtttattcatggccaaacaatatgcttgctccataatagataaaagctcaataaataaatatagaatgatattatgaaaatatcagtaatttcctatttacttatttttgttaagctttggtactattacttctatgtcaaattatgaagacaacattattacagtgcagaaaaacgccaggacctcttggctaagacctcaagaggaacattgtaagattttagtagtgatttttatattcgccaaaatataatgcaagcgttgtagacttttaaccacttgcattttttattcctttgcacacaaatgaagctactggggataaaggaaggagaaataagtcaactaaaatttgagcacctgctaataggtacgtaagagggaaaaaaatgtgacttgagacaccttgcttcactcatttctacaattaatgagccattttccttaggaagaaaaatgctgtcttatccctatatctgtgtctttaggcacttgtggtaagtaatgtcacaaatttaagtcatcttcaaaattctagacttctttgatatttgaagcactgaagtaaacacaaaatccatttgaatccaagatgcagaagtcgttaaaggcatcgttccatctatgaatgtggagattatcactatagcaggaaatggaaggtttaatggcaatcaaataagcaatcagagaaaagtaaccaggatgctaataaaaaatatgatgtcatctgacctgcaaatcatgcatgtgacttacttgagagcaattgtttaaagttactatttatgtatggctatttatgcacaattataaagataataccagagtgggaaaaacacttttctgttccgttataccatatagattgcaattaaacaatcaaaacaatggtgtgtcctagcatggattaagttaatataacacaaatatttgctaaagatatttcaattgaattgctaaattttagaattatacaaaatttcaactgagatggggcaaaaaaatcatttaatcattcctggcttaggaagctgtgccagagaaaattaattaattgccaagatgatgacctgtttttccccaaagtataaattccagatttatggaatctctgccttgagttcatataattacaatacaccagttaacattatatgtcagtatgtgtagcccagtacttaatacctagctgaatggaaaataggttctgaaaatatatatatacatatttcttaaaatatgtttgcagacttttttacttttacattagtcatcatttcacttctgcttcaatatgcccatgcgtgtccagacgagactggatgcatcatggtggtgtggccatagatgcccctgcatatccaaagactcagctctatttcttccactcctttttattttctttattgtccatgtgaattttaaaaatttgtcctttttgacatgtcttttgtcaattcaaacacatttaccaaaaggtcaagattacaaaatttttgcttggcaatagctgcacatcttaagctttcatatttgggcaagcgtccagtaaacgcctctgaccacatccagctttagtgtcacagcttgaagccagcaacctgccaagcactctgtttctaaccacaagttggctgcgtgttaagtctttcctgtgtaccagaagagaagggttttctgaggccacagtgcgagttagcttactgaccaaaaaggccggttgattgttggctcttctcaactaatgaaagtaattaaatagtttattgtggtgatggatgttctcaaatgacttgagcccaggctgtttgcaaaatattgtaatttttcttctaacaatagtttttgaaagttatatagatacgtctatatgaagtttgttcaggtacttttatagtcaaattattctttctgcagaagttaattgcgttggttttatttcacttattagaaagtattttatctgaaaactatgctatgtccttttgcaattcacatagaataaaccagtacaaatgcccagcaaatccccaataagtttactatcatgactacagcaaagtgagtgtatgttcaacattgagaaagaaattggagttttaacatactatttctttatctaactaattgttttaacccgacatacaggacccattttagaattttcttctttaagaatcctttccacactctgtcagttggtttagggacctttatatatgacaataaaactctccctggtgcttagctttatcatggtatttatttcagaaatcttcttttaggtatgtgtggggacttcccagttggctgtaagttgccatttgaactaaacgaaataggtaggatattcaaatgttcttttttatcctattcctatcccccttttctcaattctgtatttaagagacaatctctattcaatcgaaaactacatatataaaaataactcttcaggaaattgtgattcaggtttttcccataaaaagcctgcatttactcatttattcatttcctttcaaaaaccaaatatttgttaaaatgtagttgttagaaaatatcagcctatatttcctctatatagatctatttttactatataaaatagctaatagaaaatgttgattagctgaaaagaatcttggtatgtcagaaaataacatattttcttcaacttgttttatattcacctatcttgtttaattttgaatttgttttatacttattcattttatatcacctaaactaaaaagtaatttccagctgggtgtggtggctcacgtctgtaatctcagcacattgggaggctgaggcaggaggatcacctgaggtcaggagttcgagaccagcctgactaacatggtgaaacctcgtctctactagaaatacaaaaattagccaggtgtggtggcacatgcctgtaatcccagttattctggaggctgagacaggagaattgcttgaacccaggtggcggaggttgcagtgagccgagatcgccccgttgcactccagcctggacaacaagagtgaaactccatctcttaaaaaaaaaaaaaaaaaaagtaattaatttccatgtgggcaaaaactttcttttggattgtttactttgacattctcaagatctagaaaagtgcatagcaaatagcattcgctaaagaaaaaaaatgttgaataaatttattgtccaactttaacacatcaccacatgaaagctgttttccttccttatatttcagagttttaagattaatagctttggtttttgttaaaatgttataatgtgttcatcttatattactttatatgatgtcttatgttagtattttaaattaataaacataaaatatatatttagcttatcttgttcattggtatcaattcatatattattcttatgtatactggggtatatatttaagtttctaattctcctgcatatgatgtagatatgacagagatgcaatttcatgttttttatattaaaatttaaaaattcccaggactaattttttgtaacttaaaggccagtgtgatagtaacccaggacaaattattgaataggagctaatttcccactttatctgcaatgttaccttatattttttaatctatgcacatgactttttcttgtctgtatttttacccttctcaatttgtctatctatgccccacatgccactttgcctttattaatacggttttaacataggtcttactatctagtaaaacaaggctcccacattttcttcatcttcaattgtgactttcctagtcttgacttttgtaatttaatgtacatgtagaattctgctttgtaagttctacaacaaaacctgaggtattaactggaattgaattgaatctctaaaatatttaggattaaatggcatcatttaaattcatcattttcaaatcctaaaatgttatttaaaataatggcaaaactacaattacttttgcaccaacctaacatttatccaacaatgggtggtcttaactcttttaccaaattaacaatatttttgtagtgataaggcggaagtactgtggtttatgtttttccacaggaagatgagattataatatttgtcacatctttctcaaagatagaaattcactaagtatctccactttcaattctagatcaggaactgaggacatatctaaattttctagttttatagaaggcttttatccacaagaatcaagatcttccctctctgagcaggtgtgtgtatgtgtgtatgtgtgtgtgtttattattcaagatatgagaaattatatttcaacctcaaaaaaataaaaatatttacactataaggtaattctaattgtttcttagatgcttgaatagaactcctgaggatacggaatgcttatcatttctgatgtatattctatcactgtatctgatgataggtaattaggatatacttattgaagaatcagaagttgtaatattactataagaagaagccttgtctctaagcaaaactagaaaaatgaatctttacatttaggatgagaagaattgagattcaatttaaattgtcaaatttttgagttttctgatgctgtagggggcacttacctttgatacacatctttacatgcaaggtgaaacaagttatatctgtgctttccaactatcataatcaaatatgaaatagcttttatttttgaaatctaagcactatgcttatttattaaatggttttttctggaagctctgctgtgcattgctaagatgttactatataaacatgtgagattagttttgttaatgatgatggtgatgataatttgttgatgatgatgatatgggcacgttggattaaaatgcactagaaaaggacattcaacaaaagtgcatataacttacctgagtttagcttgcagaaagaaaactaaattattgccagataaaataaacaactggaaacacttgatcttagctaaaaggccaagaagcaataaacgactataaacagaaaactgggtgtgttgttatctaatatcagtaaagtaaaatattggtattaaatatctcaatgtaggtgaattaataggttcattatattgttatgacattttgaagtaattggcgattattttacaaccaagagaaatgtataaaattaattttgcctggctttatgtgaattgt

SEQ ID NO: 5887 - DNA, 6000 bp, Homo sapiens
cacttacagccatctgattttcaaaaagacagacaagaaaaaaaggaatataaatggactgcttatacaataaatgatgctatgaaatcgccttgttgtctagggtaatatctgaggtttgttgtcccatgaccacagaaaactaggacgtgaacacaccagagtgaggttaagacaggaagtttaatgggcaaaagaaagagaagagatctctgcccagggatgggtactggagaaatgggttgctgcttctgcagtgaaatgtagaaggttttatagatgagcttgagggggcagtgtctgatttacatagggcacgaaagattggtcggactaggcatgccatttgcatagcgcttaaagaagctggccactcaaccctagtcttttattatgcagatggttgtctacctggcctgtgccatgttgcctggttctttattagtgacaaagaaaagggaagatggagcctccaggttgaaaatgcctggcttccagtcagccccttttctattggcacagctgccagcatgcacacatgcaagtctccagcctgcttatctatgtctgctgcttcatttttcaggctgctctttgttagaaaagaagttatttggggctgctttttgttaaaagggaagccttgctgagaattcctttaccctcactatctgcctaaataatttctttctcgttcctgtatcactagtgtaactgtctagccatgtgcagaagagttaaaatggacccttacctttcaccatatagaagaattaactcaagataattaaaattttaaatgtgatacctcaatctgtaaaaattttagaagaacacctaggaaatacctttctcaacatcagccttggcaaacaattttttggctatgtccttaaaagcaagggcaataaaaacaaaaattgacaaatgagacctaaactaaaaagcttctgcacagcaaaataaactattaatgaaatatacagacaacctacagagtgggaaaaattatttgcaaactatgcatctgacaaaggtctaatatccagaatctataaggaatttaaacagaacaacaaggaaaaacaataacctcatttaaaaatgggcacaggacataaacagacactccttaaaagaagacatacaagtatccagcaagcatattaaaaaacacttatcatcactaatcaacagagaaatgcaaatcaaaaccacagtaagataccatcttacactagtcagaatgaccactatttaaaagtccaaaaacaacagatgctgatgaggctgcagaaaaaagaaaatgctaatacactattggtgggaatgtaaactagcctaaccgctgtggaaagtagtttggagatttctcataatacttcaaacagagctaccatttgaccctcaattgcactactgggaatataaccaaatgaaaatagatcattatatcaaaaagacgcatgcactcacatttttatcacagcactattcacaacagcaaagatatggaatcaacttatgtgctcatcagtggtggactggataaagaaaatgtggcatatatacaccatggactagtactcagccataaaaaagataaaaccatgtcctctacagcaacatggacagagctggaggccataatcctaagcaaattaatgcaggaacagaaaaccaactactgaaggttctcacttataagtgggagctaaacactgagcacccttagacgtaaatatgggaacaaaagacactgcagactactagaggggagaggagagcagggaagaatggttcagaaaactacctactttggattatactcactattctggtataatatacccatgtaacaaaccagcacatgtactccctgtatctaaaaataaaagttgaaagaaaaaaaattggaaaaattctcaaggacagttgactggccaaagattttttgagtaataccccacaatcacaggaaaccaaagcaaaaatggacaaacgagatcacattaagctaaaaaataaacaaaacccccccacgagattctcttatcttagacttttgacaatttgattatattatgcctcataatagtcttttctgggctgatcttgctcatgattcattgagcttcatgaatctggatttccatatccttcccaagtgaggaaggttttcagacagtatgtctttaaagaaaaaatatttttgactttttatgtctctcttctccttctgaagtttctatactttctataccatattcttggtggtgtctcaaaggtctcatgctttctttgccactttttattctttttttactctaatttgttaattttaaaagactctttttttgagttcactaattcctctgcatgattgagtcgggcattaaaactctctattgacttatttatttctttcattgtgttcttcagctccagaatttttgtttggttctttttaatagtttatatttctttattaaatttttattttgttcatgtattttttgttttagttgtattttttgtttactcttttcttttgcatctcactgagattttttaagatgattgttttgaattactttaaaggaaacttatagatctccatttatttggatcagttgctaaagctttattagtttcctttggtggtgtcatatttgtctgatgctttgttatttgtttatccttgtactgatgtctgtgcatttgaaagagcagactctctttcagtctttacagactggtttcggtaggttaaaagcttctcctgttagtgtcctgggctgatgagattgccttcagtatcatggttgaatggggttacagccagatcacatggttgcttacgggtccagagtgggatctttggttcatgatccttttactagggcttctagcaggcttgtatcctatttagtgcctcagagggccaaactggctctagaatcatactgtatagggctggggaggggatgagggtccacttcaaggtctgtaaatggtgggtctattattaggtgtgtagttggggaagagtttatctagtttgctgggaaggctgctcatgggtctctgagtgggttcctcaacctgtggcacagaggagttagtgctaagtcacaaggtttcctcggggtctatagctgaaaccagtgtcttcatgtctgtctctggggtcatggttgagtgtgttttctggcaggtctgtgggcaggcagatttgcctcagactgtagttgagttgggctggagctggatccagaattgtttcaagatctgaaataaaactaaggtctgtgcctgcaggggcactaatgatgtctctctccaggtccctgtatgggcaaactgctctctagcatagctgagaagtgtcgaagccccttttctgtccaattaaaggatctgctgtgaaacctaggtcaatggtctcctagttgggacatggatgcacatgtcctccctctgtatccctgagctggcaagactgctcacagtccacagctgagaagggtgaaggtcaagattcaaggctgtttcagaaactaccgtggaactgaagtcagcaagcctgtactgctgacaaagatgattgagtctcacagcaatttcctgtgattaactcaggtcacagttgagaggagtttgagtggagattcagggccattttagtatcttctgtaggacagaggtcagcaagcatgccccagaggtacagatgtatatgtctcccaggaagtctctgtgggtgaaggactgatctcaagttgtggctgacactagttaaagccaagttagagggctgtttcagggtctacattgagactacagttgatatgcctacctcctgagacactagtgtgtgagtctcctcctgggcccctgggcaaatggttttggcagcatgaccaaggcctaaatggggctgaaggcaagcacaggaggatgggtcccttttcaggtctggagatggaatcactgttggtaagtctgccacttggatgcaaatctattccctaaaacaaccttcctaggtcttgggttccactggcattttacaaactcctacttgaattccaaactccctcaaaggaacttttgtctgtggatggctgaaaaattattgttgctgtgggggcatatgtgtgggggaccacctattctgccaatttactgactttcctcctagtaagattttaaaattactttttccccatacatagtttgacttcagtttttgtcatttacaactaaatatttctatgaaagtcgacataatttgttatggcggaggatgaataaatgaagaatgtaatgaatagctatttaatatttcaatttctggtatgctaatatatttcaaaattgattaatattttacctatccaagatatttttatcaagggtaatctgaagattaaataatctatttttaaaaattaagtgcaaaaatttaagaactaagagaagttaataatataactttggcaatgatgctttttgtgccagctacaatcaattgagtaattactgcagtaatttttcagaataattaaggaaaaaatcagtagatatcagttgataatattactatgagttttagaatgttttctattataatggaagtgacataataaaataatataaagaaaagaagtatgcaatgttaagatttagcaacctagtctaaaaggcactcttaacaaggtgagggttgacaatgttcgtgatcaagacagaaaaaaaaaaaattctcataggcacttgaaaaatgaaccaactaaatgacacactttcaaagtcaaccttgtacttttaatagaccaagtatcctatattttggaggtgtgtgatgagataaaactgatttcacaatagcccatgtgtagaatttcctgttcaaaccttagtaacacgttgatgagaaatctactttttccactcttgactcactctgagccttcacagggcagtctgcgaagattgcaggcattgtttgttcttgtcttggatttatgcctttaaatttcaccttttattacacagctatagcaggcctttttatgagactaacctggcctctccactaaaggatgtgtgactttctggggacagaaggtatgtattgctactctccaactctctactagcctacctcatttagtgggtgatttcaagtgctcaatatgatacaaaggaggtataattaatatacaataaaatcaaagtagaatattgctgtcttcatttgaataactcagggtaaaaacctaaaatatgaaatatgttgaaggatttcttaaagttttcaaattattgtttgtggaaatctagtgggtttgttgatcaatatcgtttaagggaaagctattaacatcacaataatgaacaattaattttgtattttgtaatcagtacatcatgtatctttgaataataatttatatttagcttagccattaaagattattaaaataaatcaatcaattgatgaaagccaaatacaattcctcagacacgtagattagagaaaagcagtttttatttttaataaaaatcagaatgaggtagattacataaaatgctaaaggtattacaaagcaataaaaatactttttaaaaattgatcaaaatattgcaaaaaaagatgtagcgcatggacataggagacttatctgaagatttattttccatgctttaactgacatgaatcagaaacagtaacataacaattgtgactaaaataataattaaagtagctaatgcttattgagaactttaagtgccaggttgagtggtaaatgttttacatgcaacgttttatatgttcttatgcccattttagattaacaaactgggttattaaaaatagaataactttttaaaggtcgcacattataagtgtcaaagctagaattaattctagatctcactgactccagagcccattgactaaatgatttaattacattatctgaaatttta

SEQ ID NO: 5888 - DNA, 6000 bp, Homo sapiens
cacatcctctccagcatctgttgcttcctgactttttaatgattgccattctaactggtgtgagatggtatctcattgtggttttgatttgcatttctctgatggccagtgatgatgagcattttttcacgtgttttttagctgcataaatgtcttcttttgagaagtgtctgttcatgtccttcgcccactttttgatggggttgtttgtttttttcttgtaaatttgtttgagcccattgtagattctggatattagccctttgtcagatgagtaggttgcgaaaatttcctcccattttgtaggttgcctgttcactctgatggtagtttctttcgctgtgcagaagctctttagtttaattagatcccatttgtcaattttgtcttttgttgccattgcttttggtgttttagacatgaagtccttgccaatgcctatgtcctgaatggtaatgcctagcttttcttctagggtttttatggttttaggtctaacgtttaagtctttaatccatcttgaattgatttttgtataaggtgtaaggaagggatccagtttcagctttctacatatggctagccagttttcccagcaccatttattaaatagggaatcctttccccattgcttgttttcctcaggtttgtcaaagatcagatagttgtagatatgtggcgttatttctgagggctctgttttgttccattgatctatatctctgttttggtaccagtaccatgctgttttggttactgtagccttgtagtatagtttgaagtcaggtagtgtgatgcctccagctttgttcttttggcttaggattgacttggcgatgcgggctcttttttggttccatatgaactttaaagtagttttttccaattctgtgaagaaagtcattggtagcttgatggggatggcattgaatctgtaaattaccttgggcagtatggccattttcacgatattgattcttcctacccatgagcatggaatgttcttccatttgtttgtatcctcttttatttccttgagcagtggtttgtagttctccttgaagaggtccttcacatcccttgtaagttggattcctaggtattttattctctttgaagcaattgtgaatgggagttcactcatgatttggctctctgtttgtctgttgttggtgtataagaatgcttgtgatttttgtacattgattttgtatcctgagactttgctgaagttgcttatcagcttaaggagattttgggctgagatgatggggttttctagatatacaatcatgtcatctgcaaacagggacaatttgacttcctcttttcctaattgaataccctttatttccttctcctgcctaattgccctggccagaacttccaacactctgttgaataggagtggtgagagagggcatccctgtcttgtgccagttttcaaagggaatgcttccagtttttgtccattcagtatgacattggctgtgggtttgtcatagatagctcttattattttgaaatacatcccatcaatacctaatttattgagagtttttagcatgaagggttgttgaattttgtcaaaggccttttctgcatctattgagataatcatgtggtttttgtctttggctctgtttatatgtggattacatttattgatttgcgtatattgaaccagccttgcatcccagggatgaagcccacttgatcatggtggataagctttttgatgtgctgctggattcgttttgccagtattttattgaggatttttgcatcaatgttcatcaaggatattggtctaagaatctctttttttgttgtgtctctgcctggctttggtatcagaatgatgctggcctcataaaatgagttagggaggattccgtctttttctattgattggaatagtttcagaaggaatggtaccagttcctccttgtacctctggtagaattcagctgtgaatccatctggtcctggactctttttttgttggtaagctattgattattgccacaatttcagctcctgttattggtctattcagagattcaacttcttccttgtttagtcttgggagagtgtatgtgtccaggaatttatccatttcttctagattttctagtttatttgcgtagaggtgtttgtagtattctctgatggtagtttgtgtttctgtgggatcggtggtgacatcccctttatcattttttattgcatctatttgattcttctctctttttttctttattagtcttgctagtggtctatcaattttgttgatcctttcaaaaaaccagctcctggattcattaattttttgaagggttttttgtgtctctatttccttcagttctgctctgattttagttatttcttgccttctgctagcttttgaatgtgtttgctcttgcttttctagttcttttaattgtgatgttagggtgtcaattttggatctttcctgctttctcttgtgggcatttagtgctataaatttccctctacacactgctttgaatgcgtcccagagattctggtatgttgtgtctttgttctcgttggtttcaaagaacatctttatttctgccttcatttcgttatgtacccagtagtcattcaggagcaggttgttcagtttccatgtagttgagcggttttgagtgagattcttaatcctgagttctagtttgattgcactgtggtctgagagatagtttgttataatttctgttcttttccatttgctgaggagagctttacttcccagtatgtggtcaatttaggaataggtgtggtgtggtgctgaaaaaaatgtatattctgttgatttggggtggagggttctgtagatgtctattaggtccgcttggtgcagagctgagttcagttcctgggtatccttgttgactttctgtctcgttgatctgtctaatgttgacagtggggtgttaaagtctcccattattaatgtgtgggagtctaaatctctttgtaggtcactcaggacttgctttatgaatcttggtgctcctgtattgggtgcacatatatttaggatagttagctcttcttgttgaattgatccctttaccattatgtaatggccttctttgtctcttttgatctttgttggtttaaagtctgttttatcagagactaggattgcaacccctgcctttttttgttttccatttgcttggtagatcttcctccatccttttattttgagcctatgtgtgtctctgcacgtgagatgggtctcccgaatactgcacactgatgggtcttgactctttatccaatttgccagtctgtgtcttttaattggagcatttagtccatttacatttaaagttaatattgttatgtgtgaatttgatcctgtcattatgatgttagctggttattttgctcgttagttgatgcagtttcttcctagtctcgatggtctttacattttgccatgattttgcagcagctggtaccagtcgttcctttccatgtttagtgcttccttcaggagctcttgtaaggcaggcctggtggtgacaaaatctctcagcatttgtttgtctgtaaagtattttatttctccttcacttatgaagcttagtttggctggatatgaaattctgggttgaaaattcttttctttaagaaatttgaatattagcccccactctcttctggcttgtagggtttctgctgagagatccacttttagtctgatgggcttccctttgagggtaacccgacctttctctctggctgcccttaacattttttccttcatttcacctttggtgaatctgacaattatgtgtcttggagttgctcttctcgaggagtatctttgtggcgttctctgtatttcctgaatctgaacgttggcctgccttgctagactggggaagttgtcctggataatatcctgcagagtgttttccaacttggttccattctccccatcactttcaggtacaccaatcagacgtagatttggtcttttcacatagtcccatatttcttggaggctttgctcatttctttttattcttttttctctaaacttcccttctcacttcatttcattcatttcatcttccatcgctgataccgtttcttccagttgatcgcatcggctcctgaggcttctgcattcttcacgtagttctcgagccttggttttcagctccatcagctcctttaagcacttctctgtattggttattctagttatacattcttctaaattttttcagagttttcaacttctttgcctttggtttgaatgtcctcccgtagctcagagtaatttgatcgtctgaagccttcttctctcagctcgtcaaagtcattctccatccagctttgttccgttgctggtgaggaactgcgttcctttggaggaggagaggcgctctgctttttagagtttccagtttttctgttctgttttttccccatctttgtggttttatctacttttggtctttgatgatggtgatgtacagatgggtttttggtgtggatgtcctttctgtttgttagttttccttccaacagagaggaccctcagctgcaggtctgttggagtaccctgccgtttgaggtgtcagtgtgcccctgctggggggtgcctcccagttaggctgctcgggggtcaggggtcagggacccacttgaggaggcagtctgcccgttctcagatgtccagctgcgtgctgggagacccactgctctcttcaaagctgtcagacagggacatttaagtctgcagaggttactgctgtctttttgtttgtctgtgccctgcccccagaggtggagcctacagaggcaggcaggccttcttgagctgtggtgggctccacccagttcgagcttcacagctgctttgtttacctaatcaagcctgggcaatggcgggcgcccctcccccagtctcgctgctgccttgcagtttgatctcagactgctgtgctagcaatcagcgagactccatgggcgtaggaccctccgagccaggtgcgggatataatcttgtggcgcgccgttttttaagcctgttggaagagcgcagtattcgggtgggagtgacccgattttccaggtgcgtccgtcacccctttctttgactcagaaagggaactccctgaccccttgagcttcccaagtgaggcaatgcctcaccctgctttggcttgcgcacggtgcgcgcacccactgacctgcgcccattgtctggcactccctagtgagatgaacccggtacctcagatggaaatgcagaaatcacccgtcttctgcgtcgctcacgctgggagctgtgcaccggagctgttcctatttggccatcttggctcctctccccttgttcctgattttaatgggactaccttggttatttcacagcacacttacggtgctttgtgaagtgcctgctatgttactatcatcatcttcctgacaagatggtaagcaattgttagtgaaatagtagtggaaggatctgttattttatgtgaattaatctttttagcaattgatattattggcttgagtgtaccacccactcccaggtgttgagaaatatctaaatatctgaagaaaaaaactgttatacaagcctctcgatgggataatttactattccccaggaccagcattctaagcactttttcttctctgtgcacagtagattttgtggaggtggccgtatcaccttgttcaggaatagcttgctctaactgcagtatgtctccctgcacttttctttttcttttttttttgttttttgttgtgtgtgtgtgtgtgtgtgtgtgtgcgtgtgttatttttgagacagtgtctctctctgtcacccaggctggagtgtggtggtacgatcacagctcacttgcagcctctacctcctgagctaaagagatcctcccatctcagcctccccagtagctgggactacaggcatgcactaccacttct

SEQ ID NO: 5889 - DNA, 6000 bp, Homo sapiens
atttcccggatccgttcagggggaaacagcgaaatccccaaatccgcttccttacgtggctaataaaggggtgcttacagagcatggaaaaacaaaacaaagaaacaagaataccttgagtgttttgacgtttgaaaacccgactccggagaatcatggaatcatattccaagtttcagtgtctaatgaagtttaaggggacgcctattacttgggtttgtaaaatcgcggcgtcgcgcccgccccaagtcaaagctgagcagagcagggatggggaaggtctccggccccaggcgcggcgcgcggggcttctgcccagtttcctgcttctcagccgcggtgtctgccccggcccagagcagtctgtgcaatttagaaactcgataggaggcagcagctggtctcccaccaccctaaaaataatccgttccggcgcactgcgtgcttcgcctaggggaggaaaactgtcatcggagtaagtgaatccgtgtcttttacatgaatgccatttaaacatttttaggaataactgtaagttgtcgattttgagctaacatttctgctatccaaaaacgccctcgcactctctcgcacttctcggcacttagctttcgcgatcgctatttctagaattaagggacgaggcccggctcgagaagtgaaggggtggggatcaggtttccagttttacttcaaaactgccgtctcctactcaaatcaactggaaacagtgaaaggagttattattattaggagttattattaccgcctttcttgtagacaattcttgtatgttcaagaagtagttttctatctgcttaatttttgttactctttacttttttttaggagttctgcgtccgggtttgaaatttacatcttaagacagtgtaggaagtcggtgttttgaaggtagctcaagtgcaccggcaggggtttgaagcagcgtgaagctattgcccaaggtatttattttttgctttatttgttcagtttgggattttttttaaaatcccattgcagtatctaaggaatacctactgagtaatttcaacatttcttttggtgtgggatggtacttcacagccactgaagagtaaatgggtggattcagatcaggcactaagtcagaagtcagtggtcatttttgccagtgattttcccacttggatctgtcatagttatagccatggtagctagctaactagctatacatcttctagtttttatttcatgaactagggactgaataacttcaaagaagtgattacagcatttgtttttgcaagtgacatccatcctgaaaatgctctagatgatgataaagccctaagttctttaaaatgtcctgcttctctttcataacagaatttggttaatctctaaacgattaaagaatgaatccttttatatgtaagaatgaaaacttttatttaaatttagcatgttttctccaggtgtttccagcattttaaactctctgcaattgctattcgatcagaactaacgctttctgctaagtgaacaggaaggaagacaagttttcacttgctttacttgtagtctatttccaaaggacagggctggccacaataaatggtgtaccttatatgcctcagcacttaaatgtgtttttagaattaaatcagataactactgctcgtgtcttgcagaggaaccaacagactggataggtcaggtattatattcaccaactaaatccaaaatgtatatgttctagatgtgtggaatttcatgtaatgcatttcgaggaataaaaacactgagggtgcgattcttgccatgaaatcgtaagttagataattaggagtatttctattttatgttttctgctccatagacatacgttagaagcaaaatttcactttgatctttgtttttaaagtttattcagtcaagttctccaactctatcacctctcataaacaactgagcatatttcgatggcttatgcttgtggaaagggaaacattatatctccccatctgctctcccttctctctctctccttgatgcttgggcctccctcagtgcttagctgaatctaaacagctccagaaggggtggagctgaaggatgtcaggtgacagagtttagccagcaagaacagcgatttatacccttccccaaacattcccaattgaacctggtgtctgggagggaaacattaaatgacaattggaaatttaaggattaggaacgtggattgaataaaatgcctttgataaacacaataattatcaatatatcagcaataagtttactgcctccctctttttgtccatgttgggttgtaatggaggctggctgttagagtgccacatggactctggatgttggataaggagactacgggttaaagggaaaggataaatgaggagtcaaaagaaaaggtgaaaggagacatgcggtaaggtaatgcacaggttcagagccggccggaaatgtgaagttagagtttatggcagacagaaaaatcgttctaaagcgtttactgtaccaacttgaagtttacacttttgtttgattgcatcatttcttattttcctatcttttagatcatatacccctacaatatacccacagctactgagactactgtaatctgattcatacagtctaaataaaaccacagaaactgtttctgacgtgcaccattggattcctagtaactagcacgtagttagcatcaataagtgtttttacagttcattagttaatggcatagaattccagatatctggtgtatgtctgaaaatgttcttaaatttttcaggtgattgtacttctctgagattttttttccagttacacacaacatttatccaaaggcgatttaattggtagatttcaggattgattaaacaccaggcaagcaatgcttatagctaatgaagggtgtaatttgcaaagcagcaggttatattttagcatctacctcaatgatactagtttataaatgtggccaactggaatattataattttggataagattataaaagttgctaaagtaaaaatcattttctagtttgtgcgaggaaagtttatatatgtctttcaattaagagtgggctttaagttttctttttatcatttctactaaataaaggaagtagtctaaaaaattcattactagctattagtttttagttttgtttttgtctgtctttgccagaaatacatctaacatacacctataaattaataacttccattttgctgttttttaaaaacttcaagtcccttttattcttttatccagattaataccttaatagcttgttagaatttacccagtgtataacttcaccttgaggttttaaaaatacaactttttaaaaaaagatgagggaaagactcaactagagagcatatcaactatttattataaaaagagcttatcaggaacaatatgtgagaggcattctgtataagtatctaagattgtaaatacacagactctttagctgaggcattcatataatgctttataaaacctttgcttgaaatttgatttctctaataatttacctaccattgacaatcttttctgtataacactgttttttcctaggaaaagtattgtttgtgaccattgctaaatcaattatcaatgaaaggaaagaaagaaaaggtactatgctagttaataaaatttttgccagccttttgtaatgcaactcagaatccattgtgacataaatatagaaactaggtctagtgaggttaaaatcttaaactgctacttgttttaaagaatagatacgatagcttctttaaaaagcaggttggaggttgtgtaatacggtggaaagaaatagtttataagtcagatatttgggtgtggacatgaccgctttactggttggcaagttactgaacttatctggacctcagtatcctccattgtaaaagatgaattacaaggttgttctgaggatttaagatatgcaaagtgcccagaacttaaataagtagtaggcattataaaataagttttcagaatgtcaaagcttttcctggaatttcacagcagtattttcatggagcagacctttgctcatctcccatctgtttgggcacagcattaatagagaaccatttaacatgtaagtgagagcacgtcactcctctgccccggaatccccagtggcccacttcactaagagtagaagccgcaatcctgacaatgacttacaaagcacagtgtgaccttgtcctctgtttcctctctaaactcatctacttctactcatggagtaccaatttccagttaaaagacatcctgcgtttcaaacttgcgtagagtgtatttcttgtgagaatattctaactatggaatctgagtagtttcgttgacttgtcatttgagttaggtttaattcatcttgagcatttgatttttaatattcttcagggaaagactgattactgttagccattactgcaggcacacttgtttctgtatattagtatttcccacaactagtgaaatgtttcagcaaactctgtcacagtttactgaacaacttttgttgtttattagtacattttcagtgagtatgggaaaatatttgaaattataccattttgactttttagtcattggttcaattttttttctcctttttcttaatatatgaccatttttgttctttgaaagcattttagtcagacactcatttgaggtactactataggtagatattaattataatacattttccacatgaaagcatttttctctggaagtaaaagctatggaaaagaagatctcataggacgtattttataagaaagcttcaagttgctttggcacagagtttcttatttcctcagctatcaaagtaaaagggattaattttatgatatagccctctattcaaggctttaataattttatgaacaagagtttactaataagaggatttttctttctcatttctctcccttttagagtaaaccatataagaagaaatgagcctttcattttgtggtaacaacatttcttcatataatatcaacgatggtgtactacaaaattcctgctttgtggatgccctcaacctggtccctcatgtctttctgttgtttatcacttttccaatattgtttattggtaagtaatctagtatcttatgttataccatttgatgtttatatatctcgctaatggctgagatttgggataatgttgacttaatttctgtaacatggaagctgatggctgtgagaaacgaacaagcaagtattttgtgtttttcaaacatatatttttgacaggtgatcttccgtaggtgaaattgaggtcacatgcttgcttaggcatggccttcaggtagcagcagcagttttttaaaaagaaggaaagagaaatatatgagatagatctacagcattagttgagcacttactttgggttaggtaaagggaatggaaaatgaataaaagagtacttgccttcagggaatagtccagtggggcagatgtgttaaagtcatgagaaatgactatgccacattgtaagcctatttacaagcacaggaacaaattaacctgctgaaacaactcactctttggaggtggtggggaagatagtgagtgacatgtctggggaactggaagatgccaagcatgcaagttacagtgggagtgatgaggttgtgttttatgtagaaagaggacattcacaaagaatttgggaagaagttaacaatacagttttgtctattattttacagtttacatatgtataaaatctgataattaggggcaattatgaataatttgtataacttacccaaacagaccctttaacttttttaaaattatgaagtattttgatacctaaaatgatggacattaatataataaatatccattgagcctaccaacgctcatctaaagaatatagaaataagaatgaaaggacctctctctgcacaccatttcctggtcttgtgactctttccatatc

SEQ ID NO: 5890 - DNA, 6000 bp, Homo sapiens
gaaaatcatcccagcaaatttaatggttttggtgtaaaaattaaattctagaatgatagtcaaccacaggtctgaaataaacaatgtggtgtttttatctttcgtttaatctttctgggttttttttttttgtttttcgttttttgtttttgagatggagtctggctgcgacatccaggctggagtgcaatggcctgatccttggctcactgcaacctctgcttcctgggttcaagcaattctcctgcctcagcctctggagtagctgggactacaggcatgtgccaccaggcctggctaatttttgtatttttagtagacggggttctcaccatgttggccaggctcatctcaaactcctgacctcaagtgatccgcccacctcggcctcccaaagtgctgggattataggcgtgagccactgcacccggctgttgtttaatctttcttatgggctccttattctcagaaaagctgatatttaggtattatatcccctgtgaattctgctcttctgtctgtgtttcttattttactgtatgtcttcatggtttctccattctgagcactcttaggcattttatgtattttgatttgtggcagccttgttttattttagcatgagattgtatagatgtcttgttttgggttttagttcagggattattttcttgggtttatctcatgatggtgggtgatgaatttagtgagcatatttttctcttcagtaaactaaatgataccgtgcttcatcattggttgtaatgcaacatttttctccaaggcaatatgtataattgataagactggtagtaatttgtgtatgtgtaataaatattataataaataacttataagtgtaatacatgtttttaaattgtgagtttcggtttaaattttttattgtgaaaaacttcagcgagcctccatacaccaattatccagccttaacaattttgatttatggccattatcttgtttcagctgtgctgtacctgcttctctgcctctccacctcatcaccctcctttatcactggattattttaaagcaaatccctggtcatcatgttactcacaaatatttcagtatgtataccttaaagataagcacttaaaaaatagaaccaccgtgtcattaacataattttcattttaaaatattgaaaatatttctttaatagcatcaaattaacagccagagtttgcttctggagtcatctcaattgttttccacagtttgtttgaatcaggttgcagatgagatctatacacagtatttagttgatgtgtcttttaaatctcttttaacctgtattctccctccacccacccccaccacctcccccccactccctgccaccttttgtccatgcagtttatttgttgaagaaacaggattatttgttttaggaacactctctctctgtttctctccactttacccaggaatatgtcataggaagtgttccataccgctatcagcaagcatatattgtctggattctctttttgttatagcagcagttgttgatattgattgtctacataggttcattcattaggggtggcaagagtattttaaagataaatttgtaatatacatgtatgggataaattatgtcagttcacttagcttttttgatgaaggttcgttctataaatattaatacaaagtatcaaattggatgtattatccactaaattttcattattttttaggaagagtgtcttccaaagtgttcttcactctttttgccctgcttggtttcttcatttgtttctttggacacagattctggaaaacaggtattatgtccaatgtagttgctatttccattttgcagtcttttcagtgttgctggggaatgacctgtgaggagagtaagcacttacttatctctactatcttcatagatttgtagctggggtcttgtagtcgtgagtctactgagttgcaatgcatttttatttttttctattctccctacagcggagtataaccttctcttattaacaggggaatacaattatgcagtgaattttatcagctgctagatctgttagttgactaaagataaccgagattagacattggttgtcagggccgggctcagtggctcatgcctgtaatcccagcactttgggaagctgaggtgagaggactgtgtgaggccaggagtttgaaacaagtctaggcaacatagtgagatcccttctctaccaaaaaattaaagacaaattggggctgtgtgtggtggctcacacctgtaatcccagcactttgggaggctgaggcaggcagactgcttgagctcaggagtttgagaccaacctgggtaactcggtgagaccctgtttctccaaaaaatacaaaaaattagccaggcttgatggtgtgtgcctgtagtcccagctacatggggaggctgaggtgggaggattgcttgagcccgggaggcagaggttgcagtgagccaagattgtgccactgcactccagcctggatgacagagtaagatcctgtctcaagaaaaaaaaaaaagaagttggttgtctttgtaaaaatatgtgtggatattggtgatggcgattgacttggtttcacatgaatcaggctatggggctgcagtgtacagtgagtttgaaatgtctgctcagtcctgagagattcagatgccaaagggaatgccagcatcaacatcagtgaaacacactgaagaactgggatgtaaatcatgctcactgaattggtttgaattatttgggctgctttttatataagtgatgttttcgattattaaaaaatccttatttaatcaacaagttgtataactgagcatcaaggtagctcaaatgtaatcctgatctaataaagctctttaaacttatgttaaattgtttgaaatagcaactcctttcctgctattatgacactttttttattaattgggaagagagtattgtaaagaatatataatatctcaacatgtagaatgattctgtaacaaagaacttagttgctaagctgtggtctcaaagttatcactagctttttttttttctttttaaagagatggagtctcactgtgtctcctaggctggagtgcagtgtagtggctgttcacaggtacaattatagtgcactacagcctcacattcctagcctcaagtgatcctcccacctcagcctcccaagtagctgagactacaggcacaagccaccatgcctcactctgggtttttttggtgtgttgatatgtatcattttatatttattgaaattgagatacagtacaagtattaccaagaacagctgtgaagaatttaagaaaataggtagagctatggcctccatgatcaggattaggcttatttgtgggaacaaagttatctgtatacttgcattaccaggtgttttaatggatgaaggtaatgattgatcattctaaacaggataggatgaattaaaagaagatataaaagttatattttgctttgggacagtttgggtttcttttaccttttacattttatttctgcttacaaaactattaaaatttaatgtgtaatttcgtatcacatacacgtgacaaagtgctattcttattttaagcagaaaacataaatatattaaaatgagctatgaaatgaacaaataacaatttaacaatggaaactgacctatatacaagaaagtgtatcctgtagttggtactttaatattgtatctgtttaataataattactcccatggctgctgaatttcttctgccttttagattttttttttcttctgaatgctgtaacatgtaaattccaggagcttaagcatgtatttgtagattaaatatttaaattgcactgtaaaaagggtgcttaaccatagcttttgttgttttgcttttttcctttcctggtggtttgccacttagaattattcttcataggctttatcatcatgggattcttcttttatatactgattacaagactgacacctatcaagtatgatggtaagtgaaaattatatagtttaactgggtattcaagaaggcaggtgctgtgttttacttcacctttccttctacagtttggcctatattgtgtgtgacagcctattacttatgtaaaataatggtccatctagtctctgaacaccttttctgaactactcattcagaccttctgggtttttaatctgtatggtgaattccttggtacttagggaaaggaggggccatattgattatagacctgtgttctggctatgtgatatgttgaagatatgagatgtacaacaagcaaaatgttgaggttttctttacctgaaaacagatacctccctaccccattatgtttaacagaatgcttgtcaacttttccttctcaatcccaatttattgacaagccaagcctgtcactggccctgtgaggtttagctccctagctaatttccttgtctcagcccagacccctccctagagagggttgctctatgctggcttcatggcaccactgaagagccctcagtgcctgacctacagaaagctgaagctggcactggtaacggtattgtatgtctaaggcacgcggttggaagtactgccggttatccagcagttcatcctctctctttgtacagtgaatctgattctgacagctgtcactggaagcgtcggtggaatgttcttggtagctgtgtggtggcgatttggaatcctctcgatctgcatgctctgtgttggactagtgctggggttcctcatctcgtcagtgactttctttactccactgggtaggcgatatgtaacagatgttttgtgtgttcgagtgactgtttgaatactgcctaattggatttgcatcctggagtggtgttgcatgtcagtgcttctcctgtggagttctggaaatctgcattgatggtgtgacactttcagacagcaccaggactagtaaaagtccctccttcctcaaaggcacagtagatgaaatatagaatgtctttagaggtagctttgtatctatttgttgtgataagtggtatgtgtttattagaaataatggaggtaaaggaaataaggaggtaaaggctctgatggcagctgagtcggggaacctggtactttgtttctggtcttctgttgtaccctcaacctccactcccatccgctgccaaaccccaggtgtccctcaggtacttaatcaccctggggcagtagcacagggctggttctggggtttttttggtgtttttaaaaagtaattcaattgctatcagtttttaaaatctggttaacttataagttaactttctttgccattgtttaataacttacatttcctgattattgtcaaaaacaaacaaaaacagcatctgtactcaaaagtattctatttggttgtttcctttctgtgacaatgttcttaaaatactagaataaagttgatgggactgttagacataaaaatagccatttcatgaggctgtcaactctatagagaatgcaggatataatagagtacaagtcatgtgtcccttgtctctctgaagactttttttttctaagactactggatagtctgatgaaaagcagtgttgtgtaggcttggcgaaatgacagattcacatggggatgtttttgaaatacagattcaaggctctaccctacatgtgctaaataaaatacttcctaatggctgagcatggtggctcatgcctataatcccagcactttgggagaccaagtgggaggattgcttgagctcaagtttgagaccagcctgggcaacatagtgattccccatctctactgaaaaaaaaaaaaaaaaaattagccaggtgttgtagtgcacacctgtggtctcagctactctgggaggctgaggctagaggattgcttgaacccgggaggttgaggctgcagtgagctatgatggtgccattgcactccagcctgggcgactgaacaagaccctgtctcaaaaacaaaacaaa

SEQ ID NO: 5891 - DNA, 6000 bp, Homo sapiens
ttatggcatcactaaaagctcatgcacaaatcccaatacttgacctgggtcacatgcccatccctgaactaatcttttggtcaggggatccagtgctctaattttccaggtctgggtcacctgatcctaacaccaaaaccagggatgagtctccaactaatccatgtgcactgacagtgggagatgatggttcctcaagggaaattgggggcattacaaagaaggagaaacaagcttggcagacaaaacaataaataatgcacatcaatggactaccaagaaggtgatgtttgagtcgaatggtaaaggataagcaggagttagctaataaagagggcaattttcagtgggtaacattctaggtattttcaaagcacagagtcataaaacagcctgatgcttttgaagaactgtaaatagcttaatatggttagagcaaacaagggtggagagtagtaaaaaaaaaataagccagagagataggcatagtgcaaatataaaagacctttagaactaatccaaggagtgtgcactctatcctgaaagccctgaagagcataagtaggatttgcagcccgggagcacgcctgacagccaggcccttgcagatcattatagggtcaacactgattcaccctgcaaacactggttggggctgggtctgcaagtcaaagaaaggagtcccagatgtggatgaacaagagacacagggagcagacgccaagcaaatcctaggaatcaaacagacctgggaatcaaacaaagactgccaacactgtctgattgttgcttaattctcaagcttgtggcccacactgtcacgaattcttcatctaaatatgaaaatcctctttagtgagccacgacacattcagagcatgacatggttgggtattgtactagtttgctggggctaccataataaagtaccacaaactgggtggctgaaacaactgaaatttattgtcttacagttgtgcaggtggaaagtctgagatcaaggtgtgggcagggttggttccttctgagagctgtgaggaagaatctgttccgtgcctctctcctggcttctggtaatttgctggcaatcaatgatgttccttggcttgcagaagcatcaccctgatctccgccttcacctctatgtggtattctccctgtgtgcatgtctgtctccaaattctgctccccacctctttttgagacacggtctcgctgtattgcccaggctagagtgcagggacaccataatggctcaccacagcctcgatgtcctgggctcaagtgattgtcctgcctcagccttccagtagctgggaacataggtgcatgcccatgccaccacacctggcgatttctttcttttttttccttttttttttttttggagagacaagatctccctgtgttgcctgttgcccaggctcatctcaaactcctgggcttaagtgactctcccacctcagcctcccaaagtgctgggagtataggcatgagtcactatgcctgcccaagtttcccctttttataaggataaaaatcatattggattaggactgaacttagtgacctcatgttaacttgattaactctgcaaagaccttatctccaaataaggttgcattctgaggtactgcagttaaggacttcaacatgaagttttggaggacacaattcaacacacaaaaatgttatttttaaaaagaagttgcagccaggctcagtggctcatgcctgtaatcctagcactttgggaggccaaggcaggtggatcacttgaggtcaggagttcaagaccagcctggccaacatggcgaaaccccgtctgtactaaaaatacaaaaattagctgggtgtgatggcatgcacctgtagtcccagctactcgggcagctgaggcaggagaattgcatgaaccctggggtcagagtttgcagtgagccaagatcgtgccatttcacgccagcctgggcgaagagcaagactccatctcaaataaataaataaaataaaaagaagttacttagccacgtacggtagtgcatgcctgtagtctcagctactcgggaggctgtggcgggaggatcacttgagcccaggagtttgaggctgaagtgagctgtgatcaccactgcactccagactgggtgacagatcaagggtgtctcaaaaaagaaaagtagacattctctaagtgaattgatttcttacaaaaggtatgacatcatgttgctttgtaaagacaaagaaaataacaccattaataaaacagactcagaaaaaagaaaaagagacccaggagcaattcaagagttcacaatgaagaatgctttttcagattaaataaaaaacagttcttttctacttgtgggattttgcatggaggctgctatagagaagggtgcttgtgagaagatgccttataaaatgaaatacaaacgttccagtgatttctgcagcattcaatcttcccaacagttccctgagctgaatattattaccctcacttaccaatgagaaactaagcctgagagaggttaactacattaccccaggctacatttggtaagcggtggggctgaaatttgaaatcagactgttgtgacctcagaccatcacatgcactggccggagtaattttatgagtcctggttgaaggccaagtattcacctttgcaatggatccaaaagatgctgcccagcacacagtccaaagaggcagtaatcctccagagggaatgaccatgtatcatccacagtgctcagggtgtctgctccacataatagatgctcaacaaacaaaacctttgtgaagtcactgtacagcaataagatttatttcacctatggaggtagtgaaattttctttggcagttctggaggttagatagaacctaaaagttgatagcttaatagaagcatttgtaaccccagcaagataaacagacacaacttcaaaggccaattccaataaaatgctgaggggcaagaaaacctggtttgttctttcccagattctcgtcacctgaggtcaggagttcgagaccagcctggccaacatggggaaactgtctctactaaaaatacaaaaattacctgggcgcggtggcaggtgcctgtaatcccagctactcgggaggttgaggaaggagaatcgcttcaacacgggggcggggcggaggttgcagtgagcggagatcgcgccactgcactccagcctgtgtgacaagagcgaaactccgtctcaaaaaaaaaaaaaaaaaaaaaaaaaaaaaaaaacaacgctagcaagtggaattatttcaaaagcaacagccttgtttcctgagtgatctgagctcaggaactctgcctgggcatctagacaggagaaagtatctacagcgtggggagatctgagtcagaattatagagcacagtgctgaagccatacattttcctggatttagacagtttcctcctccatttgcctttatttccttgcattctcttttcatcggctccatttttgctgagtattcctttgctttattcccaacgaaaatcgaaaagacttgatgttctgagaaattctgagactggcagttttgatttttcttaaaaggataaaaattgcatcagtcaacacctccctccacactccccccacacacatcctcatcttcctggaagatgatacagtatcctagagcgttgtggagaggatggagaggtcaaggaagccctggctttgcagaggcacctgtcaagttcgggttaacagctgccgcctgtgtctgccctctgcagtccagggaaatagtacccacacggtgagactccaccgatccggaactggagagggtggggggttctaaggtttagtgtgacacaaatgtcagggcagaactttcaaacaggctgagccccagttcaacgtgggtgagtgcgcctgagagcccagctctgggaattgagcagactgaaaatgtggagagtagtttggccagtgaaaaattgtcaccgtgttcggatcaatgctttgaacccgcttttaagtgcgccacgttcacttgggtcaggctctggacattgcggtgggctgaggttttcgcgggcacgatcccccacactgagttttcatggagacgaccagggccgtcgaggcggggaagggaacggactagaggctgaactttggcttcttgctctgaaagatcactcctccggttccggggcagagactcagaccagcctgtgggattacacgagacaggatcgagtccaaacgggtccccagctcggcaaggcgcgccggaaggaatctaagtgtttaattaactgcccccttcacacaccccccgaaggagaaggaactcaaataggcacccctacccaaatcgtttgatcagaggaaattgggtttgtctctcccccaccccccaccccgtcccttcactcttcctgtgtttcagtccatcgggattgttggttaaaaaaaaaaaaaaaaaaaggcttataatcgggggcggggcagaggctccgagcgagccgcacttgcgactctggaccgcggttggtgaacttttttctccctgcgcataatccgcctgctgctctgccccactggctgcgcgtggagccggtcccaggcctgctcgcagccctgcccccgggcgcggcccgagccgggcccgacctcgctttcagggccgagccggggtacgcgtgggcgcgcgcccagcggcctcgatcccgcggcggcgtccgcgctccgcgttttcgctcgcgccgggccccgcggccgagggcggggtgcgcggcggcgccgcagcgcgcggctccggagcccgagcgcactccgcctgcagcccagctgccagcgccgtctcccgcggccgccgccgcccgacagcgcgcccggaacatgccagcctcgcgcagcctgcgctgacttccccgagacgcgccgcggtcggcacggagactttctgggctctggatggttcgtgcgctgctcaccctcgcccacccctgacgccgcggaccgcagctcctcagccccgcagccccgcagcccagcagccccgcagcggcgccgaggacagtgcagccgagttgcgtctccctcgcgcgaggtgagtggcagcctggatcccggcggattccgcagagggggctgcggcgcggtggtggggggcgagcgccgcaggggtagggccgggcaccttcgctggcaccgccggagtctgtgacacccagactgggtcggtgtcgcagaagatcagggagaaggtcataatcggtttgttgggctgtgtagacagggaaagcagatattggctgcagcatcgccagggctccgcagaggctctccgcatggctcctgtttgctgcatcacaaccaactcttcccttggttttctccggcgtggaaacaggttctgtagcccgagggtcgaggcgatgcggggcgccgggaggcgagggtgcgttggcgtgttcccgccgcttaggatcgcctgtcacctactggcgtccggagggagggtaccgattctctcctctagcgctggggaaaggggctggtggctttttggcagaggcgaatcaactcccaccactctccccaaccccctgccccgcgatggtgtttgctgaatgtagcacagatatagggaaaaaatgggagcgtcttcctctcttgaggtagaaaaagttgaagaaactaggcatgttaatagttattaggagcgggactcaggatgcagcagaaagctgttaaattttcattaccctctaagaaaaacaaacggcatcgccagtgactattggcagtgctgtgttattcttgggactttgggaaaattgttcacagattgtcttcaggaggctgaagaacgaggttgggggttgggagagagggaggacggctgcatcacgcttagttccagcttgcctaaggagggttcaggatcacaagccgaacgcgtttggttgctgatttttaaaagggtatca

SEQ ID NO: 5892 - DNA, 6000 bp, Homo sapiens
agaattaacaccacacatctacaaccatctgatctttgacaaacctgacaaaaacaagaaatggggaaaggattccctatttaataaatggtgctgagaaaactggctagccatatgtagaaagctgaaactgaatcccttccttacaccatatacaaaaattaactcaagatgggttaaagacttaaaggtaagacctaacaccataacaaccctagaagaaaacctaggcaataccattcaggacatagatatgggcaaagacttcatgattaaaacacaaaaagcaatggcaacaaaagccaaaatagacaaatgggatctaattcaactaaagagcttctgcacagcaaaagaaactaccatcagagtgaataggcaacctacagaatgggagaaaatctttgcagtctacccatctgacaaagggctaatatccagaatctactaagaactcaaacaaatttacaagaaaaaagcaaccccatcaaaaagtgggcaaaggatatgaacagacacttctcaaaagaagacatttatgcagtcaacagacacatgaaaaaatgctcatcatcactggtcatcagagaaatgcaaatcaaaaccacaatgagataccatctcacaccagttaaaatggcgatcattaaaaagtcagaagacaacagacgctggagaggatgtggagaaataggaacacttttacactgttggtgggagtgtaaattagttcaaccattgtggaagacagtgtggcgattcctcaaggatccagaactagaaataccatttgacccagcaatcccattactgggtatatacccaaaggattataaatcatgctactataaagacacatgcacatgtatgtttattgtggcactattcacaatagtgaagacttggaaccccaaatgtccatcaatgatagactggattaagaaaatgtggcacatgtacaccatggaatcgtatgcagccataaaagaaggatcagttcatgtcctttgcagggacatggatgaagctagaaaccatcattttaagcaaactatcacaaggacaaaaaaccaaacactgcatgttttcactcataggtgggagttgaacaatgagaacacatggacacaggacagagaatatcacacaccagggcctgtcgtggggtggggggcccggggagggatagcattacgagaaatacctaatataaattacaagttgatgggtgcagcaaaccaacatggcacatgtatacctatgtaacaaacctacacattgtgcacatgtaccctagaacttaaagtataataataaaaaaaaatacctgagacagggtaatttataaaggaaagaggtttaattgactcacaattccacatgactggggaggcctcacaatcatagcggagggcaaacaaggagcaaagtcacgtcttacatggtggcaggcagagcgcatgtgcagggtaactcccctttataaaaccaccagatctcatgagatttattcactatcacaagcacagcatgggaaagacccgcccccaggattcaattacctcctaccaggtaactcccatgacacgtgggaattatgggagctaaaattcaagatgagatttgggtagggacacagccaaaccatatcatcatctgtccacctatggccttcatcagcccttcaggtaacttagtttttgacacctgtttcctatttcacttaatcaaatctattttgcttttgtatgttttttttccactttttcaaacagaaatgtttgcttgccagtgataagctaagttggtaggtaatgaataacaaaatgacctggatattttctaaggcctttattcccccttggttgtaatcttagtttgagagaagccataaggatacccagttatttgtagaatggatacatacacttgaggtgaccatgaagtcaaagaatgggacatagaggactactctgcttagctagttttttttttttcctattttcccatccttgcagaatcagattcataaaattttagaaagattctcacagttcagccatggttgtgacaaactctgaataccagaggacacaaagggagaggaaaaactgttctattttttttccccaggtacatgtggaaaaattttgctgcactgaaaataacccttgcctttctcttgctccaggctgcccttttcttgggcctgggggtgttgttctccttggtcagcattcccttggtcatctatgactgggcctgctcatcgagtagtgacgaaggccactgaaacccgccgagaaaaagaaacatccctgttgtctgctcagtcaagtccccacacatcagcaatctctcaccacttcttttgcaagtttacagaagcaaacagaaatgtacaggatacttaaaatggaataactttttggttgcaaaacagagacatggttctataatgcttcatgtccctccaagatttgagatcaatttagggattgtgaaatttttttttcaaatttcatacaatcatatttcccagtacttttcacaatcattttttacccatctaactctatgttttgtggcttcccggtctcttagaactttgaaaacatgatatacaataatgtttatttattatacatccagattctgaaataattttcctactgatgttcagctcacactatctgtacctttttagaagagaaaagaatcttgaattgtatatatttattttgctttacagaaaaaaatggtttcgtaaataatttgcctattttggttaacatagcacatggagataatcatctgaaagttatagggcactgccactgctgaatcagagcatgcccaatatttgaggtggctctgatttcctggcagctgaactcgggtagtccagtggcctagctggtaccacatctattcccatccagagacattctctggcaagtgttctcagctgaaaagtggttggggatgattcttaccttggtaattaaatgaagctacacatttgggtaatctagcaaatgaagtattttttccctcttggcaacttgtgtcagagttactctggtctgagtcaactttcgctggggaaaacctatggaacctactgcaaaaagattgtccaaaatgcctaagaaaatactcctctgatgcatttagccttcaaccctacctgtcttgctgaagggagaaaaatgttttagtacattataggcccagcagcttttattcatgtccaccagctagttgcacagagaatcatgtgtacctaactaaggatgatctaggataagtaactcctgttttatattgagtattttagggaagtctttaaaagacttgttttatatctataaatctaggttattacaaatacaagaattttgtaccttaaataagcctcatttctatttcttcttcattaattctccatctagtcttgtgaaaaaaaaaaaaaaaaaaccctcagagatagtctttgtgaagagcttctgacagaatcactgagtaccttccttcccccagatgaggaagacaagggggtctcagtgtctgtgctgtctcctcttctcttccccaaccaaggactgtgccattactgcccgtctcaactgtccatgcaggaggacagagttgcctggtactcttacccttgtccctctcctaaagggagcacaaggaaactgaagagactgaaaaagaagagagtttgtagctgaaaaagaatagggatagcaaggaaacccagaactgcattcccctaagtggggccatcccatgtgattgaattgtccatagcttgcctatggtgagaaatgtgcatgctccgtgagctggtctcttgaaacaggacttatgcttcctctatattctggttaaattttccaaacacataagttcactgagcacagatttcttatccagagacaagtagaatctaaccgcagactgttggcagagtttccaggcacttagccatgttcccttcctgactcaaatccccaaaggccttcactctcactgagaatcacactactgtcccatagataaggcaggcattgaagcacctgtcgtgatcctctaggggggagaatgaaaggttatttcctgcattgcatcatcatagcttttaatataatgctacagaatcatatccacattaggttagagttcagatatttggatatgaatacctaacctagccatatccatggccatctctgttcttttcagcaatgttttccatattatattagcaatgacagaaacagaacaagccaagatccagtcagttcttgggagcttgtctagagcaccaagtaatgaaatagccaggtagtgggatgactgtacctttaaaaatacataatttagtttgcaagctatattatgctactttctattttccttgttactttatagcaattcattttaccctcacaaagtcaatttagaaccttatcattaactgggatgtgtagtgatatttttgggcctctgggtttcatgtgtcaatacaaggaatatttatttaaaatagatttatttagaggaggcacagtgttgttgatctgtgtgacaccacccatatttttaaaaacctttgtatgtttctctaaatttgttgttgactgaatataatagaccctaccataattcgtcaaatatcactgattagttacatcctttgtgtgagattagctgtaaagtatactgctcttattcttattcagaatagttaattggtagccaaaaatacatgtatcacagatgttaggtcgaatttaaacagcacagtcaagtgctatggaagtttttctgctaaattagtagattaaagaatactataccctaggcatggggagcagcacgttttcctttggtaggtaggatctctatactagtgaacagtgccagttccacactttggacttagaactgttctctagttattgtaacacagaatactgtcaatccctaatttacttaatgttacttattggaagtggggctgatgaaatacgcacaggagggaaatctactgtgtttaggcacaggcagccccagtgtataaggagatcatattccaaaaggttgtcagttggttgtttgcaacctggaatgtattttcctttagagaccaggttatccatggtggttaggcccctagagcagctggaaaagatgatcaaaccaataggttagctgacatcgaataatgtaataggtttgctaaagaatctaaccatcaaatataatattgtttccagggagggtgtttgttcagagttgcctgttagtagaatctggactgtccatcccagccacatcccacctactggacagtaggggtagagatgccaccagactacaggtgaccagattggcctgaaacatggtgtccagtaaaaacggggaggaataagtccatgactgctggagagcttggtggtaggaggagggtgaaggagggtgagggggcctctcatgggtcagaaacctccagggacatccctcagctggtaactctgctgttgtccggagggttcaggcttggtgtgccttcttctgtttgtctgacttttggctcctatggttcatctcctgccctgcccaccacagaaaaggatgctgctgcatagcttctccaatgtaccagtcattgaggccagcgcgcagcacttttaatgtttttagtgctagtaactgtgttttaactctccaggaataagctgggaggttagaaaacaagaaaaaagggggaaaaaaaaacctctccacccactttccttttttacagttacagaccctgttgagaaaaagaagcacccagatgggtgatggtgatagggcttgtggtggacacagggttgtggtaagattcctcagtgcttcggcgagcacctaagactattaccctggaactgactgctttctagagcttgattcatgcctctaagccagtggttctcaaagtgtggc

SEQ ID NO: 5893 - DNA, 6000 bp, Homo sapiens
gataaagaatgtgaaagcccttcttaggacataaagtgctattgaagtgttaattattagtaaaaatgacttagaatcatcaaacatgtgctattaatttcttgtctcatatctctaattacttaaatctttgattacaacctgagaaattgtggaaattacagggctagaactcctgtgatttcatcacctcaaattactgcctcaggcagatagtatttccaaacccagctagacactcacatgaccacacccccttctcagcatactagattcagaattatgtcaagtgtcaagccacattctactatcccttggagtcattactgaatggtcaaaaattccaatgtattatgtcatgtggaagaggccagaggaatatctatcgcatcctattttaaactcctgagaaggcaactcaaccatctgtcttggcaacccattccaggttggaaccaccctggcagaaacgtctctcttctgtttaatctaaatccttcaaatagaaccttgagataattgcatcccatttcattttcaaataatttggaacacagttgtttaccatctgggttataggattatataatgtcacagggctgtggtgagcaataaatgaaataatgcatgtaaaacgcatagctcagtgtctggcatataataaaggctcagtacatatttattatcaccatcattacatgtgttagtactctgtccgtcacaagtgacatgcaactcaaaataatttaagctaaaaaagggggtggggtggaaaatataattaaaaaggaagtaaaagtatgcagtggccttcaggtactaccagatccaggactcaaataacatttacaggactcctctttctctttcttctccttttttttaagacaagctttcaaagcataaaaggcaggacagcaaccagcagattcagttggggtaaaccgttatcttaaccactttgaataggttccctgttcatcagttcatttatcaaaaatttattgaatgtgttaagcagggttctgagagctgagaatacagcaatacacaaaacagataaaactgctatcctcttggaatttaccttctagtggaaagagggaatctgttagaaggagaagggatgctagaaagataaaaatgttatcctccacaaaataaggtcacgtcttataccttaagatcaactcttatctttctttcctcccagctagtaaactcaatccttttacaacgttcttccctttcacaaacatgtgaaatcccccaaatcaggtcttcaaatggataaatagccttgtctatggattttgagtgcatttagtttacttttgctgtgtaatctctgcataatgtttctacaatatgcctgtagttataataatataaccttcctgtttccatttttttgaatcacttattctttttagactatttttgcattaaatacaggtctttcttctgccttcatggtttccttaaaatacgatgttaattagtaaaatcctgcaaaaacctggtcatttattagtcatttaaaaaatattcctctgagcgattttaattctattcctctgtattaactattctaactctataaaattgaagtcctggagaccaagcttttgagaatcccaggaagtgtggcctaatactagaaaatctcaacttctgcctctcccctttaagtacacagtaagaaatgcttgcatgaagcattttaggctgtgttcttatgataaaattcaactttcatgaaataaattaatctgaatcaagttgtcctcatctgaaaatgcctagatttattagtgctagcccggctttattccacaaacaattctatttaaattaggtgttggtctaacaaatctgcctgaccacagcaatgactcacggaccatgtaggaaacaactttcactaaattcaagattgctcaagtgaaaaggtgcgcgggggaggggaggaagagttggttgtcctcatcatttttatttttaagtaatattacaagttatctatcctgccccaactgtttcctcaatttggttgcttttcattccactgtggttggcatcttttgtcaaggcagtaatttatttcttttaatccggatataatggccaaatgggcgatctgactcactcaaatcccatcgttaaaacttatcttggaattaaacaaaaatggatttttaatcgtagagctcatcagcctcatagtctccacctcatttctgaatggccttgttcggcttgcaccttctgtgcttgctgaaccaaagcgcgctggtcggccgcggcatctccggaagggatgaagagcctccgcgcacacgccccttacttccctgtcccgcacgcgccacgagcacgcttgcaaaagacggggaggtggcggggacagagacagaggaaatgagagagagagaacgaaagagaaaggagagagagggagagagagagggagagagaagaggggaaggagaagagagaaaaaagaaaaaaaggtctgctctgggattattattattatttgggttaatactcttatctttgcattccagccggaaggtcggctccaagccttctttcctgccctcctccttcttgaattggacaccatccctgttgccgcctcctgagtcaggaaagggatagaactttcccagggaggtgaggggtgtccccgtggcgatttcccggttacttcctcccagcagatatccctgtggagaggaaacgttcccgacttccctccccgcgacctcctccctagaaacgagcggagacgtcaggctgcttctgggtttattttgtaaacccagacagtcaactgcacttggcgcaggcaaagcctccttggcccttgccccaaagcaaagctctaagaggtccggggattccttggcctgggtggggagagagacgtgacctgtgcggccgccgcgaagtgggtctccaagggtgagacccctccctcggtggctgggcgtgtcccctttagccttcctggaccccattaccgcccggcttggagctggacgaagggacgtaattggtaggcgagtgggttgggcatcttgactcaaggaccagagtctgggcctctggtgtggacccctgccccctccccgctctgcgcggccgttctagaggtccgggtgggagctggaggaggaaagcgggaggaggcggcgaggccgcggggcggtatgagggggcgccggccgcctctcggattggctgcgccgccgccccctccgcatcgcgcgccccccaccacgcgcccagcctgctccctcccgcaggctccgagctgctgcccgcaggaggcaggacgcgcaggggtgggaccggcgccccagcccgtctcccggccccgggcgcgcgggaaccccgggtcctgcagcctcccgagtgcggagaggcggggccgcccgctgccgcccggctgcctgcgccccctcccgcggccccggctctgggagcggggcgccccgcgcgcgggcacacggcggccagagcgccgaggcggtaccttcagcctgcaatgagaggaacccgggagagcccccgggagccagcgaagagcttggctgctgcgtccagggctgctgctgccgccgcggctgcttgaaactcctcaaagttgagagccggctagagggtgccgcccgccgggagccggagggaaaggaagtcggaaggtgcaagagtgacagacacggacagacggacgcgcagaccttcggaaggcactgcgtaggcagcctccccggagcccacgaggctccccagcaccgtgagttttttcctggatgggtggttgctaagtatttccgtttaattgtttgtagcgtacgtttgcgtatagttgtgtctgttggagggagtttaaaacaacaacaacaacaacaacaacgcaggatgcaccttaggaaaaaattgagtttctgatggtgggtgagacggtgggttgtatggagagaatgtgactgtacatttttataagcaggactaacccaggaaagaggaaaaaatacatttaacagtgaagaggcaacacagagctccctattgtgaaataaaacccatttcaaaagttattggaaagaaagtaaggtatggctcttatgggttaactagtggtagtcagtttctgctttttactccctctgaattattaattgtttgccaggttcactggtgggaggctgagccggtggaaaagacaccgggaagagactcagaggcgaccataatgtcgttacgtgtacacactctgcccaccctgcttggagccgtcgtcagaccgggctgcagggagctgctgtgtttgctgatgatcacagtgactgtgggccctggtgcctctggggtgtgccccaccgcttgcatctgtgccactgacatcgtcagctgcaccaacaaaaacctgtccaaggtgcctgggaaccttttcagactgattaagagactggacctgagttataacagaattgggcttctggattctgagtggattccagtatcgtttgcaaagctgaacaccctaattcttcgtcataacaacatcaccagcatttccacgggcagtttttccacaactccaaatttgaagtgtcttgacttatcgtccaataagctgaagacggtgaaaaatgctgtattccaagagttgaaggttctggaagtgcttctgctttacaacaatcacatatcctatctcgatccttcagcgtttggagggctctcccagttgcagaaactctacttaagtggaaattttctcacacagtttccgatggatttgtatgttggaaggttcaagctggcagaactgatgtttttagatgtttcttataaccgaattccttccatgccaatgcaccacataaatttagtgccaggaaaacagctgagaggcatctaccttcatggaaacccatttgtctgtgactgttccctgtactccttgctggtcttttggtatcgtaggcactttagctcagtgatggattttaagaacgattacacctgtcgcctgtggtctgactccaggcactcgcgtcaggtacttctgctccaggatagctttatgaattgctctgacagcatcatcaatggttcctttcgtgcgcttggctttattcatgaggctcaggtcggggaaagactgatggtccactgtgacagcaagacaggtaatgcaaatacggatttcatctgggtgggtccagataacagactgctagagccggataaagagatggaaaacttttacgtgtttcacaatggaagtctggttatagaaagccctcgttttgaggatgctggagtgtattcttgtatcgcaatgaataagcaacgcctgttaaatgaaactgtggacgtcacaataaatgtgagcaatttcactgtaagcagatcccatgctcatgaggcatttaacacagcttttaccactcttgctgcttgcgtggccagtatcgttttggtacttttgtacctctatctgactccatgcccctgcaagtgtaaaaccaagagacagaaaaatatgctacaccaaagcaatgcccattcatcgattctcagtcctggccccgctagtgatgcctccgctgatgaacggaaggcaggtgcaggtaaaagagtggtgtttttggaacccctgaaggatactgcagcagggcagaacgggaaagtcaggctctttcccagcgaggcagtgatagctgagggcatcctaaagtccacgagggggaaatctgactcagattcagtcaattcagtgttttctgacacaccttttgtggcgtccacttaatttgtgcctatatttgtatgatgtcataatttaatctgttcatatttaactttgtgtgtggtctgcaaaataaacagcaggacagaaattgtgttgttttgttctttgaaatacaaccaaattctcttaaaatgattggtaggaaatgaggtaaagtacttcag

SEQ ID NO: 5894 - DNA, 6000 bp, Homo sapiens
aatttttaaaattttttagtcgagatgaggtctcgctatgttgaccaggctggtctcaaactcctgagctcaagcaatcctcctgccaaagtgctgggattataggcatgagacactgcacctggctcatcattttttcataagtttttaaataatttttttttgtagagatggggtctcaccatgttgcccaggctggtctcaaactcttgggctcaagtgatccttgtgcttcagcctcccaaagtgctgggattgcaggtgtgagctgccatgcccagcctcatctattcatttatttcttgtttcctcccactagaaggtaagcttaatgagactaggaactctgtctgctgagttcaattactgtatcctcagcacctattaatagaagagtgcctaacacatagtagcgagagtaggtgacagggcgagactccatctcaaaaataaataaataaataaataaataaataaataaatatgggatgaatgaataatggatctaaggggatggggaagggattttgtatccccctggagttgagcccattctcaagggtagtggtggtggtggcggtggaaatggagttggccagagcctattccaaccctggaagtagaaggggttgtgagtctctggagtggtgatggtggtggtggtggtagcagcagtgatgttaggggtagtgaaacggacaaggcatatttgctagattgaatgaatgtgttttttttgttttgttttgttttttgagacggagtctcactctgttccccaggctgtagtgcagtggtgcaatctcggctcactgcaacctctgcctcccgagttcaagctattctcctgcgtcagcctccccagtagctgggactacaggcgcgtgtcactataccgggctaatttttgtagttttaggagagacggggtttcaccttgttgggcaggctggtctcaaactcctgactcaggtgatctgcccgccttggcctcccaaagtgatgggattacaggcaccagcaaccgcacccagctgtgaattgtttttatatgtctttcttactttcagaaaataaaatgtgcagacttttggtgttttttctttttttttttttttgagacggagtttcgctctcgttgcccaggctggagtgcaatggcgcgatcttggctcaccgcaacctccgccttccaggttcaagcaattctcctgcctcagcctcccgagtagctgggattacaggcatgcaccaccatgcccggctaattttgtatttttatagtagagacggggtttctccatgttgaggctggtcatgaactcctgacctcaggtgatcctcccgcctcggcctcccaaattgctgggattacaggcgtgagccaccgcgcctggccaaattgtgcagacttttgatctttaagacagaaaagctagggaatggttgtttgcattgtaaaaggaatctttgctttgtaaaagggcgtaggcagaggctagtttagctgtaacccaaacaacccaaggaaggctcagggcactcaagcctatccgttagttacattgcagggtgttttcaacactgcttatgtatagagtgttgtccagatacacttttggctgtgtgaagcttacacttacatataatacattctgcttgtaagagtttcctcttcctgaaaatgagagattgaaaatacatcactcttgtgactatggtctgtattattaaaaaaaaaaaaaaaaggtcgttgagatcaagcaagctagacgtggagaaatacagttcctgctgactgcctctctctttcttctctttgtcagagttaaaaccttccaattggccatgcgcggtggctcatgcctgtaatcccaacacgttggtaggccacaacgggtggattgcttgagctcgagtttgagaccagcctggacaacatggtgaaacctgtctctattaaaaatacaaaaattagccgggcatggtggcaagcgcctgtagtctcagctacttgggaggctgacgtagaatcgcttgaactcaggaggcagaggttacagtgagccgagatcgtgccattgcactccagcctgggcaacagagcaagaccctgtctcaaaaaaaaaaaaaaaagtcctaatattctgtagtgctagaaatagatttgatggtggccctgccctgtcggaacttaagactctaatattcatgtccggcatgcacctgtaatcccagctactggggaggctaaggcaggagaatcacttgaactcaggtggcagaagctgcagtgagcagagatcgtgccactgcactctagcctgggcaacagaacgaaactcggtctcaagaaaaaaaaaaagattctaaggccaggcacggtggcttcacggctgtaatcccagcacttttggaggctgaggcagttagatcacctgaggtcaagagtttgagaccagcctggccaatatggagaaaccgtctctctactacaaatacgaaaattagccaggtgtggtggtgggcgcctgtaatcccagctactcgggaggctgacacaggagaatcacttgagcctggaaggtgctgggactataagcacgtatcatcacgctgggctaatttttttttttttttgagacagagtcttgctgtgttgcccaggctggagtgcagtggcgcaatctcagctcactgcaacttccgcctcccaggttcaagcgattcccttgcctcagcctccctagtaactgggattacaggcgcgcgccaccactccccaataatttttgtatttttagtagagacggggtttcaccattttggtcaggctggtctcaaactcctgacctcgtgatctgcctgccttggccttccaaagtgctgggattaaaggaatgagccaccatgcccagctaaaatttaatttttttttttttttttgagacggagtctcgctctgtcgcccaggccggactgcggactgcagtggcgcaatctccgctcactgcaagctccgcttcccgggttcacgccattctcctgcctcagcctcccgagtagctgggactacaggcgccccccactacgcccagctaattttttgtgtgtttttagtagagatggggtttcactgtgttagccaggatgatcttgatctcctgaccttgtgatccgcccgcctcagcctcccaaagtgctgggattacaggcatgagccaccgcacccggcctaaaatttcattttttaacgcatatttatctcaattgttttttgcattttccccatgtggctcatgagcacattattctaagcgtaagtggtagataacctgattcaggtattttgaagaggaaattttgatagcaaaaacaattttttttttttgagacggcgtctcgctctgtctcccaggctggagtgcaatggcgtgatctcggctcactgcaacctccgcctcccgggttcaagcgattctcctgcctcagcctctcgagtagctgggactacaggtgcccgccaccacgcccagctaatttttaatagagacggggtttcaccatgttggccagaatggtctcgatttcttgaccttgtgatccacccgcctcggcctcccaaagtgctgggattacaggcgtgagccaccgcgcccggccagcaaaaacaatttttaaggaaattttgaagtgagaagtcaggcaaagaggccccaaagatcaaattgcaggccaggcctgcacaactgagaaatgagaaagtaccactttcccattttcaaacattataacaaacatttctctatctgattctgaaaaccctgtaagaaagacaaggcagatggttttattcccatttcaagagattgatgatttacccaaggtatatagtttgcaggtacacgtggctgataaatgttggaaactggctttcccaactcttcttttccttgcctgaagctctgtcctggacttaggaatcccagtggtgatttggagtggacaagacttgagtcttgaaggacaggactgcagggagggctggtcctgaggaggaagcatcttcagatacctaggtcttgggatcttgggtggggaataggctgcttggggaagggctgaattggaaggaggagctagaggtctgactgagggaatggagagggggcctcaaaaggaagccaggcaggctgccttcttcccagctccagaatggcaccccctctaaagtcacactcacctacgtacatcctggagtgaaactccttctcctttctgcttccaccattactctaatcctcaaagggttaaccagctttcacacgattttcccatctcccaggtaacttgggcagctgctccgtgctggaaataactaaagacccagtttctcagttcgtgcacttagcaatgcaccccagtagcccctccaacccccagcagagaagcacagccctttgggtaaaagatgcctgggggtgaggctgcaagttggcaggtgcgggggaggggctcccagagagtagggcggggggttgtgggggcggcagggagagtgccccttccctgggtccctccactgggccccgaggttcgcctcggggccgctgccccagagactggggggaagaggaaagaagtggtgtgcgggcaagcaggccgcacacacctggcgccttgtggaatgagagcttaattaattattaaactgagttcccgcgggagggcgcagggccgtgacaggcagggcgggaatggctaggtgggggctggggctggggcaggggcagggaggaattggggatgaagagtgggcgcggggcgccggcccaacccctgggaccctgacaggaaggaaggcgaccctcggtgggcggggcgggggatgtagccgtgaggggtgggtttgcgggcgcgctcggggacccccggggtgagggcgggagaggaatgccggaggaggcggccggggtgaagggaaggggaccgggctgcgaggtcccctccccgcggggtcttgatcccagaacagtagctgcttgtcttcccaggactgggggaggaagcggccggaggagaggagggggcgcgcggagggaggggtcccattatttggcctcctccgcccctaccccgctgctaggaaggggagtgggcaactcggcccccacttctggggagggggagggggatgcccagacaaaaggagcttgtgcctttaaggcggggagtccgggagccagcggggaggggacttctggatccggggtagagggcggctgcgctggacagctcgggagggggcgagggccgggcggacggcggacggcggacggcgggcgggacggccaggacgcgcgggctcggaggaccgcgggacggccggccggccggccggagcccgcgggggcggcggggcgggggcccagggcaggcgcggagccgggccggcaggtgagcgcgctgagggctaggggaagtggccgctcgggctcccggtgcgccaggattggaacgcacccgagcggctctcgacaagagtttgtgggtgggggcgccgaagccttggacgggtcgtctcggcagtgttgcccgagggagttggggttggcaaagggaagtcatggaggcagtgggatcgaggactcctaggtccggcgctcgccacccccgtcgcccgccgcctgcctccctccacggggcgagttccaggctggcccggaggccaggaggatctggcacgtactgggggaggggctggcctgagttttttgctgcggggctgtggggtgtctccgagtttgggggagattccatttaggggagaggaaccggcctgggcagagggagggatgccctctgtctgcgggagtccctctccttcccctcacccaaaaccttgggaatgaaaggggtggggtcggctccccacatcccccaaggcctgccgcagggtgggcaggggagctgactttattcaaagcagactctggggct

SEQ ID NO: 5895 - DNA, 6000 bp, Homo sapiens; identical to SEQ ID NO: 628

SEQ ID NO: 5896 - DNA, 6000 bp, Homo sapiens
gtgacttggtgatatctgggtccccagcttcagtcctgcctacagtgagctgtgttgttgggtttcccagtttatgtgagtgattcagctccttttgagcacaagcagtttgaattgggtttctgtcattgacaatcacaaaacacaacaaaacaaaaccatacctaatgcacatttagctgtataatttctactacgtcgaatttcacttgtttacttaatattatatacaggtttttacctaagacttatgaacatttttatagtttataaaataatcttgtatttacatatcacttaattttaacacaattatgtgaggtagggcatacatttttttttatttagtaatttttttttttttgaaacacagtctcactctgctacccaggctggagtgcagaggtataatcatagctcactgcaaccttgaattcctgggctcaaaggatcctcctgcctcagcttcccaaagtgctcagattataggtgtgagccactgagcctggctaattttttttttttaagagatggggtctcaggccaggcgcggtggctcacgcctataatcccagcactttggaaggccaaggagggtggatcacaaggtcaggagtttgagaccagcctggccaatatggtgaaatcctatctctactaaaaatacaaaaattagccaggcgtggtggtgcaagactgtagtcccagctactcaggaggctgaggcaggagaattgcttgaacccgggagatggaggttgcagtgagccgagattgcgccactgcaccccagcctgggtgacagagtgagactctgtctcaaaaaaaaaaaaaagagatggggtctcaccctgtcacccaggctggagtgaagtacacaatcatagcacactgcagccttgaactcctgggctcaagggatcctcctgcctcagcctccagagtagctgggactacaggagcaggctaccatgcctggctgatttttttttttttttgagatccatctcgctctgtcgcccaggctggagtgcagtggtgtgatctcggctcactgcaacctccacctcctgggttcaagcaattttcctccctcagcctcctgagtagctgggattacagtcttgcaccaccatgcctggctaagttttatttttatttatttcttttttgagacagggtttcactcccattgcccaggctggagtgcagtggtgtgatctcagctcattgcaacctctgcctcccgggctcaagtgattatcctgcctcagcctccccagtagctgggactataggcatgtgccaccgctcccagctaatttttgtattttttttagagatgaggtcttgccatgttgcccacttggtctcaaactcctgagctcaagtgatcggcccacctcagcctcccaaaatgctggaattacaggtgtgagccactgcgcctggcctaattttttattttttgtaaagataggatctcattatgttgccctggctggttttgaactcctgggctcaagtgatccttctgccttggcctcccaaagtgctgagattataggtgagagccaccgtgtccagccaagaaatatattttacagtaaccccgtacatacatacacacacacgcacacactcttaaagttgcacaaaacaatacctaccttagtgcctgtgacattctctgatattttctattctattttttaaaaattctggctgggcgcagtggctcacgcctgtcatgccagcactttgggaggctgaggcgggcagatcacaaggtcaggagttcgagaccagcctggccaacatggtgaaaccccccgactctactaataatacaaaaattagctgggtgtggtgacggatgcctgtaataccagctacttgggaggctgaggcaggagaattgcttgaacctgggaggcagaggttgcagtgagccaagattgcgccactgcattttagcctgggtgacagagcaagactctgtctcagaaaaaaaaaaaaaaaaaattctgttttatttcagcactttggaaggccaaggcaggtggatcccttgagtcctgaagtttgaaaccagcctgggcaatatagggagaccctgttttcttgctgtgtccaactacctagaacaaccattgagtcaggagaaagaattatggatctcctgcccagggacccagatgaaaggtctctttgcttcagggctctcttaataaaaaaaagaaaagaaaaaatattctggttgcaacctacagttttttttttttcgctggaatgaagtggtgccatctcagctcactgcaacctctgcctcctgggttcaagcaattctcctgcctgagcctcccaagtggctgggactacaggcacctaccaccacacccagctaacttttgtatttttattagaaacagggtttcaccatgttggccaggctggtcccaaactcctgagctcaagggatcttcccgccttggcctcccaaagtgctgggattacaggcgtgaaccactgtgcctggccgcaatccacagtggttttttttgtttttttttttaattttttttttcagagacagggtcttgctctgttgcccaagttggagtgcatttgcatgatcacagttcactgcagtcttgaactcctggagttttctgttcttctgtgactaccctatgttattcttgtctcaattttttaatggaagggaattgtttaaggtgtacaagatggaggtcccaatatggtgtggtggttgagtcttggctcgtgggtctaacagatttgtgttcaaagcctggctttgccactaactagctgtgtccttaggcaaattatactccaagtctcagattcctaatttgcaaaatgagaataataataaataatacttcctgccccattagtttattatgaggattgtttttttggtagagtcatggtctcgctatgttgcccaggctgttttcaaactcctggcctcaagtgatctgcctgcctcggcctcccaaagtgctgggattgcaggcgtgaatttttgtgccagcctactacaaggattaatgcttgtgaagtgttaaatatagcgtttggtacacaataaaaattcaattaaggttgtcagttactcttaagtataaattggggaccaagaaggcaaaaatggagtgtgttttttgcagatggacggaggggagccaggacacagctcagcttgctcatgctcagagagttaagctgctgaccctgaaggcagggggcacacaactgtatgtgggagccagactaagcagtcgagacagggcagacagtgtgagaaagctgttgatgagagctgctgctgaataaaatcatctttcacctgtctacagctccccaagtgttctttctgctcatccacccactacctccggacctcaacatgacctttggcgtagtctaaacctgacactcataacagttacagatttctttgtcccttctacactcccacttttttgagacagggtcttgctctgtcgcagaggctggagtgctctggtgtgatcacgacgcactgcagccttgacctcctagcctcaaatgatcctcccacctcagcctcccaagaagctgggatgttccacaggcacgttccactacactcaggtaattttaaaattttttgtagagagggggtctccttatgttgcccagggtaagaattcctaaactcaaataggctttttcctgccaagactttagttcgtgggtgattttacaggtgcttctattttcccttcaagtggaacaaattggcccccagtccaatctgcagagacagctttgccttggggaagttacctgatgtagaacaaggacaggagacaggtcaagttgtagttatttgactttcgtgattaagagagccctgaagcaaagagacctttcatctggatccctgggcaggagatccataattctttctcctgactcaatggttgttctaggtaggaaccagaaccacttgctggaagcctgcattgacttatttgaatcgattactgcttttctttcttttccattctaagctattatgtttttatggtactaagcagattttcttgaaaacttctagaaaactgcctgctacctgcaagaaactgttttcttctctcctgtattttacgccaccccaatgcttctcctatgcagctttgtcgtctaagttatttccctgaggcaaaatttccccattctttcagctcccctcctcccagattgagaaattctaggcttgccctggacttctgtcttgtagtctctgggtttttttcctttctttttcttttccatcaggcaccaagtccggagtttgcgtggctctgatgtctgctcgtggatcactgattgaccaggctgaagccagagggtcctttagatcccgagggataatagagcaggcagcatttccacccacgttctgagactcctcataattgcctcagtgctgcacgtacctatatggaaaatacaagtgcactgtcaggcttggggttaatggtttcacctcacgtctcagaggagcagagtcctagtgcacctgtggagcctgaaccagctgcactccaagaggagcagagaagggaagcaatttcttactccacccctttcaaccactggcactcacaggcttgccacctactcttgctcctgccaaatggtacagagatgaaatcttagaataaaatttttgaactcaataaattgttaattaatatctaggagtggcagatatataatgcttctcttttcacgacaggtcaaagatgaaatctgattaggctttggagggcgtggtttgcctcttgaaattccttgctcgtctttagaaagctgtgttgcttagagcacccaaaagtgccctttatctaactgagggaggcgcacttgtcttcatatatagaggcaggagctggcattgggaaagtcaaactagttctgcaccatgaggaagaagcagctgaagacggaggcagctccacactgtgaactaagtaagtagcccagggaagctgcccagctgagcagacctgaaagggtgacaagtacagctctagcaattttattttctagttataatagaagttgccaaaggaaaggttccgatctggaggaacttcatcaaacctttctgaaactccacagatgtactgtagcgagaatctcagaactaatttgtgcattttcttttttctccaggagaaattctgtatgaaaaccaacctgctccaggaagccaagccccccccccccacttttttttggtccccgagtttgtttttacttcgcactttatttggatttttctctttgcagttcacgctcctttcctcatttcttggtctctcttactaatgaaattttctcctagctgtttttacgtgaataaagaagctcaattacctttaatgctgtaagcagtgcgaggggtcggggagtgagggtggcgggaggatctaatgtttttggtggctgtaaacgacattgcagaaaattacggtaatttgttaggccatttattccctcttcaccagtttggcagtctcatcttcagagcaaaagatacggtgtgaggctgaaactggcgatagagtgggattgcttttgggtaggtaggatgaagtctggggagaatcgagtcagctgggcgaggaggaaaacaattcactacggaggcttgggaggacacctaaggcggtcaaactggctgcactagctgatgtttctcggttcctcccaggtgtggggtgctcttggtggggcagcagatactatgatgtggctctgggggcgcgaggaaatgttccttccaggtggctatcctttttttttgagacagggttttgctctgccacccaggctggagtgcagtggcacgatcttgtctcaccgcagcctccacctcccaggcccaagtgattctcccacctcagcccccga

SEQ ID NO: 5897 - DNA, 6000 bp, Homo sapiens
aagaaaacaaattgagattttctagaaaagttgaagatattcatatcttacaacccagaaatttccttttttaaatttttctttttttatttcctgtcttacctgaaacaattcccttttatacatataccctgaagaaattcttccccatgtatacagagacgtgttcataaatgttcaaagcagcattgtctgtaatagcaaaaggatgaaaacaagtccaaatgttcattaacaggagaattagtcaataaattggtgggttagtatacatcaatgaaaatgaataaagtacaactacatacatcaacatagatgaaacataatgttgaataatgttgagcgaaacataatgttgaatgaaaagggcaagtcaaagatatctacaaacagtattatatcacttttttttttttttttttttttccgagacagagtctcactctgttgccaggctggagtgcagtggcacaatcttggctcactgcaacctcctcctcccaggttaaagcgattctcctgcctcagcctcctgagtagctgggattacaggcacacactgccacacccagctaatttttgtatttttagtagagacggggtttcaccatgttggccaggatggtctccatcttctgacctcgtgatccccccacctcggcctcccaaagtgctgggattacagacgtgagccatcgcacccggcctatatcacccttagaatggttttttaaaaaggaggagggacataataaataatatatgttaaaaaaagaaaaactaggaaatggtaaatataagattcagggattagcacagaagagaagcacatggggcccttcagtagtattggtaatttttttttctttttttgagatggagtctcactctgtcacccaggctggagtataatggcgcagtctgtgctcactgcaacctctgcttcccaggctcaaacaattctcctgcctcagcctcctgagtagctgggattacaggtgcccaccaccatgcccagctaatttttgtatttttagtagagatggggtttcaccacgttggccaggctggttttgaactcctgacctcaaatgatcctcctgccttggcctcccaaagtgctgggattacagacatgagccaccatgcctggccttgtttttttctttttcttttcttaaattagggcgtgctgttgcatacagtggctcatgcctgtaatcccagcactttggaaggccaaggctggtggatcacctaaggtcaggagtttgagaccagcctgaccaacatggtgaaactccgtatctactaaaaatacgaaattagccaggtgtggtggtgcacacctgtagtcccagctacttgggaggctgaggcaggagaattgcttgaacccaggaggcggaggttgcagtgagccaagatcatgccactgcactccagcatgggcgacaagagcaaaactccacctcccccacaaaaataattagggcgtggtttaatgggtgtccattttattactatgcttcatagtttatataaaatgtcagttctggaaaagttgttttgctttgttcacgcctgtgtcctcaacaccaagaacagtgcctagcacataggagatgctcaaaatatatgtgttgaataaatggatatacattacttgtattattttatatgaatcaaatatttcataatttttttttcaaacattttgtttttattttttgtagcaatggggtctcgctatgttgcccaagctggtctcaaactcctgggctcatgcaatctccctgcctcagcttcccaaagtgctgggattgcaggcatgagccaccatgcctagctaattttcttaaaaggaaaaagcctactttaattatgttgcccccttgactattctagcttgaagtcatactgcttccacaactcctattactcatatagcctattaaatcctgctgcatattatagttatatgtgtacacgtctttcttactgattttaaatttatgaagacaatggagtatgctttctcattttttatacccattcacaatatgtagcacaatactttgcacatagcagatgctcaataaatattggttgtggctgggcatggtggctcacacctgtaatcccaacactttgggaggctgaggtaggcagatcgcttgagctcaggagttcaaggccagcctgggcaacatagtgaaaccctatccttacaggaaatacaaaaattagccgggcatggtggcgcatgcctgtagttccagctacttgtgaggctgaggcaggtggatcaattgaacccaggaggtcgaggctgcagtgagccatgatcgtgtcaccgcaccccagcctgggtaacagaacaagaccctgtctccaaaaaataaaataaattaaaaaataaacaaattcaaaggaaggtgaagttcttccccagcaaaaatgtttttggtcatccctctgccaccatctctcctactgattcctccctcagaagcctggataccagtgatcctttcccttccttcatctactgttttctttctttagaagtagggaggtttaccgatgtctcacagtcctgatgtcttagggaattgatttagcaaggaaaagtagaaaatatatcagtcagttcccaccagcccatcacagcccaggagcttgaaattaacaatcactaataaatagagaagctcaatatgtataaagtattggcagtgcaaagtttccactttaacttgcagaaaagtgcctgtttagcagaaagaaagaaaatcctggaaagttaacactggatgaaatcttagagatcacctacttctctccctgatttttccaaatgaggaaactaaagcttcgagagatgaagtaactagcatagttattcaactatttagtagcagggctaggactagactccagtctcctgcctcgaagacagctgttctatccatgccacttgctggcaacatgtgcatctagcaaaacacatcataaagtatcctcatcttaagccatcaggaatggaaatcaaaccatttaaacccttcctcttctctctagcaatattttttcttcgcatttctctgtgccctggtctctctctctctctctctctctctctctctctctctctctcgtttttaaaatcactcctgtttctttcgtggctctttctcattgtggcatgcctgcatgagtatcttgatttttctgctctaagctatggtttcttgtccaaagaaacatatataaacaaatcaaaacccttccttggtgacctttgtagaaaaggacacttggaatttctatatgagagaagctgaacctctctcttagcctatccagtcaattaaaatgagtctgtggcccccctgagggttgttaaccaatcctaagaaaggaaagatcaatctcatttcttcgtcaccactgggcagggaggctgccaaccagtcagaatctgccactcacagtcattaaaaaaactggccaatcagtccaaccttgttatatggtctggtaggaaaagaaagggactgattggaaaggatagttctgtctccacaccctttccttcctggaccccggttttccctttgtgaagtgaaagaaggacccttccccaagcctatagttaagaagatcctccgaccctcagctaagcttctcttggatcttttgctgtcttcaaattcacccctccccttacaaacctcctttttggagcctcactgctcccttgcggatttgatttcttgcttcaagcctcgtagtaatagtcccaggattctcagcctcccctcagatctccactcaccagcaagtaaaataacttgttttgtatgacttatgcaggtgaaaacgtttttaaagtgtagttgagtctctttcaggagatactatctcaaggaccttgcaataaacagtccatataggtagcagtgcagaattgagttgcaatgcccttaactatagaagcagtgatgatgatggtgatgatggtggtgatggtggtggtggtggtggtggtggtgacgatgatgattttaatgctagcaattactgaactcttactgggtaccaagtaccttgctaaaagcttcatatgtattatcccaatattggctgtgtgataagtactattattcttctcaatttacataggaggaaatagatttagagggggttaaacagctagctcaagatcacacagcaatttgggaacccagatttgtctgaacgcagaacccattattctatgagggcaagggagtgttaaacatcgcaggctgtaacaacttttggaaagagccagctttagcttcctcccaggccccttctctgatcctcctctgggattgttagccatatctgagtgtctaaattgtcgcaacagctgcaacagccgtttgggggtggtggctcctaagaactgtggactttctctgccactgaggatgtgaagctgacagcttaaaagaattccgttttggtgggaatggagatgtctggagacctcaggggataaacttgtgtctttgctagcctgtctttctcctaacagcatctccacagtgcctggcaccacttggtacttgataaatacctgttgattgattcccaaagatcccagttccatttcccacgtacctgcccgctcggggcgcaatcaacaactaaaactggagatttggggatttcagaggaacctgtgagaatcctgatggagctggaaatgcgaatttaggaaagacaggcagtctaccaccctcctcttctcgcccgcttctcctatttctccccactccttcccctccctttcaggagctcagggccataaaaatgcagatggaggatcggtgtgaaataacgggcccatataaatccctctgccgcccgcctgcaagatggattggccgcattgaaattcctccgcgaggataattaaactcggggcctcatccgggcaaaattacattcctgtaatggcgtcgctcggggtcccgggaaattgctccgtgggctttcagcggcggtttttatcgccggccggggtgtgcctgtctgcggctcgcctctcctccgggaccgtaaagctgctgccgtgatttatcctccccttctcccaaatccgattaaatggaggagctcggggccggggcgccgcggggcccgggagccgggagggggcggcgggaaggacggggccaaggaggggaggacaaacggcccctcagagagtggcggatttgcctttatttacagccgcggctttctttttattttttattttttatggggtttggtgagcttttcccgtctttctcgtgctgcgttcaagcacgatgcagggacggcaggggtttggaactggataggccttgtcgccctgttccaaagggcagggcaggtcctgtctgggagacaaggaggcctaggaaagatgagggccaggaagcctcccccacctccttccatcaggggaagggcgagcgaaaggggagagaaaacccacgttcaggagagcatgggggcgggaggggagggcgctgcttatcccaactcgcgtagttgaaacctgagcagaggctcgggcaagcctggagtgacctcgcaaccttacagcgggtcgcaggtgcccgttattcctagactgtcccaggagccaggaaagagggattcggatcatatttaaccctatcttctggctcgctgatgctgcttctctcatggtttatcaccggaatggaaaggaggaaacggggagtgggggaaagggcgaagccaccagaagcagctgcggcattttgctgactattcgcccatggagccggtttgccatccagtgatgccagagtcccggcgcgacagaaagcaggactcccaagatcttcctcctgctgcattttaggcactgaaccccaatcccgaccgtatgttaacactgaattctgagtaggagttttgttttggcag

SEQ ID NO: 5898 - DNA, 6000 bp, Homo sapiens
cactaagggaatataggggagaaatggtgtttgtggttcgggggactggaggatgaggatgacttaggttttgaacgtgatgggtttgaggcaccagcacacattcagtcataattattattgagtgcctactactcaccaagcatgactttaggttctgaggagaaagcaaagaacaaaatcaagttcctgcccctattgatcttacattctagtgggtagagagggacaacgaacagataaatacaaaatctgtcagtggttggtgattgatagggagaaaaatagtgaagcagacatagggtggaactacctggcatagaggtgggaatatgagggcaaagctgaagagggagctagggacagtggtctgcgtctctaaggaatgcctgcccctgggtgtcctgtacacatctgttctttaaccatgggatattctgggagtccaggaccaatgggcctatctcttcatctcccaggtcaccatccttaatggctcagacattcgatccctctacaacttctcaggggaacaggtaaggatacccctcaaccccaccccagcttggcctctgtcaacgaagccccagccctgacctaataatgtcagcccaacttcccagcccctcttgatcctgtggattgaaccttctagttctgacccagcgctgcccctttgtcctccccagatggcctcctactttggctatgcagtggccgccacagacgtcaatggggatgggtgagtggtgggaaatgagcgcactgtgataccctcccagaaccaagagggaagagtgggaatgggacagaaaatgcaaggagagtttctccagggctttttctctagactctcgctcatacctgcattccccttgctcagggacaaggaaagagctgagagctgatgatcagagacctcaggtcttctgacgtgatggaattcagagtgtccgggatttctagcactaggattggggtggggtggcaagacagggtatcgagatgcctgggtttgcccttcccctcaggctggatgacttgctggtgggggcacccctgctcatggatcggacccctgacgggcggcctcaggaggtgggcagggtctacgtctacctgcagcacccagccggcatagagcccacgcccacccttaccctcactggccatgatgagtttggccgatttggcagctccttgacccccctgggggacctggaccaggatggctacaatggtgagtaccatgggctcagagagtgaaagaggaggcaggggcccaagtcagaagggatttggggagagggcatctgtcagctaagatacccagacctccacgacttcccgaggggttaaaatcccactgtctgggtcttgggatttgaagattagaatatagggactgacagatgggaaaaaataggatcctaggtcctggggtctggtagtagagattagagcccatggattcctggcctgctgactagtgtgtgttctgtgtcttccagatgtggccatcggggctccctttggtggggagacccagcagggagtagtgtttgtatttcctgggggcccaggagggctgggctctaagccttcccaggttctgcagcccctgtgggcagccagccacaccccagacttctttggctctgcccttcgaggaggccgagacctggatggcaatggatatcctggtgagttgtgcctgaggccccttttcaccttaaaattccctggtcactgacccctactctctcttctgcacctttccttaagttcctgggtgcagttctggctaattccaacagagggcgctgtcttctcacttcaacctccctgagcgttgaaaccaggaggggttaggaagaaaggatcctgatctggggcttgctgtaagaggtgatttcttgacttcttacagatctgattgtggggtcctttggtgtggacaaggctgtggtatacaggtatgagctccaaagggagatgaggggacaacctgggtggactggaactggaaatttctcaacagagctgaggttgggaaaatcaatgcagaggacacacattctggcgcttgggcatcagtttcctgtgtccaggttacagaggagtcctaattctattgaccccacattcactcttggcaggggccgccccatcgtgtccgctagtgcctccctcaccatcttccccgccatgttcaacccagaggagcggagctgcagcttagaggggaaccctgtggcctggtgagctggtgcccaggaaattgcagagacctgagcctgggagtgggcaggggcaccaagtctgccttaaaaaggggaaaatggtggtgtcctagtctgggtctggctgggagataggtagaggataggatgtctgttccagttggattcaccagctttcttcttggtctctctccagcatcaaccttagcttctgcctcaatgcttctggaaaacacgttgctgactccattggtgagggagactgcctggatctctcaggccctaggacagagaatgaagggactggggacctggggacatttcttctctctgaaaagatgaggaaagacaggcagtttccctttatatgtccctggcttcaggtttcacagtggaacttcagctggactggcagaagcagaagggaggggtacggcgggcactgttcctggcctccaggcaggcaaccctgacccagaccctgctcatccagaatggggctcgagaggattgcagagagatgaagatctacctcagggtatggcccagagggcggggtgtggactggccagggagggtggccacacagaactgagggcacctcctgaagggaaaaagactgggggactccagtgaagggcttgggactcttgtaggggctgagaaagggagaccttctgtcagaggagctgggaagcaggctgccagggcctctgaaacaatgaggatggtcggaattgggccctaagcagacaaagggagatgagagaggctgaggagcagggccactaagtctccagagtcccctgactccgtgaactctctcctctggccccagaacgagtcagaatttcgagacaaactctcgccgattcacatcgctctcaacttctccttggacccccaagccccagtggacagccacggcctcaggccagccctacattatcagagcaagagccggatagaggacaaggtgaggacagggcagggagaagggacctgggaagacagaggcctgggtattgggggggcagggccatggaaagagaagagcctacagcccaggaatgggtctaaacttcccctctcaaggctgccctgctccccaggctcagatcttgctggactgtggagaagacaacatctgtgtgcctgacctgcagctggaagtgtttgggtaagtagggctgacggtaagctagggagctccaggtgcacctggcacctgaaaaaatcagctagggacatactagctgtgtcgccttgggaagttgctgagctgctctgagctttaactcctttgtctgtatagtgggaatagtagcatttatttctcagactttttggaaagattaaatgaaataatctacataaaaaatctagcctagtgcctgccatagagttagaactcagtaagcagtgtctattgttactttattattactctttttttttttttgagacggagtcatgcccttgtcacccaggctggagtgcagtggcgcaatctcggctcactgcaacctccgcctcccaggttcaagcgattctctgcctcagcgtcccaagtagctgggattacaggtgcctgccaccatgccgggctaatttttttattattatttttagtagagacagggtttcatcatcttggccaggcttgtcttgaactcctgacctcgtgatccacccgcctcagcctcccaaagtgctgggattacaggtgtgagccaccacacccggcctcgtattactactcttataatggtcctttgtcctggtttgaggattaattcaccaatgtcccttaccctctgtgtcccttccagggagcagaaccatgtgtacctgggtgacaagaatgccctgaacctcactttccatgcccagaatgtgggtgagggtggcgcctatgaggctgagcttcgggtcaccgcccctccagaggctgagtactcaggactcgtcagacacccaggggtgagatgagactctcgagtgggatttgggaggatacccctctagaggggacaccaaaacctgaccagtgcccaccccatctccagaacttctccagcctgagctgtgactactttgccgtgaaccagagccgcctgctggtgtgtgacctgggcaaccccatgaaggcaggagccagtgtaagtttgggatgaaagaggatgggacagagggagagcagacctgagggcggtaaccagccagccgagagcacagctgtgaggtgcggagggagggtgaaatacacagtctaactgccctcttttcctctttttctgtccccagctgtggggtggccttcggtttacagtccctcatctccgggacactaagaaaaccatccagtttgacttccagatcctcaggtagggagtgagtgtgtctaggctggggctgagctggggacggaagggagggctgggcgccattctcactggctgcactccagcacctcagtcttgcctccatcccacagcaagaatctcaacaactcgcaaagcgacgtggtttcctttcggctctccgtggaggctcaggcccaggtcaccctgaacgggtcagtgccaggcaaaatggggtctttctgagaggggacacagacttctagggaaggatgcatatggggttccttccaccctcctctaaaccaccctcctccttagtgtctccaagcctgaggcagtgctattcccagtaagcgactggcatccccgagaccagcctcagaaggaggaggacctgggacctgctgtccaccatgtctatgaggtaaggggggaaggggcagggccagaatgaatgatgggaaaggaggagctaatatgagtgacagatggctggaacccatgtgagggactgagagaaagagaggagggaggagtaagtgatatgcaaaggcatgaggcagagtcctgtgagaaacagccagaggagagacaggccaattgagtggcttggaaagaaagatggagccccctccaaaagtgttggctagagaggatttcacctctgcccattgcttccctgcttcatctctgagataggagcctgacagcagggtatagtggagccatggtgatccagggtctcaatggggcagaagcattcccttccttctcatgatgattgtgctcttccctcctcagctcatcaaccaaggccccagctccattagccagggtgtgctggaactcagctgtccccaggctctggaaggtcagcagctcctatatgtgaccagagttacgggactcaactgcaccaccaatcaccccattaacccaaagggcctggaggtgagatcctgaacactggcatggggaagaggagcagattcagaggaccaaggctgaggggttggggaaggttgctgggggcctgcaagaggcaatgaggatgtgcctatagctagggttgagggtcacaaggcccaaagttacctcaaaatcctctggaggaaaaaggactttcatccactgtgtttctttctgcctgaactatcccttctttgtttcccggcatacccctagggcccagttatgtgccacctcctctaggaagccttcttcaaaccttttcctctgggcccgaatgcctgttttatagttcatttactcattaacatctaattaaataagtgactgtactgaacactgttaggcccaggaaatattgcaccaaacagaactgacaaggtctccacgttcatggaacttacattctagtgaagggtgat

SEQ ID NO: 5899 - DNA, 6000 bp, Homo sapiens
ccaccccttcaacagctatttgagggccagactggccagtgcctaaacttgggcggggtggggaaggaggaaactgatgttgataagaggtccataccccacattgaggtgatccaccaaagcttctgtcaggcaggtcgctgcagtgatagcctctcgcctcctcttttctggggagagggggaaaaggaattggaggggagacttggttttttgaggggtagtgttaaaggttccctacccatccattactattctgctagttgccgaaatttcttaactaatctctgaatgccggagctgaaaaggaccttgcaaaacatagcgcaacctctttcattttagagatgaggaaactggtaccctgggagggaaatggactcactcagggacgccaggaagtcagcggcagcgcccaggactcctgactcccaggcactctttctccactactcggccgcagaatcggtaactccgagatttccagcccggactcaggaaacaagtgccccacctccgttccggtggtttcaggcctccaagaagcccatctctggggggttccccacaccctcctccctccagagtcgctccttcccgccgccaggacgagaggctcccagggccaataggcagggcgctccggggcaggggcggggctaaggtgcggcaggtcggggattgggggcgttgccgaggggaccggagtattgcccaagggaccggagccagttggcaagggaaaggagtttcaaaaaaagcctctctgaaattccctctcccccatgcccgttgcccgctagctggcgtctttccctggatatggttagttactcgagatccaggctccgggctgaagctaggccgcggccgaagagaaaacggccgacaggatatttggctcaccctgcagctccttgcgttcattctgcttggcctggtgttcttttaggaggcgggacagcatggtcacgtcgggctgggggctgggtacgccgggccccctccggctccggaagctggaacgctcacctcggctccccggggccatgtcacgtgaccgctgtgtcacgtgaggttgggaaccgccctcttgagaccttgggtgaagatcttggcggggaagagaggtagagggttgcggagggcaggtgaagtgttctttattgggagcttagtttttggtgagtgttggaagaagtattttctaatacttatattgccaagccagtttttaacatttcctgtggatctcaggcttcgagggctggtggtgtcaggccgtctatcaccgtttaattgagggagcagaagctccctggcctcatttaaattattctccttccctctcctcacctcctggcagtgctagctggttctcagttgattcccagttccttccctcaaggagaggatgctttcctgtctctcccaaccctctttcttctcactaccccactgaagtctctcagctctgggtgatcattgtagagaagcattttaggcacttcagacagcctcctagggagcttggctaacttggcgggctgtgtgaatgtagaatttcatctctgtccttttgtggtcaggaatgcgaacccatttcagtgttagcagaagcgtaagtgctgtgccaaagtaaaaagtaatttatataaggcctctgtgaactaaaaagaaatgcttccgggattaactccagcgagaacaattataaacatcatgagcatattcttgctactggtacaatctctctcggtgcaccttgcactaacatgttgggtgactttgggcaagttgctcaccattctaggttatagttttctctttagtaaaactaggagaagggattggattaaatcggtggttctcaaccctggctaagcattagaatctaaacattagaatcacagaaatcacaaggcttataaaaatgccgtgattagccgggtgcggtggctcacgcccgtaatcccagcactttgggaggccgaggcgggcggatcacgaggtcaggagttcgagaccaggctgaccaacatggtgaaaccttgtatctactaaaaatacaaaatttagccaggcgtagtggcacaagcctgtaatcccagctactcaggagcctgaggcaggagaatcgcttgaacctgggaggcagaggttgcagtgagccgagatcacgccactgaactccagcctgggcgacagagtgggactctgtctcaaaaaaaaaaaaaaaaaagccttgattccagactaattaaatagaatctaaggagtgaagaccaaacatcactatatatatgtatgtatatatgtatgtatacgtatatatgtgtatatatgtatgtatacgtatatatgtgtatatatgtatgtatatgtatatatgtatatataaaattattattatttttgagacagagtctcgctctgtcgcctaggctggagtgcagtggcatgatctcagctgactgcaacctccacctcccaggttcaagcgattctcctgcctcagcctcctgagtagctgggattacaggcatgtgccaccacacctgactaatttttgtatttttttttttgagacggagtctcgctctgtcgcccaggctggagtgcagtggcgggatctcggctcactgcaagctccgcctcccgggttcacgccattctcctgcctcagcctcccaagtagctgggactacaggcgcccgccactacgcccggctaattttttttttttgtatttttagtagagacggggtttcaccgttttagccgggatggtctcgatctcctgacctcgtgatccgcccgcctcggcctcccaaagtgctgggattacaggcgtgagccaccgcgcccggcctaatttttgtatttttagtagagatggcatttcaccgtgttggttagactggtcttgaactcctgacctcaggtaatctgcccgcctcggcctcccaaagtgctgggattacaggtgtgagccaccgtgcctggccttatcagtatattttaaaagctgttctggtgattctaatgtgtatccagggttgaaactcactgggctaaaccatatctaaaactatttccagctttggcattctctcattttgtgattcattggcatagttgaagttgacgtcattatatttacttgcagggggaggagaaatgggtgctgattgcattagaagaaaacattcttgaattttctgagtaagatttgagaattactgatcaatgattcattcaactatttgcagaatagcatcccaaatcctgggagatgtgcaactgtcaaaggattagtgaggagaagcacatgaaatgcttaagtggcagcataaagcaaaacattttaagtgccaaaataaaaattctaataaaaacgttagatactgtgtgtatgtgtctaaattatatgtgtactgtatcttctttctaaacatttcttagtactcatcatagtcaagcactttacatgtatgtattcatttaatccctagaacagttctgtgaaatattattacgagtatcccaaatttgcagatgaagaatctgaggtacaaggcagttaagtaatagagttcattagtggtagagctaggatacaaatccaggctatctgactccagagcctgagtcttaccgctgtatactgcataaaccacagttgagaccccaggagggtagacccagagcacttttctgggaatctctctgtctctaatcattatgcccctctagcttgctgggcatgagctgtagagaatcctggcaggggaggagtgtttgagaagaggctctgctccagagaagggctaatcaatagaagtgggaagagtgagagcatcacagagcagcctggctctgtcctccccactctctggctccagcttccaactgcagtgagcaagcaaaatagaggcagattggaaatgcctggtgcctcacctccagagctgtggggcctggaagagaaggacatgggttggaagtgtcaagataatggtgacatgggataagtgaaacagagggtgagggctaatgggggttagtgttgggggggtctcaaaagtgagtctaaatgttaagattaggccaactcagggagagtgtcaggcccatcctgtattaccctcacccttcttggcacaactgcctgacattttcacaatcggtgtagagactgccaggattctgcagacattagcctctcccttctctcccacacactggctgttcctttgccctagagctgagcagaggacatggggtatctgtatctagtgtccccatctgatctctctagggttatcctccatctgttctttttctgggcctttattgttcactgtctaaccttagtttctgctgcagttgaagctcagcttcacttgtccttggtagagatggacacaagtcgcatacatatctatctggagaatgactcttgaaatttgaagtctctttctgctcacctctccttacgatttcctactcagattattttcccttggactgaatgaatgcaactccacactcctttcttcactcatttccctcttcttttgaggtctctttcagagttagctttaattagcaagctccaaactgactggctgggccaaacagggctggaagctgctgagttgttaggggttggatgagggctgagggaggacacagagtgagtagacaaggcttcacatactgggagatctggctgggcttcaagagagggggttggtggtggtgtggctaagttccaaatgttggcctgaagccagtgctcaaagaaagggggcccttgagacagtccaaatggctccctttggtaagtgacctcccagtccttctcaagtgttaagggtttcttttggatcgtcaaagaccggagcggtcaagctgtttccccactgaattccctcaatcacatttatgttcttttcctcccagccactcccatggttcaagctttgactacaaccagaattcagaggcaggcagaaggattccagtgctggagaggtgagtgaagtaaaaaagttctcatggtgtgcatgttgggacggaaaagcctgaccttgggacataagctccaaggctctgttgccagatgaggtggagggagaagttagccctgaagtgtgtgttctggaagtgtttgcttgtaagctagagacaacagttgcaaaaagtgtgatttgagggagctgaaaaatactgatctcaaagtggggaagaagatgttgaaaagggaaggagctggagaaagcctcagcttccactcatacaaaagctaaagggctaaaatcttggctggatctggacatttctcaacgtctaaaattttggaaatttttataaagattattaatctttcatttttacatttaatttatttaaaaagttcagtttctcagtcatactagccacatttctttttctttttctttttttttgagacagagtctcactctgttgcccaggctgaagtacagtgtattaatctattccatggagtggagtggataatctattccatggattatcattttactttgttagtggtatccttagaagcacaaaatttttaaatttttttttttttttgaggcagagtctcactgtgtcccccaggctggagtgcagtggtgctatctctgctcactgcaggctccgccttctgggttcaagcgattcttgtgcctcagcctcctgagtagctgggattacaggtgtgtaccaccacgcccagctgatttttgtatttttagtagagatgggtttttgtcatattggccaggctggtctcaaactcctgacctcaagtgatccacctccctccctcccaaagtgctgggattaccatgtctggcttggaaattattttgaaataattatagatcagaggaagttgtaaaaatagcacatgaagtcttgtgtacctttcactcagtttcccctaatggtgacatcttatgtaac

SEQ ID NO: 5900 - DNA, 6000 bp, Homo sapiens
gtggtgatgtcgccatggagcccgtgcacagtactcccctgggggctgcactcagtgctggtgctggggcatataacctactctctggagagccctgcgggatggtctatgagcttttctgccagcaggacctgcaaacgcgcaggtgcagcccctccttcaccctgcgatctgagagatgccatcaagcaccgtgcctctatccttatccaaagctgaggcctctggacttaaatttcaggcccccatttcagacccaacctctggaccttgaattttatccaccactctccttaccctcccagtggggggatggctttgatgatgcatccttgtttccttcttccctcccatccctatctcttcctcttccctctccccactcctctcttacacctatttttcaaaaattaaagaaaatgttttttaaactgaagcccaagaagcattgatccttcatgtatttttgcctcctcttcccccatccttccccatgcctcccaccctcctctatgtctctcactttccggtttttcctcacccctctcccaactctcctcaactgttcttttcccttgattctggatcccttctttcttcctcaccttcctcatatcccctcaccctcctcatatcccctcaccctttcctgtgcttagatgcaggctacaagctgctgtgcatggcactgggtctggctgatgcctacatgctctcagaaggctgcaggtttgcttgagacatctgtggcccccatgctgtgtcgctgggcctaggtggaggcgtggtgaagctggagggaaagctggctttgcttggtgtggagggacaagggtccccgcctcagcacacctaccaccaactggtgccaggcaaccaagaggcagcagcctgggccagccaggacggcttggtggcatatctggatgtcaggcacttggaacaggtgctgggggatctgaaggatgtgaagggccaggtctgagatcagccacttcccactaagaggcccctctatcctgcaccccagcaaacacatggagctctgtgtcaactttccaggctgtagaagtgggccattctttgtgtgtatgtgtgtagtaaaatatatataacataaaattcagggacattgagtacatacacattgtgcaaccatcagcaccatccatctccacaacattttcatctttctttctttttctttgagacagagtctcgctctgttgcccaggctggagtgcaatggcacaatatcggctctactaaaaatacaaaattatccaggcatggtggcgcatgcctgtaatcccggctactcaggaggctgaggcaggagaatctcttgaacctgggaggcagaggttgtggtgagttgtgccactgcactccagcctgggcaacaagagcaaaactccatctcaaaaacaaaaacaaaaacaaaaaacctagatgtttatggttaaggaaacaaattaataataataaaaaagataatatcgattcttacaaaatacagtaattaagaaaattaatcctttatcacaaacttttgtagcagagcacatctctccatatatacaagcattataccgagggtgaatgtgttcctcctcttactttttttttttgagacagagttttgccgggcacagtggctcacgcctgtaatcccagcactttggaaggctgagggggcggatcacgaggtcaatagatggagaccatcctggccaatatggtgaaaccccatctctactaaaaacacaaaaattagctgggcgtagtggtgcgtgcctgtagtcccagctacttgggaggctgaggcaggagaatcacttgaacacgggaggcggaggttgcagtgagccaagatggcaccactgcactccaccctggtgacagagcgagactccgtctcaaaaaaaaaaaaaaaaaaaagagagacggagtttcactcttgttgcccaggatggcatgcagcaacacgatctctgctcactgcaacctctgcctcctgggttcaagtgattctcctgcctcagcctcctgagtagctgggactacaggcacacatcattgtgcccagctactttttgtatttttagtagagacggggtttcaccgtgttggccaggctggtctcgaactcctgacctcaggtgatccacctgcctaggcctcccaaaatgctgggattacaggtgtggtgagccactgcgcctagcccctcctcttactttggggaacatcctactctgtctatggagcagctgttgtttcaccactttactttcttaataaacttgcttatactttgcactgcgactcgccctgaatctttcttgcatgagatccaagaaccctctcttgtggtctggattgggacccctttcctgtaacaaatgcattggctgataggagaataaagaaaaaaaaagaggaaaaactagagtaacttctctacataatcatattatatgaccgttttgttaaccatgataacagttaacaaaataattttcttatgtctaattctcagtccatgtctgtatgtcccaaaatgtctttcacagctggtttgttcaaccattcaatgaaggaccaaacattgcagttggttgttatgtatctagtctctcaatcttgatcttcagaccaccttcagcccatctcaccacatccgtcccaagccctttgagccagccaaccccaacctgccatgtactttacaaaatgctccttttttttccacagtcgactgcttctctgtccctggagctctcccctttattctccaaggtcaccttgagcacatccttctgctccgtgaaatccattctcctctccctttccctccctctgagcttaaccagctgccaccgcaggcttctgcctttcttcacagtgtggccagaactcggttctgcctgctagcagagggcagggccgctgtcttcctctccttgcagcccccaagcctagcacatgcctggcatctagtggcagcacaataaggaacctgatgaatactcctttcttctgctctccgctcctcctccacagcctgccagccatggtcaggaagagcaagatccggaatgggcttggtgtgtcccgcgggaaggccgtgatcctggaagatgcttctcagcccagcccggatctccttcctttagctctagagacttctttcattctttgtgtacacacatacactaagactcaggaagtggttcttgaggcaggaccttaagagcccaaggagtggggccgaggctggaggtgtgggggtgtgacggccggtcctactctccggcctgttcagatcagctccttctggggaccacccctggcacacaagggagggaggcagcttgatccccctagcccgcttccagccctcacctggctttgtcttctgggataagacggggaaatccagaggatgtaagcctctcctgccttcgtgtcttcccccaagccctcgctatcacagacggatgcaggagctgtctgggaggctggaagcacagaccttgtcaatcctcccccagagggcgggacccgacgcggacgtgtcttgattgactgggtagcgtggcttcggggaagggcttcctccccttttctcagactaggatccctggaaaatggagaagctgtgctaatagaggggggccagaaatccccactctagaatgctgtagaatgttgggagacacccaggatgtgagccagggactttctggaagtgtttgttctggccccacccgaccccaggcagtccccagctgtctgcacagtcggatggggagggggcttgcacagagttggagccagaggagagagctggctcatcccctacggtaggatggggaaacctcacagaccacattgtcacccggcctcagctctccgccccggcgctcagagggtaactctcacccacctcgtccgcttctctgaaccagagtgacccaggctgcgctccgccccgctctcctaccccgagttggcacggaggtatagcgccagaggggggccccaggcgccccgaggtcttgcccttgcggctttccctttgcgggggtgggcgccttcttccgggtaggggccacgtggccctggccgggcggggggctcggcccaccccgcgccgggcccagtgactcaggccgcagctgttaccgcgtcacatgagggaggccggcggccactcggcgggggaggggaccgtggctggagcccggggcggggccgcgcggcaggcggggcgggagccggggggcgcagctagagagccccggagccgcggcgggagaggaacgcgcagccagccttgggaagcccaggtgaggccgcggggacccggcggacttcggcgcgggctgggagagaccacccgcagtcccttcctccagggctcgccccaggcccgcggagactcgtccggcgctctccagccgccctggagcaactttgcttcgaagttccctgggcccgggcagggtgtggcgggggtgctggctgcactttttttttttttggtgggcggggaggtcagagcccaggggaaaggggctggggcgggggtcggggttgggctgaagaccgtttctccaggctgggtgttgggtggggaaagggtgtttgacgcccggagactggcgggccgagggtcggcgtcaggctcaagcccctgccggcgcccttggatctgtcctgggccccagaggcggcggggcggggtccgggcttcgcggccgtcgcccccacccctctcctgcgggtaaagagggggctgggagacgtggatccgaccgcgggtttccgggtgggaggggccgggaatcggggccgtgaagggaagccctcgagggccggccgggagcccggaaaccgaggtcccccttcggccagttttaatccccccgccctcccctctgccccaggcccggcagccatggcggtggaaggaggaatgaaatgtgtgaagttcttgctctacgtcctcctgctggccttttgcgtgagtggcgaggggtcctggggggcgcgccggcagggtgcggggagacctggctccacagtggtgagggctgagggaatgagaattaaggcagctggagaccagatgtggaaagaaagccagggaaagacagcgcagccactccctcctccagttttcctggacacctgaggcttgtttccaccgagaatggccatcctgggtgtgcagcaacccctacccccatccctcctggcccttcctgtctggtgacccaaccacttgtgatatggggcagtggggcaaccagccaaccgcctgatgctatcgccatggggcttcccttcgctctcccttctcccctctctccctccccaaccctctcatccctgtccagcccctctccccctttccctcctcccagcgcttgggggtgaggaagggctctgcccacttcaatttgctcctgccctgggctcctggcttgagaggctactgtttgtctagggagggacacatcactcttgctcccttttcctcttcccttctcctggcctaactggccagaggaaccttagtcacagctgatgcgcgcgtgggatgtgcactggaggatagtgagggggcagttctgggagagaattgagctgggagccctggaggcctgtagaaagcattattctaggtcagaaatacgtgtcttgaggtcaaggctttctgggaggtttttgaatttggtcatgtccctgattaaagagccgggaggggatcaggggaggtaggggcaggcaaggatgggtcatccccctaccccacagccaaagaaattccctagaggtgtgagaatctctcttccggatggggtcaagtctgtgtcctaggtgtaccccctgccctccaccatggagggccactgtgttgtggatatggcctaatcctcacctgattttctcttaggcctgtgcagtgggactgattgccgtgggtgt

SEQ ID NO: 5901 - DNA, 6000 bp, Homo sapiens
accaggagtgtgattatacagccactgcctttatttctggctttgcctttgtgatatggtctatcagatgattgataaaatctatctagagtaaggatataagacaaaataaagatactgtaattaaggggaaagggaggctagaggacatggctcagtatccccaagtcttttatttaggatatgggttcagctacttctgacttgacttaaacagtgacaaaataacaatggcttaaacaagatagtttatttctcttcatgtaaaaatttgaatgacaatttagtgaaggtgacaagggcccacgcttctgctaaggtccaggcattcctagagtggtatatgatagatcatatggtataagatagatcacttccatagccacagagtatccagttattaatacaaacaaatgagaagaggaaggggagagcaagtctttctttgtttttagagcacaatccagaagttgaattcctatcttagtcacattaaattggctagagtatcgttacgtagtcagacctagagttgcaaaggagactgaaaaaatgcagtttaatctgaacagccatgtgtccaggtaaaaattctgttattagggaagaaagagagaatgaatattgggaaacactttcaagactcccacaccaaagtactacctaaatattttattcttcctatgtttgtgtgaggtattgaggttttataaatgtgcacataattttgcaattgtatttttatttatattacacagtaagaaaaacagaatgttctatatttatagtcttcctgttacaaatatgcgattagagcttaaagagtcatagtatcagaattagaatgttaatattcccactcaatatactgaggtctcattttcattatggtgggtttactaactgccccatatacttcgcagggctgctttgaagctaaaatgagatcattcatatgggatcacattaagctgctagaaattagaaaatgtacatgagatagtataaattttacagtcactaatttaagtttcttttcattagacgctgttggaagctctgactgtggcagttgttggtaagccgtaactgcatttctatatgttataataactttttaatgtagatagatctttcaggtaaaaaggtatttggggctaaagtttaacatcatggaatatcatatttcagaaatatagcataggacaaataatttctaaagtataagcaaaagttagatatttatcgtttacatatttcagctgagcttagaagtggaaaagaaaaataaaaggaatggagaacagtatttcatttgtttacccatttagaaaaataagacaactatagctaatcttttccctaatttaaagttatcatcaagtaactgagaacatgtgttctgagccacgtactttgatcatatgtatgagcttaactcctttaactggcctgtgccaaactgaactgtgctttaacattatatcctcatattttatcaaatggcactgcaagaaacagtggtaatttctgctctgtatttcatgttaaatatgtgtttgaaggccgtttctgttataattacttgatgtaccctatgtaatgcctcaaataaaaaatttcagtaaattaagaatagaaattctgattgtctcaaaatggttaaccttgagtaccaaaaaggtcagagttaattattactctccataatagcaagttgtttatccttatagttaatatatttaactcttcctactttgtcattagtttttttaacctttctatgccagttttgtttaatctgtatgtttttgtaatctctttttaaaagaatcaatataaataaatagtaataaataataaataggattgaagcttcttaacagagaaaggaagtattattaatatttacttattattaatgttacttactattaaggttatcaaatccatctctcccttctccagcccctactatgtataaagaatgtaggagagagattcatttcaggattattggaattgggggtagaaaaacatagatgaggtaatctgagaacattattttcctcagtaattgcaatatcttttcaacctaatcgtatacttaaattactgacaagaagcaaaatggacttcatgtcttatctttcccatgttcaccttcctaatcctgtaatggcataaacagagaaattccaatcatgtagcatttaatgatagaaagaacatgaataattactcccctgaaaaattaaaaattacttaaatggctttgggttcaaagcagttaacctccaagaggttataactttgcaatttattaaaatgttaaggagttttattacaatagccataattgaatggatgattattctaaaattacagaaaggaatttggcatatattcagtaaaccccaaaataatgtactccaagataatacacatttggatataaagcagttagtggttggtttctgtcctctgcagggtaagtgaatggtaggcaaccccagacagccccaatatttttctttcccaatttccttgatttgggctgataaaccaagtataactaactagatgattgctggatttgctgctactgtccaggaattcccagccaggcaggagacccagaatcatccctattgatatttaaaccataatggacaatcaccacagatggtggtaaactgtgcctgggacagagatggctgagaatcactcccatacctgtagaactccaaactggctacaggcgtgatagctctccagtcatttcattaacttggtaataatgtgacctctgattttgtatgaatgaattttttggagactgttaattgcattatgggtgtggtttcactgtacccatgtagtcaaggatggataagaaatcttttctaattgtttttattggcataaagtacaggagaaaatgaagcatttctataaaatgccagaaaaagctgttttgtattgagcatgtttatatgcatgttaatcagtgttttaattttacagttactttctatgatgtatatattattctgcaagctttcatactgactactacagtattttttggtttgactgtgtatactctacaatctaagaaggatttcagcaaatttggagcagggtaagttgtatatattcttggatataatagatagatgtctttaattattataggtggttttgaggaatgtgctacactgttatttttgggtactgtcttttaaaatggagggtaataagagatcatctctttgagtactagggccaggtcctactcctagaacatacacagaaatggaaagtggctttgacttatttgcttctctcctatagtgaaagggaagtgaattaaaaaaaaaaataagctttccagagagtttaagcttgtatgctttattaacattatggaatttactgaaattacttcagtctttgtcttagcataaatgttaccaagaccatccacgtcttcttggaagaagcgctgtaattagtacaggtattgaaagggtctgcatgaactttaagaccttttgatccatctagattaacctgtatccttcctcaaacaaatatacggaatgatcctttttatattaggattatggtacagcattgccctcacctggtaggaatgcatagactcttttctaagctcacagtggcttcctgttggcacagtcacccaaccgttttctttttcctgttacaacactatttacaaaactctgctcttgctaaactttctttcctcccccaccccttttattctggtaatccagaacaccagaagtctctattgagataaaatatagttggtcagccaacactgacaattgcgcgagctgcttaaatagtttcattagaatggagtttgatttagggagaggtaacattttctattttcttttccttctttggaaggatgtttcatacatatttgtgtggcatatatgatgaaagttttgttctacttcctcttctcaacccaatctccaactgttccctccctttcattaattccagtatcatctctcttaaatccttttctggtaaacttgccttatatttcagcctcttcataataaatttacattgattgatagaaatggtattacagtgatcatatatagatctgagaccagatatttctgaagtgcgtctgtctgtgtctgctgtttctgataattcttatgatattttctttctttaagtgttcagttatttttgactatgtaattgtccttgaaaaactatttgttgaatttctttgaggccttgattgaaggtgcacttttccatacagtatttgggttttcgcctagcatctgggaaaactattggattgggtccacttgaaactaaattcatggcttacgatgttttcccaaccacacaagtgttcttcagttagactacaaatcagcaaagggatagcttgtggtgacaatttcccagggatggttcttctctgcccccaccccgcaatttacccctgcttagtgcattgatgacttttcttgtagttgggcaaattcagctacagtactatgattacttctttgggtttccacttttacctagattttgatttgataattccattctaccttgacagttatttgatgtttttaagaacgtattctttgttttctcttttatgcatcatttcagtagtttttcggggtgggacaggggcagtaattagtctggaatagttcttacttgctgtagtactggaaacggaaccctttcaaaattgcctcttacctgtattactacaaccagcctctctattctccagtcttaacagtttccagcctcttttccaccaagcagttgggtgatacaaaaatggaaacttgattacagtatacctatttaaaaccctaacacttcactactgctcttggtatacagcccagttctccactgaatcacatctactgctattagttactggatattgccatgtaatgactctctagcaaaatcctaataataattatactttggtcagtatgccatagattcagctacttaagagtagcactttattgcattttaaataaaacttaatggcactacttactgtgacgcctcaaagccaaagtggttgtggaagctgagtgccaaaatggatataaagaccgagggaaaagattttctgtgaaaatattttctaaaaagtttataggctgttccttctgacctgtttatgggacataatagggactgaagaagtgcgttaaatgtttggatgtatggtagtatcaggcaatggtggcagtgcttcatagattgacttaaagctgtgatgtttttacaacatcattatcctgtggtaattctgccacaaaaggaattaaatctcagaactacatatgataactgtggcaactggtcattggtgtgctagagttgccttgtgccagcttatgaggcatcttgcaagtcagttgttaaactgctggaagtttaaagtaggccatgaaggatgtatgtacaccacagaaattaagaagcactacaaatcagggctcattttctttcctagaaagtcagtttactggtacatcactgtttgtaagttattttttattctgtgcttcttgttgagagggatgagggtaggatttgtcagtcttctagatggagttgttagaatagcaaaatcagcactatgtccatggtatatcttatctatattctcagaaaatttgctctctttgatgcttaaatatttaatgagatgtgagtcagagtagagtgaactaacaacttaggcagaatatttgtaggacatgactttcaaatctttacctgttacagtatctacagagaatgctgtcataaactgacaagtcttaggctgaatttcttaccagaaacttaccaaatggagcctgtgaccctaaataactgttttagtgtgtgtacacttaggttgctgggtggggcatgctgcttaaccag

SEQ ID NO: 5902 - DNA, 6000 bp, Homo sapiens
atgatccattaaaagaaaagagctccacctgccttcataaacatttgttctctttttgatgtgctttttagggcatactaaataagaggcccatgataagacattaaatgttaagctaagcattgacctaaagtctgaatctgggttcccaatgtggggagaagagtttgggtttaaatgtttgacatattacacttgtacaacattcttgtagcactttgacaagtatactaattatatttctgatggcattatgaaaaatttgtattatctgtgtttaaggaaatatttgtgaatttgaggagggtagctcattctccccacccccataacccaggtttccaaaccttctctgaggaggtcagaggaattagaaaagaaacctagggctgggcacagagctcacacctgtaatcccagcattttgggaaactaagatgggcagattgcttgagcccagaagttcaagaccagcctgggcaataaggcaaaactccatctttacaaaaaatacaaaaattagccgggcatggtggtgagtgcctgtagacccagctattcaggaaggctgaggcggaaggatcacctgagcccacggaggtcaaagctacattgagccatgatcatgccactgcactccagcctgggtgacagaaaccttgtctcaaaaaaataaaaataaaaaagaaacccatttacttgacaatttgcctggggatgtttctgcacagcctcaacctttgctcagccctggtcctaagatctcttttgaagaggtcccatctgaactaaaagtctactcaagtctttcactacttaaggtccaggacttcagctaaggacacctgttatgaggtgaaagtattcatagcttcaactgaaaaaagttctaagtctttcggagaagctcttaaataccagtagatattaatgttgctctgtttcctatcacagtgacagtctacatgacgctgcaccttactgcaccaccccgtactcacccagggaagcagcagaagtcagaatattagtcattagcttcagcagacttattattaacttttctacatggcctttcagactcaggagcaaatttatgtccaagttagctcagttcaagacatagaagcaaaaagctgattatttgtcctgtcttctctttctatctatgcttccaacttctgctagtccccttcaacagtctggctgataatggttaggccccattcatcaactcaaatattaagatatggctgttcacttacctaagtctataatatgctccacatggatctctggcttcagacatcccctctctttcttcttcatccttctactccagatgaactacaccttctcttcttattaatatttaggacaggagctgtcttatgtaggataggccttacttatttcctttacacaaggcaagcagaagcctcacatatgactgaagtcacatgtatttctgattaaagaaaatgaggtaaagggaaaaggaagcaaaggaactcacaggaacactggagttccataacacagcatattcagtatgtttatgaaaagtttatggactccattaactctagcatatgtatacaaagatttcatttgatgaacttcattgatccatgaagtcatatcagcaagaaaactgtccttcaagatcaattccttctttgctggaccttccactaattctcctggttccaagctaccaagttgcaaatgagttgcaatgacaagtgaagatcactatttagccagcatttgcagatggggattctggaactctcagatagatgaagacacccttctgaaataatggtcgattatttacttaatgctggtttaacttgcttttttaacctggcagccaaaacacagtctgctgttggtaacaatggagaaattttattcagtagaattccttttagagagagcactgcacttgtttcaaattaatgtcttgataagacattttgggagtatttttaaaaagcctaacaacccaagtgtccatcaatggatgaatggataaacaaaatgtggtgaagggaaccagaatatgacaccccaaaatatgccactttggcataagaattattttgagctgaagacaatcaagaaacagcagacagaaaacaaaaaacaaacaaacaaacaaacaaaaactctctgccctccccctatctggctaaaagcaggacatgactttccatttttaatggaaaaaccaaagtctgcaaaacagtttaaagagatttttcagagccaacatgaagggccatgacctggagaaaaacaaccttaagtggtcttgagaaagtgcgctcatggccaggcacagtggctcacacctgtaatctcagcactttgggaggccaaagcaggtggatcacttgaggtgaggagttcaagaccagcctggcaaacatggtgaaacactgtctatactaaaaatgcaaaaattagttgggcatggtggtgggcacctgtagtcccagctactcgggaggctgaggcatgagaatcacttgaaccccggaggtagaggctgcagtgagccgagatcattccacagcactccagcctgggcaacagagggagactatgtcaaaaaaaaaaaaaaaaaaatcagagaaagtgtgtccaaagcagtcgggttatagtttggttgtatacatttcaaggagataggaattacagctaaagacataaatcactttatggaagacaatatcggttcagcccaaaaaggcaggacatcctgaggtggggagaagagcacttacaagtcataggtgggttttggggattctttagttggaaattggttgaaaaaattaagctttgtctaaagatttgaagtcggtagaaaggaatgtttaagttaaggaggttcattacccaatacactgggtcagagtgacctgtagggatgtgacttaacccttgtctggcatggtcataggtcctgtttacaatttggtatcttactgtcacaaagagtctgttttgtcagtcttatgatctctattttaacattaatactggtcagttgtgcctaaactccagaagggagggagtataaaaaagtgtgttcaacctcacttgctgtcatggttggaaattcagttcttaaggttttttgtgtctccatggccaagaaggatctgttcagtcagtgtgggcttaggattttatttttaggttatgcgtttataaaggtgtcctctcccttgccaaggaagagaacaactcttaatgcaatcacctgatggatttggtctaccctctgcacagacaaatccaatttactgagattgtggtattgcagtaaagaaagagtttaattaacactaggctggccacatggaagatggagttattactcaaatcagtcttcctgaaggcttggaggttagggtttcttaaggataccttggtgggtaggggactagggaatacgtgttgctgactgactgaggatacaatcatagggttgtggaagatggtcctcatgcactgagtctgcctctgggtgggggccatgggaccggctgagtcatgagtcagtagcgtcggtcagtggccaaaatgcaaaagtctgaaaaacatctcaaaagatcaatcttaagttctacaatcataatgttatctataggagcaataggggaagtcacaaatcttgtgacctctggccacatgactcctgagtagtaagggattatagaaactatattttagcagaatttaggccactcccatagttctaatcttgcggtctttcatcagttttacaaaggtggtttcagctcctgaacaaggaggggatcagttttagggagggattgtcatccttgcttccacattaaactagaaactaaatcccttccatggttagcttcctatgcccaggaatgcgtgaagacagccagtctgtgaggctagaagcaagatggagttggtcatgttagactcctcttgctgtcataatcttcgcaaaggtggtttcattaatcatcgggactcttcatcactggagatgactctagattcttttcagcccaaagacctggagaggaatgtatataacaaaccttactaaaccacccttttcttctatttatttccctatatatttccttcccacaagttaccaccattaggaatcccccttttcctttgtcttgtcaatctctgcaatgtatcaaatgtatcactgtttgtcaaaatgctgtgtcacctcttaggtctaactgcttctctgccccttcacttttctaggaaggcccctgtatatatacatgataaacctttcctcctgctaatctgtcttttgtcagtctaatttgcagggccccagatactgaacctaagaaggtaaaggaaaacatttttttcttcccccacagtggtatatgcataccatgaactattattacttagcatttcaaaggatggaaattctgacatatgctatactatgcatgaaccttgtggacattatgctaagtgaaataagccagttacaataagatgaatactataaaattccactggtgggagtgtctaaaatagtcaaatttatagggacagaaagtagaatggtggttgtcaggcactagggggatggggaaatgagaagttgtgtaatagccatagaagttcagttttgcaaggcgagaatgttctggagattagttatctaggggccaagggaaaagttccccttctccctatgaagtttcactgaaaaatcaactcacaaaaggcagactagtaggagaaataacatacaaatgcatttaatgtgtacatgggaaccttcagaatgaagacagaggaaagtgcacatttttatgcttaggttcaaaaagtatgtagagctgtttagaaatatgactggacaaaagggtatgatgtaactttaacagatggagtgaggaaacccagcaaggcctgtctgtctagattcttcttggcctctctgagcagcatttcttccttctgcgtatgggacaggaccctttctggaatgggggtcttatgacctacaatcaaacaaggtaggtccgatcatttccttatgaccagtttttatacagaatgtaaaccaaaagtatatgagacaggtcccgatcaatgtagaaagtttactttgccaaggttaaggacacacccatgacacagcctcaagaggccctgcctatgtgcctaaggtggtcaggccacgactttgttttatacattttagggaaacatgagacatcaatcaatacatgtaagatgtacattggtttggtccagaaaggtgggaccactcaaagtggggacttccaggtcacagggagatttaaagattttctgatttgcaattggttgaaagagttattatcaatagaaaggaatgtctgggttatgataaaggattgtggagacgaaggttttatcgtgcaggttaagccttcagagagaacagattgtaaatgtttcttatcagacttaaggagtctgttctatcaacaattctaaaaggaagagggtacaatgaggcatgtctggctcccccttcccatcatggcctgagcttgtttttcaggttaactttgggatgcccttgccaagaggaggagtctgttcagatggttggagtacttagaattttatttttggtttacaagaaaggcggatgaaaagtttgataatatttttaggttttatagctggctttcgggaaaaggggttctggtttctaggacccacgtggggaagagggattctagtttctatggctgccctcggggaagagtgggactgagagacaggaggcgagcaggagaaggtcagagaaaaccttttgcttctcaggctgcttctgaggccttcattttagggtgttgttttccatgtcccaacagtgacacaacagtgtgaatgtacttaaaactactgaactgtaggtttaaaaatggttatgatggtaaattctgtgtt

SEQ ID NO: 5903 - DNA, 6000 bp, Homo sapiens
gaatttactattgagccggttcgaagtaaaactcagaaaaggatttgccatcttgtagttgtttttaattgacacatttccctgattgctatgctttcttctaataaatacctgaggtttgcataacaaaactacctcctaggaggaaaggtatcaaactggccttatgtctaacatgtgttaagtttgctacatgttgatcctttttgcttaagtattcacagttaattttttttgtttgtttgtttttgtttttgagatggagtctcactctgtcacccaggctggaatgcagtggtgcgatctcacttaatttttaatgagaagttatatatatcaaaatatgcatattatatattataaaggtcaccaattcacttaagtaatacattctaaaattgttcttctaagtcatctatgtagttttcttataagcaaagagctcagtaaaatttattaaaaaaaaaattaaagccaagatctcattaactctcctgaatgtaaaatgatatcaagtacagggtttagggtataatctgagactttgttcagaatttgaataactccttctcatgaactagtactggaaggcctattaaaatacagagggctccattattgagctctatccccagcatttctgattcctaggtctgtggtgaggctggtaagtttacatttctagcaagttctcagatgacgataatttgagagctacactttgagaaccactgttctaacgggtactgcctccctcctccttctccttttcctcctttcatcttccctctcttcacttttcccacctttttctctttgtcttcaaaatgaatcttttcttctttgtcattcctttgctcttccctcttttttctcttctctttcccctcttcccttccaggatagtatttaagattctaaacattcattctaaacatggtccagcaggaccaacaggaccatgtttagaaggacttgtttaggatatttattcatgtaacaatatttactaagctgacatgaagattcagcaaatgttggttgagactctatgaaaatccctgtgcaagaagagcaggacagacaaagattctgctctaacagaatcctccatatgaccgggaaaggtagacagcacacaaatacataaatgattagattattaccaaaagtcattgctctgaattaaatggccactgagatgaagaataataaagacataatttttccttgtgaggtcagaaagggactggccccttagaggtgtgctgaagctgaaacctaaaggacgagagaaagattgccaaacagagagcctggggaggagtggctgaagaagaggaaatgacaggcacaagagctctagggcaagtcagttccataggcacgggatggggagcagagcctccaaaacctataccagagcctggcacacaataggtggctagtcagtgttcgctgaatgaaagtaaatgaattatcagacccaagcaagtggagaataggaggcaagcaggagggaggaaagaaatgggcagaggccaggtaatgaggggccggggtaaggaccatgaccttttaggtcatgggtgatgggagtgtggattaacctaaccagtctactctgccctcccctcatccatccaacaccactgcccctcatccccatgtccagttcaaacccctgtccaaagtaacggttctcaaacagtggctcccagaccccttgatgacccattgtattattcaacatctatgttcataatgtgacaagattcatacttttagccatgaactcataattaataactttttttgagagaaggttttcactctgttgccgaggctggagtgcagtggcacaatctgggcttatggcaacctctgcgtcctggggttaagcaatcctcctgctgcagcctcctgagtagctgggattacaggcacgcaccacagcatccagctaatttttgtattttttgtagagacagggtttctccatgttatccaggctggtctcaaactcctggactcaagtgatctacctgcctcagcctcccaaagtgctatgattacaggtgtgagccaccgcacctggccaattaatgtttttaaattgctatgactttttttttttaagacagctgcttgttcactcatgtttaatcaaaagcagccccacccttcccatgtagtctgggaaaggtttcctggtggcaaggaagaaagcttgtcccctgaaatggtacagagtggctgattccaaatttctggaatgcaacttctaattcaaatagtgtccttatgtaggacaagcaggctcaagagaagttgaggaattccaaacaaagatgagaacaaaaaccaaaatgaaccaatttatttatactttgtccagtagtttcaaataaactcctcatagaaaagatgatatctggaagcttttttcagtcctatacttccttgaatatattacagttttcttggatttctcatgttaagttttgtacttttaaaaggaaaaatgttatcggtaaaagcctgagtttaaactcttcctcttgtttcatagtatgctcatgtttatgggtcatttaggactcactaatcatttgggagctctgctgtcagccttaaggttctgctagcacattaaagtttgcaaaggtagtttaatgtagttgtgatattatttattcataatagctgtgtggtgtatttagagtaggtattattccaatgttacagttgaggaaagtacattgttatctaaatacagcaagagaagaaaaacataatgttgcaaaggaataaaactgggaaaaggctcctataaaggctgagggcagccagagcctgtaagaaggcttgcagtatctgtggagagcaggaggggacccctgccactgatgaggctgacaggtatgccaggctgtgaagagccactgaacttgggcacaaaatacagagtaaaagttctttactcttcaggtgacctaggcagagaaatagggagtttttttgttcccagaaatacacagatgttctaggtttgaccttctttgagtgtttgttaacttgaaaggatttgaaatctctggtctggctgtagattaaaagtctgtagaatctctcgaggggaagaaacttcgttttttcattaagaggtatttttaaaagcatgttttctaaaagaattgaagcaggccaggcacggtggcacacgcctgtaatcccagcactttgggaggccaaggcgggtcgatcacttgaggtcaggagttcaaggccagcctggtcaacgtggtgaaaccctgtctctattaaaaatacacacacacaaaaaaaattagctgggtgtagtggcacacgcctgtaatcccagctacacggaaggctgaggcttaagaattgcttgaacccgggaggcagaggttgcagtgagctgaaatcgcaccactgtactccaacctgggtgacagagtgagactctgactcaaaaataaataaataaataaatagaattgaaacaattttcacttttttcttttttcttgttttaactttcctcaaagtagacacagtagatatagtagacaataacatagctttatgtatagcctatttgaaaaagaaaggaatatgccatccttcccgctgatttgaaaattagaatgtggaatttcatttcttttggcagttgttagggatggtgctccaaaaaagcaataaaaaattataaaacttgttgcaatattttgcttttctcacttgtgtacaattaaatatttttgctctttagttattgggagcttttctaaaatcagttttcagataaataaccgtttgggtactgaagcagttgctaaagggcatacagttagggctgaacgctgaataaatgccattttttttttaacttgtggagagctgactatcaacagtagtttccacaaatgagagtttacatggctgtcttcttttggctggacaattagggatgaaatggctttaactactggatgataaaactgttagctgtgggttgaacacttggtagtgattatatttgtcgttagcgctatttacataagatttagggaggatacaaacctatacaagagaaaagggaaagtgattgggagaaaagaatggtcaagctgacaatccttttggggtctttttctcttgctagtgtcaggggatgccaccgggacaaatgaatgctttgaagtgagaagggcaaaagctctctaataaaagacttcaggaaagagtgcaggcgacctggggaaatatgctgcggtcaagtttaatcctgggaaaaagtggtcctggagaaagcagatgaggaagataggaaggaagatagggagggggagacgctgggtgtggagggaggaaaggggcgggggtgggggcctggaaagtgacagggagcaagcactaattgtggctaaggcgactgggtcgagaaccacagactggggaaaagggagagtacgggaggaggaggaggcagagccccgcggagccggaccggacccctggccgggaaggtatcggcgcggggcagcgggggcagcttggcccacatcgggccccttggcaggctcaggcgttggctcctcggggctccctccctcgccggcgcattgttcctttgccgggagacgaggaaattgccttttgattgcggaagtcagcggacggggctggggcgaggcagcgcgggtcagaatggcagcgtgggaagggcggcgcgctgcctgtccccgccgcctctcgcgtccgcagcccgcccggggcggcaggagcagcagcagcagcggtggccgcagtggcccctgcgcgtcgccagccccgagggaagcgcgctgcgcccacggggcgcgctgagcgcgcgcaacaggtgaccccctgccccggccctcgggccgtcccacgtccagccccctcggtctcctctggatcttaactactgagcgcaatgctgagccatggagccgggttggccttgtggatcacactgagcctgctgcaggtgagtggcccgagaaggggtcagagctgatgcgccccctccccgccgaaaaccaaattcccactccactttctcgtctatcgggttgtgctttgaagagggaggtggcaaaatttcttcttctgccttgggaagaatgatcctctggtgagccccccaacccagaatgacagcttatccagctgtcaaagcaaaaagccaccttctctctccagctgctctcaagggacagcagctagggagaaagttgccatccacctcccctgcaagcctcttctctggccagagggcaaaaggactggctgaggcaagggacaaaggataagtagaggagaaagtgtggcttgaggagcttgctgtggacatgtccctgagcagtccagactgtggacttaaactgttgtgtctgattcctttgcagactggactggcggagccagagagatgtaacttcaccctggcggagtccaaggcctccagccattctgtgtctatccagtggagaattttgggctcaccctgtaactttagcctcatctatagcagtgacaccctgggggccgcgttgtgccctacctttcggatagacaacaccacatacggatgtaaccttcaagatttacaagcaggaaccatctataacttcaggattatttctctggatgaagagagaacagtggtcttgcaaacaggtaaaggatgacaggtgcaattggatggccaagccacacggggttgggccctgccttttcaagctggtgtttcatttgagttccagggatacaaaaaatgaaggtaaaaatacctgtgaagataaatattgacagaaatgtctggtttcctcggatctagccagaagcagcttggtggactttcagagactcccttagtgctgaaaacagccaactagctactgaaagggtcggggtggggtgcagggcggtcagcaaagagaa

SEQ ID NO: 5904 - DNA, 6000 bp, Homo sapiens
cttgtgacatgtcatttgatctgtgtcttcattgccttcatttagtgcctggcatgcaatgggcacacaacaaaactgagtcaacaaatagtcatgctgggcgcgttggctcaagcctgtaatcccagcactttgggaggtcaagagaagaggattggttgaggccaggagtttgagaccaacctgagcaacatagcaagactctgactttacaaaaaaagttaaaaattagctgggcatggtggtgtgtaactgtggtcccagctacttgggaggctgaggcaggaggatcacctgagcccaggaatttacggttgtaatgagctatgatgaggccactgcactccagcctgggtggagtcccaaaacaaacagacaacaacaacaacaacaacaagagcaaatagccaagtactgtgctagctaatatctaaagccagaaaaataaataaacaagaaaacaaacaataaatgatgtttgttctcaatgaatttatgcactaatagggcaaatacgacacaaagagataataagaatatagttctatgaataaagttactacactgtgccatgggtgccttggagaagagaccccttatgctttagagaggccagaggagagggtcaggaggaggtgaaccaccaggcccctcccagccttgcccacgtctgaatctgaagcagttccgcttgtgcacaaagccaaaccccattcccacagtcaaggccctacacggactgactggtacacatcttgcctaggacaattctttaaattttagaaagaccgttggataaatgtatcctgcttcccataagcttttagagaatcatgtaaacggccttccctgttgctttattctcagtttaaaagccattctgaaggctttaagaatagagcaacttactgagtcactcagatttgcaaaccaaaagaagctccctatacaaaaagagctggctttaaagcaagtacctgggcatcctccaatataccccagtccagtgaaggtgaggtacttagcttaatggcctctcacagagctactagctcacaatagactacatttgaataaggaaagtgttttgatgataaatgtgatagattctcataaaattgttggaatctagaaatctagaatttagaaaatatgcattacagaagatgaggaagtatttgaatcagatataaggagcatatcatgaaggacagagggattatttgaaccttttgtttgagtactcctagaaggggccaggcattaccctttgacctttgaccagaatctctaaatgcagaaacagggaaaagctgtctgtagtgagcaggcaccccagtggggaggtgcttggtacagatacaacctaaagaagccctgcaaaaatattgattgatagttgcttaaaactggtaaatgctattctgtgagttttcttacaactttattcattttttctgtggttaatcttttataacaacttatacctcaacccattttttcacattttaatcttaaaattataacatgttatggcaacatattcattaacagaaaaaaaggatcactggtattttggcttttcatcctttgcatgaattatagaacatcgtgaatgatgtctcaaagcatctattcctaaacttacgttaattactttcatggaaggatatggttttttattgttttttcatatgcttgattttttaaattgaaaatgactcttcagaaacaaaaaaacccaactagaaaactgttcttgtttagtcatttgttttcatttgtaatctgtttcttaaaggaaaagacattatttcctttatatatttgtatatgatatctagaacattataggcactcatatagataaaactagacctcctcttgcctaataagtaaaatcccaggaaaataaaattaaatgtttttacaaaatgaattaaatacctattaaaacggtaagttctgtgttgacatttttaaaaatgattcaggaattttgttgttgttcaattgcaaattactccagtttccaaatcttatatttcaaaggagaaagtgaccttctttaaataaaagtccaatgtgctaactgataccttcatgaaatatttacaaagaaaaaaagccattacatacaaatgtaaacaataatgtgtgagtttaatgattattccttcaaactaggaacactagcaggtagtcttgtctaaattagtgtagacctagccatacagtgctgaggagacatacaatcaatattaacctgtattcgaccattcagaacaattgctcacattgtgcacagtacagtggaagcttggcatttatccaacaaagccatattgttataggatacatctcatttatctgccaagtcaatcaaattaaccagatactttgtaacatttgcacttcattcttattctgtgtacttcctctctcttaaagaggtgtatctcctagatcctctgtatctctgaatcgtctctcctagcatttgggatctccttctgcatctgagatcagaattgattaaaatatttaaaaagaaaggacaaaagaaagaagaatgagctatagtgcatcaaattattaaacaggatatagagaagccattgttaactatacagaaaactgaccaaattttaaataatagaacaaaacccatcagcttctttcactgcaactaagttaaagggcaaagaaatgtagctatgaaataataaaacataaagatgatatagtggcattggcttgacccaacaacagagcctctgaattattcaactctcggccacctgacaaaatataaaaagcatggggttaaccctatgcaaaggttagattgaagattcttgtgaattatagtcttttgatttgtgagctcttaactacaaacttgtccatttattaccctgcccttatcaagttttttagatctctgtacaaatatagtagtgttcagcaggagtagcatgactcagaaagaaatctatttaccaagaaagtgcagtgactaagttctaggagtttaaaacgtgtctttctaactgggagtgggggatgggagggtgggagttaattctttcatcattactgcttcagttaaaaaagaaaacaaaacaggtttgtcttaagcagaaaggaacatgttgatattctaggagttgtagaactacagcaagaaaaaaaaatgaaccaaatcgggttaggaacacaaaatctctttccacccacctaaccacccctttttatccaaattttacatgggcttaagctcaactccttatacttaaatttgacaaatttatgctgcctacttgaaggcttaactagtttgcttttatagcaaacaatggatgctattttgttgcctgtaaaaaattcatttccatatttatacctgatttctgcaagagttttctattagtttccagctatgcttatagagacattggaatttaaaaaaacgatatggctgacgtcaaagaggtgaaagaaaatttgtcgcttgaacccaaagttgttttgcagcagggtacttggtttctaatcatttatcaatcaagtgttttcagattctccatcgatttatcatttatatatctttaaaatacatatctaaatcatttcttgtatctatgcatctatctatgtcttagaaagtaggccagatactattctactataattagtgagcacatcgctgttttacaagtaaagaaaatagaatcctgattacgttagcatttaataaaggctttctccaaataatttttgtaatcacaattgaactcaaaaatcttttctgttcagccttgcttatcttcccaccaaaacacacttgcattccagaatgaaagttctcataaaatatttttcaaggtaaattttttgtctgatttataaatgttgggtatattttattttttaaaagccttaaaaataaattagcaatgatttcaaagttcagacacctacaagacgtgttttactccaggccttcttaatcactggaaacaataaccaaggacagacatgtactctcactaaagggaataaaaaggcacccttcaacaaaatgaaattttagatgagttaaagcatttgacttgatttagcctttatatgtttttcccaatcatggactatttggtttcaagttagtttcgttaactataaatctatactgtcactaaattatacaactgaattttaatctaagaatggattttagtcaatgtgcttctttaaaaaaattaataaaataaaattaatagagtcatgcacactttattcatgcttcttctctgctcttccacccccaaagtggaacaaaaatgatacaaataaagataaacctgtgtattctaccttttattgacaaataattctgaactttttaatgttccgtattactttagaaaaatatgtgatattctaacaatatgtattcttgagatgatattttagtcaggttttgacagcagagactctatttgaaaaaaaaaaaagatgtgattaaaagaaagaaggaaataatgctggcattgttgctgtatttattaatgcaccacaagcttttgtttgcacttgtttcacttttgtttaaaagtaaagaggtagtacagcacgtaatccagggtgctgatgttgtgggaggggacttaaaacagagtaaggaaatcagaaacaatttcctccacacagaaaagaacagaactctcttacctatgaaccaggtagtttccaagagagacgctgagggatgtttagaaagcctgggacctgcagatgccatgtcaggcacgcttgctcctgcataggagactaaataatctcgatatataaggatggcagtctgttgtcttagatcagtttgagaagcagctctggcagcggggggtgtaggtgtgttgcactacactgaatggaataaggctaaaaatatgtttagtgtctgataagaacgccagttttctcaagctctcatttaacgtcggactttctgttttgcttttaaagaaaaatgttttacaagggcagcatgaagcggacaaaatctggagcaaagaaggattttatgctgttgtcatttttctcagcatctttgttattatagtaacgtgtttgatggtaagtttgcttctttgtatattttatcctttgctcagcccactgcttgatattagtgggtacattgccattcaaatgaatgttaaaatgcttccgagcagaaggaagactatgatcctgctagattaggaatatttcatatctgacatcagagcgattgctaaaggagagcttatggaattaaggatgctgacctgaataataaggctgtaattgcaatgcagtttttagtaacttgatcaactctgagaatgaagctttagacagtgatttactgaggtcactgaagccctcaaagtcagtaaagtctcacgggcacactttgggtttactttatttctccttttatatcatctttatggaactcaggaaaaaatttaaaaagagatatgtctttgagacaagattactccctaaggaatggttgatttccttatttttaaaaggacttgaaagcattctatgaaaaggagatgattataccctcaaaggctaagttaggtagactactaattcatttttaaggtggataaatagtacaaaagtataaatgtatatgctggaatagctctgtaagtaataatgtgtagcctttaaaagcatgtttctaattttaaaaatagaacccaaaacaaacttaacccactaaattaagcagtactatttggcattgaatgaactaacggtatctttagggtagaataagatgtttctactcatttgaaaatttcaagatgtaatataataattagagtttacaaataggttttaatgtcctttttccctgtgagctatgttctttttaattttgtacatttaaataaatacttcttccttagtttttaagtgccccccaaaagt

SEQ ID NO: 5905 - DNA, 6000 bp, Homo sapiens
gacaagaaaaattgtttctgtggtagtaagaaaatggatatataaaaagatgtctactaaatttgtaatattggccctaaactatataatgtaatgctcacattattggaaaattgaaaactgcattttgctctggaattccctgaaaaaatatttctggtattagggcttcataaattgtgttcctgaaaagaaaaatgggccaaaacatttcagcaccaattaaaatgattacaaggcataagtataaattggaaagcctgttttcttgggttgctgtaaactggccctgaagataacttcaaaggaaatccaaaaatattttgagcaatggaaatacttgaaataagcttacagtaagcttacctaataagaggtactattatcattcctaacgtcacaagttgccccaccacaaggggggtattgactgagtaaagtatttagtatctttgtggggcctatgactgagtgaagtatttagtgccgaacacttaggaaacacaatacaactatcagttattatgactattgctattacaataataaagtaatttatacatgtaaatcatggcatgtgttaaaataaacaactcattgcatcatttaaactgaacacaattcagctgtatttcaaatggggctggacaataattgtggccagtggccttgtgttgtttgtacttgcggactagtagttctcacctgtctttctctgactcctattagccactgggatttcagcagctggttcagccaattctactcaattcaacattactggtatttactgaactcccttaagagccaggcattggtatgggcacttggggtataaagtggaaaatgccctaccctggaggagctcacagccaaagaagaagaataagccctgaaggaaagagcccaccatgaaaccctagggtgttattccatctgactttcaggaagttgtttacacggtcaggagttggttcctttgcatactctccaagtaaatctcagcgtctccaattccagacttaaacattaaaaagagaagtaatacatgaggatatacggaagcacttctgcttatgaaacatcttttgaatagttttccactaatgctaacatcctgttaagagccttttagcattaccactagatacattattccatttcttgaaatcaaatgactaacgtttttctccgttccagtttcaagccaggcattcccattgggcttaatccattaaacagaaaaatgccacagattttaggaacggacctgcttcccaccatataacttatggataacaaaatcagttttgaattatgagaatttaattaaaaattccacattatagactatgaaatgtctccttttggcatagagttccataggtgaaattgggcatgtagttggttatttacaatggttaaattaaagtgtggattaaagctgacagatctgggaatgaaagagttgcagtgggctagaactcatgggccgatttaacaagtgaaattctaccaagatacatcaaaaatagcaacaggactagatactcagctcattttgttttatttgtaatataccagttgtggctttagtgccagtctgattcatctctctactacaaaatgaggctctataaaggaaaatattgcaactggagtgaggaatttgaatcttataggaaggaatttgtcttctcatgaagacttcagtttaccagaagtatctattgaggaagtgtttacaagaaaatgtgccatttagctttattctaaatttgcataataactgaaccaaacaaaaacattacttcacaaaattgctcattggacaacccactactgtttttcatttctgtcttatggcctgtgatttagatcattcagaaacatacttaaatttgtagctaaaatgacttaaatccatgaatttgatagaagaaatataaaaaaatgctttgctaaggtaagtcaaaattaagtatcagttataaaattataaatattctataatgtctttaattttgatagctttattgggttaattgtttggtctgaaatttctatgcctttgatagatatatattttgaaaactgaaaacaataaaatagttcagataaaatacttaactctcagaaatcatagaccagttttgtgtttctaaacttctttaaacacacccaagtgtgactggtctattatcaaaacatgatgttgtttaactacacaggctatttcttgattccgatcttctaactcatttatgattgctaccttttgttgctacatcagaactcctttactttgaggaaaatgcataaggaagaaagaaaaaaactgaagatcatgtttattatatgtaaaaattcattcttgtcacaccaactctgccatgcatatgttaaatatattcagtaaatatttattttaaatttatgccacaaaattgtttgaatgagctcactactttaaaaaattacttagactaattatcagttagttttaataattcaccctataacaaaaacactatggaaaaaatccccaggaatcctggagaaaaagaaagaacttcattaaaatgaagaaaatttactggcatcattatattttaaacaattctaaaagtacattttagagcaaactgtataatgtttgtaattgatctaaatgttaaggctgttataagagttactatttttgtaatcatttctaaagtacattttcttttatttaagataagagaagcagaactatattaactcattttcaaagaagatcctaaaaaggatctttcatcttgaaactgcatcttaaacacttaaaacacatttatgatattaaggcggtgcctgatttaactaattgtggcttttgttccattcttattaacattagttttaggagttatgtgtaaaattaaattttgtttcaaagttacatatgaaaaagtaaccaaactacatataattaaaaaaaaaaatcttttctcttggtccctttggtttatataacatacatttgcttgtggatgaaatgtgaatgcctttaaggaacagcaaagaaaaattcagttttctttttaaaataaaatagctgttctggaccaataaagaaaagtatatttattatattaggatcttcattaggattcagttttctatctgaatgtcacactaactagacagacacatcaaagtagcagagaggagtttacttttaagaccctattaataaaaatgtccacatttgatgcattaaaataacttacctatactaagattagatgttagaactactttatttaggacagatcacaactggtattaaatgttgtaaaccattattgtctgcttttatatctcaaccttggtgcgttccttattttctgctaagtaaactttattagcccctgttagtaaaatcagagcccataaccacttgctggggcagcagggggagagaagagatgaagactgagatttttccagcgttttcactcggtttattggtccagttaaagacctactgtggaaggcagctcagtaagaaaagagaatcaatattaatatttgcactggcttaaaattttgcttttctgggaaaaaaagattacaaaatggcacataaatagtgtttgcattctgtgaagagatgtaggaaactttctttacctacaagtctgactagccagctctcagattgtggtaaatgtgtacagctacttgccaaatgtgtacagctggaacttgccatcatcaatctgtttgaagaaaaggaaatgcttgttctttttttgaaggggattgggtgataacattttgactaaataaatgatgataacctcttacaaataataaaagatagtagttctggctttttaccacatcagtcttggtacactgcaactttttcatcaaggcttaatttctactgggccccagtggagtggagctataactttgtgttccctttcaacatcaaagggaagttattccttcaaataagaaaatcagtagaacacatactcatttatttgaatatgaataaatcaaaattcctcttttatgttttggctgcacaagtgaagacagaaatggtcagagaatactaggtgtaaccaaaagagggcatcatctacccttaatgtctgcacagcgttcctctggttgtaagaaaccaacaaagcccccaaaccctcaatacctgctcaaagggcatcccatgggccctggcattttttagtatatagggacaccaaattatgaaatcacacattataaagaacaccacattgcttatttacttcaggactgacttctatattcagcactcatattccctgaactgtgttgcattagaaataagtatttaacatttactgtatcactttttacagatactctgagtttaatatttcacagggcactgggaaaatgtcttcttaggccagggtacaggctgtcatcacatgagaataatatggcacttaatttcctaatagtatcttaacttcaagaggttatctataatatagatagatagattgttctatctatagatagatagggaacattggcagtaggtggcagtaagttcccctgagcacatggaggacacagttaaatgcatttgaggtatgtgggaaatggtttaaagcagaattttatgccaacttttagtaacggaagcctaacaaatgtttgttctttcaagtgagagaagcaagcaatctggaactattcataagcttattttctgtatccttaaacatattttataatgaatgtatgatttaaatagtaagttaagtgtctgggggtactgcacacctcccttgcatacagtcaaacttcttcagggtgatggggaagaggagttataggctgccaagcaaaattgccaaactggtctcagaaattcactgcattggagagcgcgggatccttgcaacactgactttagcagttaaactagagtggttggggatgagtattctgctttgtagtagagatagctgttcaggaggaggaaatgtgaattctgagagcgtgatcatttaggagagatttccattcctggaacgatatcactaccacatgcacgagtgcaattgaagggaaacctggtggggaaacagttttaacattctttcaggtaaaaaagaaaaagcagtcaaaatagctttatggtagaggaggaggcgacctgccatctaccaatcctaaaatctagcagaatggtacctttctttaaagacaatattaaagcaagtaaaagatgtttttttcttcctcactctgtctccagaaaaagaatcactacctagtggaaaatgttgtgcaagcctcttcatgtttcttccctccagaaaacaactaaacagatggaagaactggttcacaaacatcccaactctctcctgccaaggtacatcagagaagccgaaaactgggactgcatgggcttggggtgggctcgctgcaatgtcttgatctaaaacctaaatgtttcaccttgtggtaaggagcacctgtttcccagagtggcctagaacctggcctctctgctggaaggaatgaagccccagatgctttgcacgggggtggagagagtagtcgccttggtctccgagaatagggttcctcctgggtcaccgcgttcacccaactacctgttaccttcgggcctgggttttccacagaaaaaattacgcaatgagccgccgcctcagggctttggaagttgcagtggggagagaaggggtgggagaatcccccagggatgatagagagcttcaggtctccctttgggtgtcggtgccgctgtttaccagcccaacagccttcagcccacttcccctttcctccccgggggaagagatggttaaagattacacagcggccgcgggcacttcaaagggcggcgcgggcagccaaaggtaaagataacgttctggcagctctaatcggggtttgtggttgccacattttaatcac

SEQ ID NO: 5906 - DNA, 6000 bp, Homo sapiens
caacctccatctcccaggttaaaacgattctcctgcctcagcctcccaagtaactgggattacaggtgcccgccaccacgcccagctattttttgtatttttagtagagacggggtttcaccatgttggccaggatggtctcagattcctgacctcatgatctgcccacctaggcctcccaaagtgctaggattacaagtgtgaggcaccatgcccagcccatatatttttaagtaaaaataatttgagaagaatggagatttattacaaggattaaaacattgcactttcactacatttatgaggaatattaagtatttgagctagttttgacctctatgcaaggcaatatggtatgacagaagttaggatggttatcagaggatatggaacatggtcctgtttctgccaattattaactacttgagttgaggctgagacttttttctcatttgacaataaaaactaccaattagtagatgcctaaaatgtgtcagaaatatttctaaggccttacaggccttttgtcatttaatactcatagctagtatagtgtcatcaaaaactaaggctgaaggagttgtgcagctttctccaggtgagacatctagtgaatgacacccagaagataaattctattttatttgtctccaaggcctgtgtaattaaccactgtaaagaatgcttagcaagaacgtatgaaattgagaaaaatatatatcagatactgtttttctttttgaattcacagtacataatacaaatgttagttattgtaaagagggcagatatgtaggttcatattattactttttgagcaaaagaaatttagagtattaatcagtaataccaaaccattcccaaatttcatagcttaactatagtcttttatttagctcgtgattctgtagggcagtgcatttgggctggacagctctagacagatgaataagaggaaggaagacagttttctacttttggaaaccagctggctatcatatgggggcagaaatgagaagtttagctgttttgagatacaacttattaattttatggataatcctctattatgtcctctgagttggctcctaataccatttcttattgtacggaaagtgtgtgtgtgtgtgtgtgtgtgtgtgtgtgtgtgcatgactgtcatatatgtctttcatcatgaggtcaactagttaagacttattttcatagtatcaggatacagttccaagaaagagagaggaaggtagagagagagagagagcaagaatgtagaagcatactagaccatttgaagcctgggtttggaactggtacataatcacttccattccattctattggccaaagtaggttacaaagtcagcacagattcaagagctggagaaacagacttgaagggagaagttgcaaagtcacattataaagggccaaatctgtagggagcaatgaaaaattgtggccattctttaatctactgcagaaaaattttgtttgtggatatattactttttgagagtgaacaatatattttttttaattatactttaagttttagggtacatgtgcacattgtgcaggttagttacatatgtatacatgagccatgctggtgcgctgcacccactaactcgtcatctagcattaggtatatctcccgatgctatccctcccccctccccccaccccacaacagtccccagagtgtgatattccccttcctgtgtccatgtgatctcgttcaattcccacctatgggtgagaatatgcggtgtttggttttttgttcttgcgatagtttactgagaatgatgagagtgaacaatattttaaaaatcctcacattagactttagaagaattaagttgttcaaatgctagacttttgcaagtatgtcattctgacagtcacagtgtggcttcatgagatcaatccacgtttctgatggtgacgtagtgcttagtttctgtagcctttctgtgatgctgactcaagaattataaagcaagcagcatttcagttgcttccctgcaaggggtaatgtccgtacagttttctaaatccttgctccacacagaccacaaaggaaaccacaaatgtttttccccctcagttttccattgccatatttcaaagctttgctttcttttcacttttatctgacttttacagcaggttcagtaaagttcattggctggaggggttttctgttctctcctgtcttatataatggagcctggatatttgttttaggttcttcccctgttctattgaccagcaaaaaataaaagagactgtattttattccttgctttgtgtatcaattctgcattgacatgcacatctcatccttttatctttccacattcttattttcaaacttttctgacatgttctctatataattctttttgaatcacaagaaaagtctgagttcttctgaacgatgatcctcttgtcaatgtgattatttctagatagcttatataatataaccttacacccaaactgattcattagatctttgtctttccattttcctccccatgagtactttgcattatcttttcctttctttttgttttctctgtagttgtcttataatgcaactaatattatgagactaaaggttttcattactgattcctatcatctgtatgagttatctttttacagtcttgcaatttaatgtgaacattctctctatttaaattaaaagggggtaatttatgtgaagcatttttaacatagtaggatctcagtaaatacctattattataaatgcttctgttgctattacagttgttaatttattctaaagcaaaccacattcccccttttacctactgaatttacattaagcaatatatgataccatctagacaatggaagaatgactgttagaaggtgaatatactttttctttgtaatttttctggcaattgaaatttattatcattattatttttggaaatacctcagtgattgataattgtacaaaattaaaataattttcttcacattaaagccttatacatttttgtgtgtgttagtaactcacatgctgggtacacattgtctttacacatttactgtaaaattgtcagtaatttaaaaaataaatgtatatattacatcttttgcatttattttctagacatcaatgaccttccaaagaccttttggttctctactttgttaacctatttaatgtgtcataacagatagacgtttatttggtgaattcacattttactacctgtcttatcactctctatattgctaaaattttcttattaataactcacaaatcttgctttttctaagccatagtatcatatcaatacctgtttatcaaagaaatcttcttccacagaggacctggtgttttccttactgggtggacttcaattctaacaaactatgcctgtagaatagtgtctgccttccttctttttctttctttctttctttctttctttctttctttctttctttctttctttcttctttctttctttctttcatggaatatgcacacagatacacacatgtgcacgcacacacacacacacacacacgatctgtttggtgatgaggcctgttataggttgaatagtgccccttcccctcataaaaattgtattggagtcctaactttcagtacttcagaatgtaaccttgtatggagatagaatctttatagagatagtgaagttgaaatggggtcatttatggcgggccccaatctaatataactgatatccttataaaaagaggatgtttggacacagagacagatatgcatggagagaaaatagtcagaagaggcacagggagaagatgcccatctacaagccaaggagagaggactggaacatattcttcctccacaaccctcagaagaagccaaccctaacaacaccttaattttgtatttgaaactggcagaaccatgagacaatacatttctgctgttaagccacccagtttgtcatactttcttatggcagccctagcaaactaatacaaggggcaatgaaaacttgagaaagggtgaaattggcttattaaaaaattacttggatacttgggtatctgtggattttctcttcagcttcagacaaaaagaaaccctggagcttgtactttgtaaagcactatcttcctgggataaacttctaaaacttgttttgctttagataaccgtggtgtggtggctggagactgacatttgatttgaaaaagcaagccagagctatgcataagacataaaaaacaatatttactgtcacctgttagtagacctctctctccggccaactgtcattgagaaaaaaaaaatgcaattggttttagattctctcacttgttgggaggggtggggcatagcgaggggtggggggagagagagggtgtggagagtggggtgtaaataaggcaggcagaagctccagagagggtggagacagagcttcacggaagaaaaatatgtgaacctggttggtacacatagcttctccagacccacccacccactctttcctgagccctgtgcttcggatggcggcgggaggttgatggcgagtggtgctgaagggacagctccagcagtggctgatttgggggagaaacaaaatctgcagatggaatccgagcagggcgacttcaccttcaagtggtgagctctcctgacctgcggccagtctccactccattcacggccagccgatctgcccgctcccggaggggtcgggcagtgccggctggacccgccccgagctccatggtttgcccaaccctgcgcgatggtgactctgggcgcggaggttggcgactggcaaatccgcagatcacagaatgaaggcggggagcgcggccggcggccggcgggggctttctcccccaccccagcgcccagggaagcggctcaaccacctgaatccggaaaacgccaacaagtagtttctcgtcggagaagggcggctcacctgggcgccaagactcagtcccgctgcccagagaacctcgtccactcggaaaccaaagcagaaccacttttctctcggtctcgttaaggtatctggaaatgggggcgggggtggtgaaaggggcgatttcctggaaagggcatgttgaccctgcaggccagcatccccccgctccgcctttccgcaataggaatgtagagatgaagccctggggagaggtggctgggaggctggaaacagggacactgtcagcgagactttcagctcagggacccagggggtgtgcctccaagcagcttttccccgagcctcgcccctcctagaaagcaaatcccccaccctccacccactaagggatttgtttttcttgggaagggggatgggtgggatgcattgatcacttctattcttaaagatggatcttagttagttgtttcctttcccaagtaataataatatcaacaacaataataataataacgtgaaaaggaaatcgaatgaggaaataagtcagaggtctcctaggtgaaaagcaacagcagagattttttttttctctgacttctgtgttgtctttttgcttggtctgtgagcaggtgtagaggtgatcctagaacaggttgctcagaaggcactccctgagcgctagggagtagagaggggtccggggttgacctagggtgggtgtggaatccgggctcttcacagggtggggggagggtgtgctctcacccaacactgccaagttgcctgaggaaaactccctgcctaagagaattgcatccaagctaggggaaggggagaaagaggagggtcttggagagtgggaatgagaggccaaccaggggaggaggagagaatggggcaaaggagggggagaaagtaggtttagagggagagagagtgtgtttggggaggcagagagggggttaggggctgggagcaggttggacttgagtgggaacagaaaagaggaagagtggaaggtgaaaagatgaaggtgaagagatca

SEQ ID NO: 5907 - DNA, 6000 bp, Homo sapiens
aaaacagatggattacattaaaaactttatgttaatacgttacaggaaacttttgctctttactcttcccacaaatgtgattccaacaaactctagcaggtgcattgatggatgcaaagcttaatataactttgttgtgtcctcaaattgtttatagcctacaaaaggaaatcagacatatacataataaccaatttttaaaagtgaactaaaagtttacagagttactttgatcaaagtccaggcctctgcatatgttcatacaagttgtgaattcaacacagttctagatactggaatgaatgacatattagaattgagcacacccaaatacagttacctatttttgaaaggagagagaaatcactaacaataggagaaaagcttcactttgtaagtggtggaggtagcatctgtactgagcacatggcgtaaactaagtcagtatagtcccaaagtagaaactgtgttcaagggtcagtttggacagttggattccagtggaagtcacatataaagagttaaatgctgagaagaaagggtgagcatcggtttgagaaagggtttgaattccaggaatggggcttaaatgccttgtgtcacataaggaggtattgggagaaaatggtgtaggaaagatgtgggtgacaatcaaagctgaggtgtgagaaaactaatcgggtgttggtatggcaagatgtacgggagtggttaactagagaaattgagtccacttaccaggccagtctttaaataagatgtgagagagaatgacaactgaattagcatcagggccaggaaataagaaagcatagaccatttgaagacattgcagtaaaagaatcaacaaatcctagttactaatgggatgtgagacttggcatcacaggcagaactcaagaatgatttggagactatgggacttaccagagtgcggtggcattaacaggaaatggaaaatcaggagaagaagctgttggtaaatattattgaaactaaccagtggccaaatatgttagactggaacttcagataacagtcaggcctggaaagaatgatttgcaatttgagagttatctgcaaagaatcttatttgagaccttgaaagagaaattgcttagtcacagaaatggccccgtgtggttgatagtaaatagcatgggtttgattgtggagaggttcactaaagaaatacaaacaaaattttggtatatctgagctaagggggaagaaaataaatcttagaattggaataaaggacaagctgaagacaagcttggaaatttaggcctcaaggcttggcaatggttggttaccaaatagcaagacctgtgattctttgctagatgtttcctaagactttcaaagctttgggagtttggtttctgtagatacattgtaaagcagatgattagaaaggattaggcttggattcaagccttgactctttggtgtagaatactagatgaatttatatcagttatcagttcatgtcttttaaaccctggtttttcatgtgtaatgagggttagtgataaatgtactcttcttatttcacaagggttcttgcaagaacccaggttatcattataaaaattgtagttttgttctatgggaaaacaggtgccagtctttacgtttattttctttgctaagtgacccggggacaaaaatcaaaaatagatttccaatcttctctacatttaattctctctctctctctttctttcttgagagtctttctttcttaagagtcttgctctgtagcccaggctggagtgcagtggcgtgatctcagctcactgcaacctccgcctcctgggttgaagggggttttgtgcctcacccccagagtagctgggactacagatgtgcactaacacacccagctaatttttgtatttttagtagagacagggtttcaccatgttggccaggctggtctcaaactcctgacttcagatgatccgcctacctcagcctctcaaagtgctgggattacaggtgtgagccaccatgcctgtcctatatttaattctctatattaagctttgtgtttccaattatttatacatttaaaaaatacatccttttgctttttgtgattcccttttgctttctaaccatgcttttaaaatatcttctatatattttggatttctgaagttttatcttagtatctcttaatttttgttctagatttaattctgatttcctaaatacaggttgtctagcttctagagttctctgcttggtaaattgttgtataagacagtttttaatatattacatttagagagactggaaaaatattgcaattcttattacactatggaattttatggctaatctgtgtaatgatctcaatactttaaaaacagtgatctgtgatgctgggttgataaacaaggacaaaagtagtgaaagagattgagcagagaagacgagaaatgcaaaacacatttatttagagactgggattgaagatgggatgataccatctatatgtattttttttaagtagagaaggaaatacaaatactttactggaaagttgaaacatctgaaagctagtagattaacacaagtactgaataactaaaacaaaatatggctttcatgcttcaacaagtacaataagctatgctgaggccaaacgaactttccccagaactttgttgggatgcggtgccaagattacagtctttctttttttggttggaagtattgaacgaaatctttctgctgctatttcctcagctggaagaaatgattgctagaacctaactagatagtcaagatactagagcggctcagtggccatgtgaggctattacttgttggtggccattgaccagcttctccacctgtcttagggatctctttcatgctactccatctatctccatttctctaatctccactctccagacactttgttcgtcaatccttctcccttcacccctgtttactaccttttataatcttgctagagaaattcaaagctaactaagttgataattatattatcacaaactgagatcattggtagaatgtcaggaggtatgaaagtcacagggtgaaatatttattgagtgtctattaagtgccagacattattataagagtggaggtacagcagtaaaagagatagagaagctccctgccctcatggagcttacattttaatgggaggacatagataataaacaaaaagtaagattgtttcagataatgtgttaccaaggagatcatagaaaatgactgatcactgcatctaagaaaatatttatgaagttcttttctgctatataagtgaagcatacattgcaaatttgttactcattctgtggtcatatatgatttcggctattgagatttttaaaaaggcagaaggcagatacaccataatctctcttttcttccttcctttctaggctggtaacagttcatgtttgcttcataaatgaagcagctttaaacaaattcatattctgtctggagtgacagaccacatctttatctgttcttgctacccatgactttatatggatgattcagaaattggaacagaatgttttactgtgaaactggcactgaattaatcatctataaagaagaacttgcatggagcaggactctattttaaggactgcgggacttgggtctcatttagaacttgcagctgatgttggaagagaaagcacgtgtctcagactgcatgtaccatttgcatggctccagaaatgtctaaatgctgaaaaaacacctagctttattcttcagatacaaactgcagcctgtagttatcctggtctctgcaagtagatttcagcttggatagtgagggtaacaatttttctcaaagggatctggaaaaaatgtttaaaactcagtagtgtcagccactgtacagtgtagaaagcagtgggaactgtgattggatttggcaacatgtcagctttatagttgccgattagtgatatgggtctgatttcgatctcttcctgatgtaaaccatgctcacccatatcccactatacaaatgcaaatggttgcctggttccatttatgcaagggagccagtactgaattatgccttggcagaggggagactccaaaagagtcatcgcaggaagaagttaagaacactgaacatcagaacagtctgccaagaaggacattggcatcctgggaaagtccgccttttcccttgaccactatagggtgtataaatcgtgtttgcaaaatgtgttatgatgtgtttatattctaaaactattacagagctatgtaaagggacttaggagaaaatgctgaatgtaagatggtcccatttcaatttccaccatgggagagcctaaaaataaattatgacatttagtatctaaggttagaaaaccacgcccacatgctaatatgggtgttgaaaactaggttacttataatgcaaggaatcaggaaactttagttatttatagtataatcaccattatctgtttaaaggatccatttagttaaaatcgggcactctatattcattaaggtttatgaattaaaaagaaagctttatgtagttatgcatgtcagtttgctatttaaaatgtgtgacagtgtttgtcatattaagagtgaatttggcaggaattcccaagatggacattgtgcttttaaactagaacttgtaagacattatgtgaatatcccttgccaattttttttataataagaaaacatctgactaaagtcaaagaatgatttcttatggtttattttgatgaaagttcttttaacatgtcttgaatgtacacataaaggaatccaaagctttccattctaacttaatctttgtgataacattattgccatgttctacaaccgtaagatgacagttttcaatgtagtgacacaaaagggcatgaaaaactaactgctagctttcctttcatttcaaaagtccaagaatttctagtatatttggattttagcttctgttcaaagcaaatccagatgcaactccagtaagtggcctttgctcttttttgtaccaaagagcccagatgattcctacagtccctttcttctctaacatgctgtggttccttaaatatgagtaatttctctaagatataacccaggtgctttgagaagctgcattaaggtgttcaggccctcagatatcacatggtacacttgattagtaataaaaccagagatcaatttaaattgctgataggtcctgtctcagtgtgtggcattgactgttttcaggaaaatagatacagattaatatgagttatgcgtgtaggttgtgtatagattgagaagatagatacttctcaatctagtagtttgatttatttaaccaatggtttcagtttgcttgagcatatgaaaatcctgcttaatgtgcttaagagtataataaatgtgtacttttgtcctcaaacctagtagctgggttttaacactcatggacatggtcttaatcaatggagttaaataaacaaattcagcaagttattaaatctgacatggtaggagaggggagatgtgtcctgcttattaaatgtgttggtccattgaaagttacatggattgccaatttttaaaacactaaagttgaataaaatgcatgaacaatagaaaaatgctgaacattattttggatgctagctgcttggacattaactgtgttatttctgctttgagatgaaaatatatatttatctttgcttattttatcccagatgtgttctgaatatccttcttcataaatcatggaaaactcactgctgagatagtaaaccatgaaatcgccttttcagttggtgccatgtatctgacagttccatcttggaaggtttcaaaattaccttttaaaatgatctcagaagtctgtagattctcaatgatactgaaagctttgcacctctttggtagaaaccaggtctatttagaaaatggctttatgataaatgttgcctcctgagtgataat

SEQ ID NO: 5908 - DNA, 6000 bp, Homo sapiens
tccagagaggtctaaataatcattgtagcaagtggaattaggcttgaggttagaaaaaacttccccaactttgaccacatttccaattgtctacctctgagcttttgctatttgcaaaggtgaagaaaagccgaaaagaacaaaatcaaatactatggaaaagaacaatgggaagggcagtttagagtaataaatgaggacagtggaatgaaaataaaggagatattactttcattttgtaaaacttattattataaaccttggcaagaatgcaatgttttatacatttacataacacttgcaatcacacaaaagtcatgacagtgattaagagagtggattctgggccaggtgaggtggctcacacctgtaatcccagcactttgggaggccgagacaggcggatcacgaggttaggatattgagaccatcctggctaacacggtgaaaaccagtctctattaaaaaaaaaatacaaaaaaaattagccgggcttggtggcgggcgcctgtagtcccagctgctcgggaggctgaggcaggggaatggcgtgaacctgggaggcggagcagcttgcagtgagccgagatcgcgccactgcattccagtctgggcgacagagtgagactccgtctcaaaaaaaaaaaaaaaaaagagagagtggattctggaggcagactgcgagtgtctaaaaatctcaactctgccacttcctagttagcagtgtgccttgggcaagtaacttaatgtctttgcatatcaatttactcatctataaaacggaaatggtaataatagcacatctctaataagatcgttatgatcactaaatgtcaaaatttgtaaggtacttagaaaagtcctggcatgtagtgaaaacataggtaggtatattagtccgttctcacattgctatgaagaactacctgcgactgggtaatttacaaaaaaagcgggtttaattggctcatggttctgcaggctgtacaggaagtatggctggggaggccacaggaaacttacaaacatggtggaaggcaaaggggaagagagcatggctgctccatggctggagcaggaggaagagagcaaagggggaagtgctacacacttttaaacaaccagatctcgtgataactcactcagaacagcaagggagaaatccacccccatgatccaatcacctcccaccagccccctcctccaacactggggattacaattctacatgacagttgggtggggacacaaatccaaaccatatcagtaggtgacaaattttttaagatcaactttaggtaataggattaatatgtagtttccctcccatcttttaaatttaaaacatgtgtttcttgataattgagaaaaaaagtaaaagctaaacttttactaaaacacttaaataaaaatctatattttttcttcttgtgagctagtttctaaatctccaacttcttcccttttctgcttctcctgtgcccaatattagacgtaacatacctatgagtaatcctgaggtcctgattactcttcagcttctggcattattattttattattggggtgaaatacctgtaatgaaatttaccattttacccattttttaggtgtacaattcactggcattaagtacattcacaatgttgtgcaaacatcaccactatctatttccagaacttcatcatcccaaacagaaactctgcacccattaaacagtaactccccagtctcccttacccccagccctagtaacctctattctactttctgtccttatgaattcacctattctaggtacctcatatgaatggaatcatacaatatatgctcatttgtgtttggcttattcacttagcaaaatgttttcaaggttcatccatgttatagcttgtatcacaatttcatttctttttatggcaggataatatttccttatatgtatatatcacatacattttgtttatccattcatctgttggatactaggattgtatccactttttggctattgtaaataatgcttgctttgaacactggcatctgttggagtctctgctttcaatacttatgggatatacctagcagtgaaattgctggattataaggtaattgtatgtttaactttttaggaactgacaaactttttcacagagctacatcattttacattcccaccagtatccagcattagttttaaacatggcaggcttttaaaataaatcaagcctaaactggtaatatgtagcaaaactaagagtcctgcaacagtttgctgacaagttgctgatatcaacactcttaacatatcatctcctagactaatgcagtgtttctcaacatagacagctgagactcccatagtaatcatctatggagcttgttacatcagaagggccctggatcccaccttgtatatgttgattcagcatctctggaaatggagcccccaaatcaacattacaaatgctaaagcatgagactcaccaaccctagattgctgagttcttgaaggtaggggaaatatcttagtcatcattgtgtccctcaaggccaaacatacaacagatatttaacaagtgtatacttaaattaactaatactgtaatctaaagcctacctgtttagttgttaagtaccatattcaataaaattaaactcaatcactagacaactagggaatctgtaattaaggtgtgtagcatacctttcatttgcataaaacacatgtcttaccagctgtgttctatcatgccctttgatgttgctaaggatctttacactatatgtaattttcagctcagaacatcacgctttgaggcagggttaaaaaaaaaaaaaggatatggacttggaattagaagaactgtctctgtgtgacctctaagaccaatatctaggaatcaagtttataacttggaaacattgaaaacattttgtaattctaccaacttcattgtttggctgaagcacaaatgatactatgtgtaacaaagcctgctgtagaaacgtggtctcacaaaaaacaaacaaaaaaaaccatgtttccaagtcttcctaaagactttaagtatccagctgtgtaagtttagtgctctaaggtatacgcaaataagcagatgagaatggaaacatatcgcagaaaattattaagtgcatgcacaacatttattcattcattcactcattcattcatcacgcacatccagcaactatatcaatatcctgcagggcactgtgtggaaaacagtggttaaataaattcaaatctgccctcaggggatttagttccttttagtatattaataactagcaagctgcccctcttcatgtcaaagctttacgtcaacaaaataagcggtaggggatcaccttaaacgtcacgggtgctgtctctttaaaacgtaatagaactctgatcgcatcgatcacaggctcacaacgcccttccattcatcgctcttattccagtcctggttactaccccacttcctgacatcaaaccagggagaacgcgagtgttagttaacatggcttggtgtgtggccacagctgacccggcgcatacctcccgtcctctctttacagggctggcggtgtctcggggctcggctggccatgcctggagcgcggggtttgactgggccgccgttgttgtagtgaccgggaggcgctgccgctctgggcagacggttccgggagccgcacggtcccctctccttccccatcctctcccctcccctctccgggttcccccacccacaggagccttgggccgaccactcccccgatggcctcagccacggtaaggacgggttggaggtggggggggtccctccctggagcctgtcccgcgggctgcggggccaggtccgggccgaagccgcacctggagggagatggaggcaggtgtccgtagccgggtcctgagcccctcgtcccggggcgtccgtatctcactctctgccatcggggcggacggagtgcggaacccagacccggctcccggacgctcttccccgagttccggagctccggactgagctgggcggccccacggcccccagaattctcggagggtttccgtggagcgcctgcgtcagaatcacctaggaagtattaaaaaaaaaaaaagtaccaaagccgaggcgcatcctcgcacctgcctgccttgggccagcgggcggggcccgggaacgtgcatttcaaaggggccgcggttcctgcgatgcgctggactctgggaagcgcgaacagagcgttttgcgggctctgcggggagagctggcgccggcgtctccctgtagcaggactgggcgccgcgcccgtgggtgggctgctgcccggccccgccgcccagccaagccgccgcctgggtggccattcccaagccggactccggggaagtggcagcgtggatcccagccgccagaattcgaggtctgcggcggctttcaaaacttgacaactttcctttccaggaggaccccgttctggagcgttatttcaaaggccacaaagctgcgatcacctccttggacctcagccccaacggcaagcaacttggtaagtcttattcttgttttgcttttgtaatgagactaaactccatgggccggaaacctttcctcctgtccgggcagggtccctaggagaacggctaagggcctgtatgagggttgagagcacccggagacgagggcccagcgcggcggggcgcagctagggccccctctgccatcccggcccccagcccccggcccggccaagagcctcctatccagcggtctgggcctggcggacgactttcgcaaactaaccaccaggaggagtgagtgggaaggggaggggtttctcctcggcccggggagggtggggtgttggctggagagtttgtgaaaagttgtgagccgagcaggaggaagtagggagagaggagttgggctgtgccggaggccgaggaccgagagggctcaggtgacccctggaaagcctgggtggctggaaaggagcctagcgcctgcatgaaaggaagaacctgctgggaagtacctgagctcgagctgtgggttccgccgcccttcccctgcgtggtggcttggtggccgcgtctgcgcctcagccctgagaatccggatggcggtgaggtggacttgggcaggcaagagctgcctgctgctggcgtttttaacagtggcctatatcttcgtggagctcttggtctctacttttcatgcctccgcaggagccggccgtgccagggagctggggtcaagaaggctctcagacctccagaaaaatacggaggatttgtctcgaccgctttataagaagccccctgcagattcccgtgcacttggggagtgggggaaagccagcaaactccagctcaacgaggatgaactgaagcagcaagaagaactcattgagagatacgccatcaatatttacctcagtgacaggatttccctgcatcgacacatagaggataaaagaatgtatgagtgtaagtcccagaagttcaactataggacacttcctaccacctctgttatcattgctttctataacgaagcctggtcgactttgctccgtaccattcacagtgttttagaaacttctcctgcagttcttttgaaagagatcatcttggtggatgacttgagtgacagagtttatttgaagacacaacttgaaacttacatcagcaatcttgatagagtacgcttgattaggaccaataagcgagaggggctggttagggcccgtctgattggggccactttcgccactggggacgtcctcactttcctggattgtcactgtgagtgtaattccggttggctggaaccgcttttggaaaggattgggagagatgaaacagcagttgtgtgtcctgttatagacacaattgattggaatacttttgaattctatatgcagataggggagcccatgattggtgggtttgactggcgtttaacatttcagtggcattct

SEQ ID NO: 5909 - DNA, 6000 bp, Homo sapiens
catatagaaccagtcatggattaagaccctttgtaaatactagttttggatttaaaaattttctgagacatgtattaaaactaatcaaaatttgacttaacatttaaattatttcagtatatcaaatcatatactgattctcttttcctcttgttttaaaaatcttattaaaccttccatatctgaaatggtttgaggtcttcctcatctggggtgggagaaggctattctctgcagaatggatctgcaaatattcttaaagaacagtaaaaatagctaaaatgtatttgtcatttactgtgtgtcaaggtaagttcaaagggtttacatgtatttacacatttaataagatgtgtactgtttttgtatctttattttacagatgagcctgttacataataggtgtgtatgtccaaggcaaagtaaaatagatctgttacctccctttgttagatattacgttcctggccctactgcctgagaacacacatgctttgggagtgagggaaggcacttacatcagtcatgctaattaacaccaaattaatgcattttttagctttgagtaaactgaacttttgtctttgcatatatggtgttgcatttcttatatgccatatttgtacagttatgttttgggaattaaatgtaagaggccatacttctataccaattaaatttaacctctcattcccatttgtccagatcccaattctgtcatgtaacgtattgccgatttttacctagctttgagttgcttatagattgggtaaatacaacttctaggtcttcaaatttctaacaaaaatttcgaatcattcaggaattaggaacccaacagtgcgttaagaaaacacctctttctagattggtccttttctatctaatatatttagttgtattagcatatatttctgtcttgcctgcaaaaatctcatgctgatgtacaatattaataatcatttttagcactccatgtcttacctgttaatttactttgctattttcttatatttatttagtttttctaataattgattttttattgttgagtctggataacttttctcttcttttttgtttttttttgtttttttttttttttgagtctcgctttgtccccaggctgcagtgcagtggcgcgatctccgctcactgcaagctctgcctcctgggttcacaccattctcctgcctcagcctcccgagtagctgggactacaggcgcctgccaccagacccagctaattttttgtattttttagtagagacggggtttcaccgtgttagccagaatggtcttgatctcctgacctcgtgatccgcccgcctcggcctcccaaagtgctgggattacaggcatgagccactgcgcctgaccaagtctggttaactttcacacaacgtttccttgctctgtaaagtaaccttatgaaagaaggaattgaaattgtattattaaccaacctctttatgagctctagtaactactaggatataatcatccttttgtctttttctaaggccctacccattcacagtaaagattatatgtcagtaaaaatccaccttattgttctttttgaatactgtaaccttttttgcccacctccagtcttccgctacgtgtgcttgtgcgtgtgtgtgtgtgtgtgtgtgtgtgttttgtaatacctcaaagactaccaacagtggtttgttcagagacaacatttattctgggataaattttgtaagccaggaggcctacatgtgctttctttaaaatctccctcttcttgggcctcagcttgcacttaacattttttcttagacttttcaagtagaagataaaattctattagaaaacaaagagaagcaaaatagatgttctgctttctgttgtatatcagtcccaaatagcctgtgtctcaacttgattgtcatgttgtagctaacaagtgaaaagcaaaacttttttattgtccttcgtatttttgtcaaccagccagttagatgaatggaagagtgggtaaagaagaaaatagtaaaaggagctatgggtgatctagaaatagacaacaacctgctgcataatttgtaggtgattggtaattcaaataggtccactttgggaaagtggctcatttgcatttggtgcttttgtctgggcttccttttctttaaatttctttaaacagtgagggaattgagcatgattaatattcatgtgcttatcaaagctctgtggcttgcaaagtaatagaaaactcaacccctgaagggcatttattgacagattacggaaaagatcagtgatgggacaaactttagtcactgattgacccaggggctcaattgatgtccaggattgacagccacatgctatctctatctctctctctctctctctctctctctctctctctctctctctctctctcctgtttgaattctctgtttgaattctgtgaagagaaaagacagattggcacataggaataaaaaaaaacagttttattactgataaaagctggaatggatgacttggtttttgtgtgacaacaacgctctagtattgaacccagaactaagcaattatttacctctactccagtaggcttttaaaccttggggtctgcccctaaaaattcaaaccagaatacatgagtcctccagttatctggctccccaaagaaggcagaggtgaagaagctacatatgtctagtttctctaggaaaatctcctatcaggcaggtcatttcacgtccatggtgattgatgggatagcaggccaggagttgttgaggaaaattcctctttgtggaaaccagaggacggatgaacaaacatgccctcaacacacagacttatcttaattattttatttgttaaataataatctattttaaggttagtgtgatgttcaggccaacaaattctggatatagaaacctaaggagattatcaaataaccaccctctccagtttttcaagttggattattattataattgatgtgtgcgtaggagggaacccactttgcctgggagatgagtaaaattggtaataattagacaagcataaggatttgtgaagtgggaggaaggaggcaatgcaagaaaatgtcttgcagaatctgtaactgtcacatctttgcaagtttaacctaaggcaagcaaacttttctcacccagccatcctcaactcactcatatgaattctaagtttttagcccattctccagttcagtcattctcacaagtgtgctccctagactgatagcatcagcatcaccccaaaaattattagaaatgcagattattgagccccaccttaatctgcctgaatctaaagatgcttgaggtgtggggcccagcaatctaactgattctctgggtgattctgatatatgctgaagtatgaggaccatacaccatgatgtacagacatcttcatagcagtttcatagctgaagatttattgcatttgccattctaatcttttctagttctaatcatcaaacattttaaaaatattttggagtgcaggtagattgcttgaggtgggaagacgttaaatctgtaaaatggagccagacagtcatgagcagcagtgggactgcattttcatcttgtaggtttagatttagtggcatgatgcctatttcaaaaactaaatgtagcagcaaaatgcttagggcattgtatgtgtgagacattagaatgaggaagaaccaaggggttaatgattataatttgcatagaggaacttgaagatcaggaagaaaaggggttatatacagaagagacttttcaaaggtagaattaacttagtaactgactgaagccggaaaggatggaatcaaagatgatttaagattcctagccgaggtggtaaggataatggtggtggcagagctatttaatgagtgaatgagatgagtccattgttgggcatgttaactttgaggtgattgtatggagaggagagcttatctttaggcagattagtataataggaggacttgaaagtatgatgaagaaataaatgtaatgcatgtattcattcctcaaacttttactgagtgtctaccatgtgtctggtacagttctaggttctcaagatgtagtaatgggcaaactctgccctcagaactaatactgtagatggagggaaaaaaataacatataaacaaatgaacaagataaattcaggtaataagaagactgggcaaggacaacaaaagagtagagaatttctttagatagggggtcaaaggaagacctgaggtggtaacatgtgacaaatcatatagagtatagtttttgccggccaaaagattttagagtcacagagtggccaatgagaattacaggaaataatattaaaggatctgttatgctttttgtcctttcaggggctattccatatgaaagacttggagagagagatccaagtataatgttaaaaggaacttgggcttggagacagtccacctcagacatttcagccatttgttagctgggcagaaaactcactttcttgaagtctgctcttatcactagaagaagaaggagtaacacctcatgggattaaattgtaatgattaagtgagagaatgaatttaaaacaactagcatagtgcttggaacaataacagtaatactgagtggatcataaaattcagtcatgtgaagtgcagttttatttaataatgtaatctaatgtcttctgatgtacagttttatttaaaagttgtactttgatcttttatcatgcaaagcactttaaaagcacaagactggagttcaaaaatatttatattattaaattatctactttagctacctggtgacatttagaaaatatgcttacatgcataatactcttaagatagattttattaacttttaaatattttcttcttacagatgtgtatatctcatgattgatatggagaaactagtcatgggccaaaggtcaagatacttctctgggaaatgttgctgctgatgctgctttacaaagtcatacaatgagtgtttggtttaagaaagattttcatacttaaaagattttcatcttggaaatacatcaagtgaaaattaaattcttttgggaaacattttccttctgatatattatacttgtaatgggcgacatggcaaacaactcagttgcttacagtggtgtgaaaaactctttgaaggaagctaatcatgatggagactttggaattacgctcgcagagctgcgggctctcatggagctcaggtccacagatgcattacgaaaaatacaggaaagctatggagatgtctatggaatttgcaccaaattgaaaacatctcccaatgaaggtgagttttattatgcttgtttttggttctttgtgcaaagagttctatatatttggcttataaatgagcatgcttatattatcttggcgattgtatgattatgacataattatagtgacattaaaaatgggttagttatcagattaatacagttaaagtatttttatattaacacataaatgttgcaaattaatttatatgttttagattggcgggatgaaatattttgttccattatatatactactgcttcctgtttatgataaaaagattgtcttccctttgagctatagaggatggaaccaggcttggatgcctcccagggatttggtggaaataaactctcagatcactatccttcattttgctgggtggcttaaaatagttgtcactctcagtagttgattgagttggttttagcatatgaggcttaacctaacctttaataattagctcaggagttcctaaagcaaatgaaatagaagagatggaagttagtttttcacctaacagacatttcctttaatgaaactagtttttagtctttgaattatgttgaatattcctgtgttcacagaagcctttggtttcataaatttgtatttgtggcaggttttccttttgagaatcaaaaaggagaattcattataactttctg

SEQ ID NO: 5910 - DNA, 6000 bp, Homo sapiens
attttgtgttctttttaaggtttagggcaaaaccttacaaactgaccctaccctaatttcctcagtgaaatcgactttaagtataaacacgcatgtttagcacaaggggaatggtttacattgagccacttagattgtagaagagtcagcaacacataaagtgccttagagaaaaataccctgacctggttaatgattaaaccattaactgctaaagcagacccattctaatgtatatctggtctatacagtttctatttgtgcctagtttttctagttcgtgtttagcaaagattaagtgatattgtttaatgaagtgtttagtagctctaaatgataaaggttcacatttttttctattaagtagcttaagtgtgaattcatttgaaaaaaaaaaaattccacaggccctgcacagtagctcatgcctgtaatcccagcactttgggaggccgaggcagatggatcacctgaggtcaggagttcaagactagcctggccaacatggtgaaaccctgtctctactaaaaatacaaaaattagctgggcatggtggtgggctcctgtgatcccagctactcgggaggctgaggcaggagaaccgcttaaacttgggaggcgaaggttgcagtgagccgagatcgcgccattacactccagcctgggcgacagagcaagactctgtctcaaaaaaaaaataataattattaaaaaaaaaaaatttccacagtactaaagggcttaaagcaaaattaaagtgtctttttccagcttcttgtccttttccccagagatagcaatgataataatgttatgtttctttttttttcttgagacagtctcgcttttgttgcccaggctggagtgcaatggcactatcttggctcgccgcaacctccgccttccgggttcaagcgattcttctgcctcagcctccccagtagctgtgattacatgcacccgccaccacgcccagctaattttgcatttttagtagagacagggtttctccatgttggtcaagctggtctcgaactcccgacctcaggttatccacctgcctcggcctcctgaagtgttgggactataggcgtgagctactgcgcctggctgcaatgttatgtttcttatgtgtctttacagaaatagtcttgacacaaaatatacatatctattatttatttaaccagtcgcctattgatatgcgatttaagttcctcccaggatgatgttttttcatgtttcttttgctttgtaatactgtattgaaaacttgtgtacatttttctctataaccatatttagataaatttccaaaagcaaaactgttaggtcaaagggcatgtgccttttaaatgagaatagaggcaaacacattgtcctcccaaaggttgcaccaatttgtaggataaatcttttattttcagaaggattcctgggctcagctgagtctgatgcagcaggcagctatccatgtctactaaccacaggaaactcaggggcctctgcctggaggaatgacatgagctatgagaaagaggagaatgtaaaaggtgtttaaagagttcagagagagaaaaagctagggactggcttagtagggaatcctgaatttacaaggagagtgctttgggtcataggttgcaggtcctgatctgggttttgaagaaagtaaggcagccctggggcataaggtaatagtgagaaaatcctgctctagatcaggcaaaccatttcctggatgtgacctgctcctgtagtagaagccgtaaagcaattttgagtgaagcatcataatagcacggagatgctgttcattttaaacaccacctccagtgtgagtcatggtggagtcagacgtgtgtaagtgtgtgtaatgcatatgtcaaagtcatgtttaaagggaaaggattacgtctcagtagtctctccctgagactctgcacctctcgtcagtgtctgaggaataactcaagtagaccacgggctgggtgccatggggaagttgccacctcaatggcagattccatctaatgtggccatctgtctgctttcatttttccccctattggcagtggggtaggagagcatcttgtagacacgacaaaaagttgagtctattcacagctgggaagttcaagtctattcaaggcagagaagaactggaaggtatcttggttctatatgtcagtggggtgtcaaaatcttagaggttggctaagaaggatggagatgtgtattgtgtgtttaatgggaaccacccagagttcagaaacatcctagagaatcaagaacctcaggttcagactacatatgtgagcgaggaggaacttgttcttcctcggcccttggggaccaaagtgtcctctcaaactggtcatgcttgaggcatgtcacatgtgcccaggttgaagacagccaggaataagagtagtcctaaagaccattagctctgaattggatcattgtctacgtttaatccaaatgattaaatgagccaaacagtgagctttgaggcagttgccacatcattctgtattagaaacttgggcaggtttttaaaaaagatatttgtgactgagacacagaatgtgaggtaggtatactgaactgggctatgggtgaatggatgggaatatatgaagctaccagggaagaagggggaaggaagaagtgatcctgaatgtattttaggagctaagctggagatgaaacaaaatatctagtgaccaagatattttcagactaggaaggcagccgtaaaaataggtaaagacaagttagatcccaaatttaaaggcaaacgctgaagaaaaatgaacaagcttagctctgtggaactgaattatgtatgccttactggtcagtctggttttaaaaatcttattgtagttttaaaatattcattttaagagttagaattagcaaaatgacctagcaaagaaagtatatacgtctcatatacggagtgtactattgacttaacatttggtttaaggcaagatccatttgctggaattcattatttaacatgacttaagacctttacttgaactgagccagaggatagaggctatgcaatattaactttgatagacactcttcctcttaaatattacagtagagttttcacagagtaggctttgactagcctttattaggctgacaaaattctccctcttttccaaaccccactgcccttttctctccatcccacccccaacacagagttaaatcaacaccacttaagccacatagcaattttgagatctttgcatttgttatttaatgtcaaaagcaggaaacccctggtcccccagaacagtctggccttagtttttcatatgacttgtggcaattcaaatatttgagaatctgtgcctacaaatatggtcaaaagggatttaaagatgagtgacagcaagaaaacttataatctgctgcaaaggttaagtactcaattataatacaaagcagtatatgatcacaaaagggcaagaggaaaatattaaatctcttctgtttgccatgacatcatgtccttttctgatttcattaaatcccaaaaggaatttccttaggtgagaccagagtcccaaaaaggttaatttacttgccccaggtcgtatagctgctaagaggcagaagctgggatttgattaggtctggttgtctatgcttgtctcctcagagagttgcctaaggcgctgtcaccaatgggctccagtgctgtttcctctgtccctttctctctctgttcatcaggacgtctgtgtttgaaggtcccataggaaccttaagtttatcatgtctgaggctgaaaattcctcttgcctatcttgtgaataagcttagctaccagaaggaatgaaacagaagtggggttttccttgactcgtcccttcacccccacatccaggtggtggcaagtcctctcattccacctccttcatagacctctcacgaccaccctacatccagccttcaccagctcttgccatagattgctgcagcaggctccaggctccagttggctccatggaaatgcattttccatcttgctttctcagaaggacttgtttaaaacaggatgtgatcatcctaatcctctatgcggctgccaagggacctacaggatgaaccccaaacacctctgtatgagttaagtgggaccctccgggtgtgacccatctgctgtcccagtcttcaactgcaccaagtcctccaaatctttacttctctgtctaactgattcaccttctgacaagcctttctgctttccattgactttttcccctccccctttcctcttatctcccccttagcagctccttccaagtgctcgcttagcaccaagtactctcctgacacttatcagtggctgtcattgtgtctctcccccggccactacgccaggaggcggctatgcccctttgcctccccagcacgcctcgctgcgcctgacactaggaggcacccagcaagtgtctgtctcatgaatgaatcaacagagagtctcctgactgctcactgtctttaagccacttcccttcccttggtgctggctggcccctttgctctgccttcatcacattggtgtttactgtgcccagtccactgctggcatttgctctgcctaacaaggtttgttgagccgagcccatttccttattggtaaagagagagtaccagactgaatgtcctcttgcaatcccagagtcggggtgattgatagcaggcgcccttctagtcgacctccctgcaaagatatagaatgtggatctcttctgctgactgcacaaagagcccatttgtacagcaatgtgttgaatacggtgcattattactgacatttgtattgggtacagtgcagggcgtggagtttctctgagacaaacacaggaataccccgagataatgtgagcagtatctccaaagtccaggctgagtcatatggtaggtgctgtttggaatatctagcctgcctgccttgcagattcaaatgcctcgggcaggagggtgagctagctgccgatcctgctctgctcctgggtttgctgtgtggcccttggtaagtctcttcacaactcttccgtttcagccagagtgtgtaaatatgtattgtggagctttgtggtctttaatatcctgggagatgccagaaagaaatgcaatttgtctttgtgctcttaatagttatctttgtgcttgcccaaatccctccctaatttctcagttggtttctagatacttaaactgcctaaacgcctaatgaaccaccagtctccttattgttatgtccttttaaaaatgtcagtccagtgtgagtgatttaacagatggacaaatatctgggttggattgtgccagctactggctggagaagagccaggtctcctcccacctccctgggagttcgaaagtaaccccgggtctaaccaggctctgagttggaatctaactttgtactttaatatctagtctttcgacaagtgggcatctttgagtcatcctgcctttgcctggaaacttgaaactctgtaaaactgactttgtgtgatgctgcccagcccacgttggggaagaagggtgtggtggctgcctcgagctgtgggagaggaagcagccatgggggaaatggagagtgcgtctgaactgggcctcctcggaccatgcttggacaccccatagtgtgggattcattccccatagggtggtgaaggctcaggttcatgtgatttctgcctgggggagcctttgatctcacaggaaatctgtgttcacttgtggctctttgtcatagaagacttctctatattgacacaaaatgcaatctttctttccttccctgaacattaaaatatttgcacacatttattaattcaggtggttttgtcctaatcagttctgtagcaaaggtttgcccattgttgatagtgatccccagtcttcagaaaccaaaacacctgggggtgggagaggagggaaagttggaaaagt

SEQ ID NO: 5911 - DNA, 6000 bp, Homo sapiens
aatagaaagttaactcaagttagtgcttaaagctatagatgtaatttcatttaaggtagcctgttgcactctaactttgtgagaggtgggatggagaagtggttaagagtacagacttaggggccaactcttcaggatgaccttgggcagtggctctacctctgtgttttctggcatagtgaggaaagtacaaatacccttgtagcgttgttagaagggttcagtgataagttagagacttatcaccgtaaacttagaagttataaaactctgcaactgtaagtgctaataacacaaaactactttgtctgtaattgtttatgctacccaaccaggcccattctcctgttcccctattgagttgtctcctctgtatcagactgtagggctcaaagttgagcttgtggcttaacaaggggacaaacaagatcaatgactgtgtggtgcttttcctgctgacaggtgtgccttggtgctgaggagtgtgagcaaaggaggcttaaatcagataggatagggaagaaagcccatctgaattgacatgtactgagaagaacaagtaagaattagtttaggttaaaaaagacattccaattagaatatgcaaaggcacagagatttttaaagaggagtgtattttttttcaatgattttaaatttgaaaaaccatgtaccccatcactaattctgagagcaggtgaatgcacagctcagaatgctatgccagttaatttatcacagggccttaagcttgaagagagaggatattgtctctcagccttgagacaagattatgcacaaatacactaatgagctactgatagttacagaaaagcagtgactgtgcatacttcccaccagctttgacatgctttggtacttgcagtcaagtctggcatggtgctactttatttcatagtagattatcaaagcatgttatgagagactaatccatgagttgaatccttgtctgctttccttgagtaatggaaaaaaagtaaatacgctcagtaagaacggtcaacgcagcaggatctaaacaatgactgtaggtacaggcaaacttaaagcacttgtgagtgtgaacgctgagccctttgaaaattttaatctttctagagacttaatttctttttataaagggaatcttaactcaagaataaaatgtatcagaagccagaagtcattttattttctctttggttttatcgtaggtttatttgacatggcctgtgccaaactgtgccgagggctgcccaggttcctggattaaggatggctattgtgacaaggcttgtaataattcagcctgcgattgggatggtggggattgctctggtaaggatgtgttaaactgtaattcgttcatttttatggaatattttcttcttaatcattattgaacatgtgctatagacttaaccaaacattctttatgtattaataaagaatcagtaatgctgggcatggtggctcatgcttataatccagtgctttgcaaagctgagctgggaggagtgcttgaggccaggagttcaagaccagcttgggcaacatagtaagaccccatctctatcaaaaaaaattagccaagtgtggtggtgcaaacctgtagtcctagctacttgggaggctaaggcaagaggatcatttgagcctaggagttagaggctgctgtgagctgtgattgcaccattgtactctaacctgggcggcagagtgacagcctctctcaaaacaaacaaatcagtaatcaatggactctttggaggtggtaattagtgccctcatgtggcccagtttattcattgttgagggcattgaacaagagaaaatacacttgaaaatgtcttcttatttaaaatatgaaaatctggaatacacttatataaatccaagagcaagaatcactctaactggttcttataggagctcactgctggtagctttcagcagcagattgtgataggtcacagaattactaaagagttgcaaaagaaataagtattttctctcctcagcagctcttccctctccctcacatagttatattttgacttgttgataatagcaatttgttacatttacttactacctttcaatttataaagcattaaatttatagagcattattcattatattcacttgaattgtgtttgttacctgagagagagagagagtaagtatgtacacaaatgttatcatccccatttccatatgaagaaatggatttggaaatgtttgaatattggagaaaacaaagcttcaagttgtatttcagtcagatatgtcagatgcgctttagctgaggagagagaatacagatgtgcaaagtagatctgtgtagaccagagaagtcagtctctactggaacattagcatttgataacaaggggtatcaaacatgttacccacgtttggacatgtttttggcagttctgatagtcacagtctttggaataatctcttcttgttttcgtgctcctccatttctgtcagcacgtgccccttgagcaaatgtaagccctgtacttgtaggttgcacagctacaaaatgccagggcctgttcatcacgcttctgtcaagtgactcccttttacgtttattttcttcttaaggtatatgagatcttctactaaagaatgaggtgaaccttttctgactaaaacttacacatcaaccttgaaaacatcaatatgaaataaggaactgtctttttcgttttttgttttttgagacggagtttcactcttgttgcccaggctggagtgcagtggtgtaatcttggctcagtgcaacctccgcctcccgggttcaagcaattctcctgcctcagcctcccaagtagttgggattacaggcgcccaccaccacgcccagctaatttttgtgtttttagcagagatggggttttaccatgttggccaggctggtctcaaactcctgacctcaggtgatccagcctcctctgcctcccaaagtgttgagattacaggcgtcagccaccacacccagtccagaactgtctttcaaaattgtaattacagcaagaatccctcttcttcctccgatctacaggaaacagtggagggagtcgctatattgcaggaggtggaggtactgggagtattggagttggacagccctggcagtttggtggaggaataaacagtgtctcttactgtaatcagggatgtgcgaattcctggctcgctgataagttctgtgaccaagcatgcaatgtcttgtcctgtgggtttgatgctggcgactgtgggcaaggtatgtttactgccaaacaaataagaatgggagcataaaacatccttgacaggtagagagagttttgaatggcttttgttatttaaaataatgattctctgtgtatccctttaccagccttgcattcaaactagttatgaaagtaagagaacaacataaatcactgaagaggatcttttcctgttattgttgcagtctggtgttttgttttgttttgttttgtttggaccaagcagatttaccttagctgaaaatatgtggtgaagttttaatttggaaacaaaaaaggatatcaataattcattaaataaagatggttcaaacactggattttgttgatagcgtattaatggagtttgttttggcagaaagtttttttcaaatggataaaaagatggaaattgattattgtaatttattgttaagaaccatgccatatctctatagtgagtcaggatcactatttcatggtaattattgtgactgcctcagatagtgaaataagccctataccagtaactgttgtattaggatatctgattattttgaaattaaagtcactcttagaaagtgaaaactcagtgcctacttcagcagcacatatactaaaattagaacagtttaggcattagcatggcccctgcacaaggacgacatgcaaattcatgatgcattccctattattttttttaaaagaaagtgaaaactcagactcaaagaattaaaggaaaacagaggaaaaatgcccagttaaaaaaaaaatcatgtttctgttttttcctctagatcattttcatgaattgtataaagtgatccttctcccaaaccagactcactatattattccaaaaggtgaatgcctgccttatttcagctttgcagaagtagccaaaagaggagttgaaggtgcctatagtgacaatccaataattcgacatgcttctattgccaacaagtggaaaaccatccacctcataatgcacagtggaatgaatgccaccacaatacattttaatctcacgtttcaaaatacaaacgatgaagagttcaaaatgcagataacagtggaggtggacacaagggagggaccaaaactgaattctacagcccagaagggttacgaaaatttagttagtcccataacacttcttccagaggcggaaatcctttttgaggatattcccaaagaaaaacgcttcccgaagtttaagagacatgatgttaactcaacaaggagagcccaggaagaggtgaaaattcccctggtaaatatttcactccttccaaaagacgcccagttgagtctcaataccttggatttgcaactggaacatggagacatcactttgaaaggatacaatttgtccaagtcagccttgctgagatcatttctgatgaactcacagcatgctaaaataaaaaatcaagctataataacagatgaaacaaatgacagtttggtggctccacaggaaaaacaggttcataaaagcatcttgccaaacagcttaggagtgtctgaaagattgcagaggttgacttttcctgcagtgagtgtaaaagtgaatggtcatgaccagggtcagaatccacccctggacttggagaccacagcaagatttagagtggaaactcacacccaaaaaaccataggcggaaatgtgacaaaagaaaagcccccatctctgattgttccactggaaagccagatgacaaaagaaaagaaaatcacagggaaagaaaaagagaacagtagaatggaggaaaatgctgaaaatcacataggcgttactgaagtgttacttggaagaaagctgcagcattacacagatagttacttgggctttttgccatgggagaaaaaaaagtatttccaagatcttctcgacgtaagtaacatccagcctcattctttctcatgctcaggaagagtaaataatctcatgataatatcattatagctaccatttattcagcacttccctgtgccggccatggaactaaatgcttttcttacatggtttcatttaatttacccaataaccctaataataaaaaatgtcatatgaaggtatttattattgctgtccccattttgtagtttaggaaacagcccaagtgtgaatgagtaagggatttagccaggggcgtacttggaggaaggagagtgggaagtggcatgttgtcttgtcttgacatttcagatatggtatttttccagctttactgatgaaaaaccctgaagttcaattaagttcattcgcttccccaacattataacagcaaatcagtgtgagccaagcctcaaagttggactgctcgttgccctgtaccatggcttcactgtgctgtggtgtcatctgtacctctcctcagtgctctcacggtgctaaccactggggaatgcaagatgacgggaacatagccactgctcatgtggaaactcagggaccagtagagaagacaaatttgtggggagaaaactgtagcaaagagatgtgtctgtgttgagatatgggcaagaagttcagagggaggactccttagctctgcctagaagtactagggaaggcatacagaaggaagtgccctgtggactgaccttcgaaggggtgggagttgacagaccaaaaaaaaaaatcatacagtctgggctgaatagtgaaggcacacagccacgagtgggtgttaggctgggagaaaagagagtgaagga

SEQ ID NO: 5912 - DNA, 6000 bp, Homo sapiens
gctcaagcagtcctcctgccttggcctctcaaagtgctgggattacagatgtgagccactgcgcctggctgaccacttttcttttaatttagtagtgtaatcaaactataatttaatgtgtcatatttatggtgcacttattacgtgccaggcactatgcaaagcatttgaaaatgcatcatctgctgactctcacaacaaccccaagaggtaagtactattatcagccctctttgacagatgagaaaagtgagaggctaagtaactgagcggtgatatagctagttagtggctgggctaggatccaaactgttgtctaactcctggaacactattaaccactccactatttagcctagtacatagtaggtgcccaataaatgttccattgacttgagactcagaacatggccagaacagtgttagatttgccatagaatgtggccactctgtctgtatctttggggtggccagtaaataaattattttgcattgaggaaccagttgtgtttggttctctgacagcctaagtttgaacccttttataactcttggttacttgttggggggtggagtttggttcatagcagggaagtatacttacagtattcataattactgttcactatgggtcagccatgctattaaatgctttatagccatgatttctgttctcccagccaccctctgaggcaggtatcatttagtagtaccattttgcagatggggcagctgaggactggctgtgtaactcattcaaggtcacacacagaccataagttgtgtagctggagttgggtgcccacctgtctcttgttctccagatgttcttgttattggagaatggctcaaatcttctgaatgactgtagcacaggcagagaggcaggcctgtccttacccagaggattcagcaggcacaagtgggtcctgggcttcagaaagtgttggcagttcatctctaggccctctgaagagcctgtgttgccctggcagatccagcgtgatataaagcaatggtaggagtaggcttaggcctggtagggacagtttaatgagactaggacctatttgtggaagagtgagctccctggtcatatttctttgttttcttgtctagattctctggctaaggagtcagggcttcaggagttggcagtctctcttccaggtactcagggcactttgaagtcagtgcccctgcctgagcatatcacatactggttgagagctcaggttctgaaatcaagcattttgggattttaacgtttgagcctaccacttaccagtttcctcattagtaaaatggagatcactgggagataccaactcatgagattatggtgagggtgtaatgagatgatgtgtctgaagtcctttgtatagttattggtccatcacaagtgtccggttgaatgtcaaccactgctaacacccagtccccccaccctagggtgtaaccttgagggcaaggatcctagccattatttcatctctggcatcttgcctgttgcctaccacttagtgggcatcccacatttgttgggggaacagatatttccaatgcatattgatgataatgaattatttgcacataaagatgcacaactcatagtcccctcagtaggggaacaccatgttcttttttatagtgttgggggttggatataatttctgttctagtctccttcctaaccatttgtgaagagccagcgcaggtcagggctgacagggatcagaggagacatggaccagctcatcaggctttgcttgaattccctcattatgtgattccatcaaaaaacactggatgaaagcctgccatgttgaaggtactgtgctcacctgctcacacctctgttctgagtgctatgcttagaacaggcagacagtgtgatttaataacgtagtttcagagatgggctctctccagtaccttcacagagtgtcctttaagactcaggttgtatttggttgggcagggaaattgtctagtattctggagcccctgagaaccttattctaatctgccttaaaacagactgatggagctagacagcactttagagacctatttgctattggatgaggagcctgggactcggaaagtgaatgtgactcttcatgcttacagagctggctactggtggggctggcacgagagctgagggatgttgttcacatcccacttcagtttatcctcctgccttttggcatgggttgaggatatttctaggaatctgcagacttaccaggtgcttcagaagaaatgggaaataatcacgatgataatagctgccatgtattgagtgttcactatgtgctgggcacagtttaagtacttgatatattattaattcacttaatcttcatacagacaatcatatgagtccggtactgttttcccatccttcagctgaggaaaccaaggtacagataggctaaataacttccccaagatcacactgctggaaagtgttaaagttatgatttgaacctaggcagtctggctccagagaccgtgctgttttattttttaactttttatcatggcagtgttcaagtgtaaacaaaaaaagaatataatgaacctcagtttcaagaattactgatgttttgccattcttttttcattccatcggcactcttcccctctgccactttttttttttggctggagttagaagtctgactgtgaaccactctcttgccctatgcgtgcccagcctggtctcccttcttctccagatgctgttggtgttgcatggccatagcacaggcagagaggttgtcctgtcctgaagccagaaaatttactaggcagaagtgggtccagggcttcagaaaatgttggcagttcagctttagggcctctaaagagcctgtgttgtcctggcagatccaggggatagtgaattaggaattagttttaaaatgaggccaggcgcggtggctcacgcctgtaatcccagcactttgggaggccgaggcgggcggatcacgaggtcaggagatcgagaccatcccggctaaaacggtgaaaccccgtctctactaaaaaatacaaaaaattagccgggcgtagtggcgggcgcctgtagtcccagctactcgggaggctgaggcaggagaatggcgtgaacccgggaggcggagcttgcagtgagccgagatcccgccactgcactccagcctgggcgacagagcgagactccgtctcaaaaaaaaaaaaaaaaaaagaatccctggctgacatttttagtttacccaaagcattttaggatttatttccaactgataagcgttcctttcctttccttccctttgtactcctttccctgtttgttttaacagaacacagcatatcatacctaacaaagattacagtattacttgaatgtcatctgacacccagtccagaatcacagttcttgattatttcaaaaatggctttaaaaattttatttattttttaatttttttgttgttttagagacagaacctcactctgttgcccaggctcaaggcactcctgggctcaaggcaacctgtcaccttagcttcccaagtagttgggacttcaggtggacaccaccaggcccagctcaaagatgtctttttaacagctggtttgttcaaatcaggatctatagaagatccacacattatatttgattgaaaaatttcctaaatttctttcagtctgtaagtttcctgcttttccttcttttaaaatgccacttagttgttgaagatcctggttctttgtcctgtagaattttccacattgtgggtttggctgattgcatcctcacgacatgtctcttctgcatgatggggacttgatagagtcaggttcttgttttctgtcttttccctttttttttcttttttttttttttgcaacaaagcattaaaggtggcaccatgtgccacctttaatggttattaatccatttatttccaggttattaatcattgtgctgtgcagcctgattagtcaggcctgggttataaatcatccctggagcactaggaggggaccctaggattggtccttaaaaccatatggactatatgtggaaggatgtttctccaaaggaaaattgtggtgacattctggaaaaaaacaggacctggaggctgggcagacaaaaaaagttgtatcatgtgaaactcatcagctcttctcagcaattaacgtctggattttgattacaggtgcagtctttgcaagccacatttggaacttttgagtccatcttgagaagctcccaacataaacaagacctcacagagaaagctgtgaagcaaggggagagtgaggtcagccggatcagcgaagtgctgcagaaactccagaatgagattctcaaagacctctcggatgggatccatgtggtgaaggacgcccgggagcgggacttcacgtccctggagaacacggtggaggagcggctgacggagctcaccaaatccatcaacgacaacatcgccatcttcacagaagtccagaagaggagccagaaggagatcaatgacatgaaggcaaaggttgcctccctggaagaatctgaggggaacaagcaggatttgaaagccttaaaggaagctgtgaaggagatacagacctcagccaagtccagagagtgggacatggaggccctgagaagtacccttcagactatggagtctgacatctacaccgaggtccgcgagctggtgagcctcaagcaggagcagcaggctttcaaggaggcggccgacacggagcggctcgccctgcaggccctcacggagaagcttctcaggtctgaggagtccgtctcccgcctcccggaggagatccggagactggaggaagagctccgccagctgaagtccgattcccacgggccgaaggaggacggaggcttcagacactcggaagcctttgaggcactccagcaaaagagtcagggactggactccaggctccagcacgtggaggatggggtgctctccatgcaggtggcttctgcgcgccagaccgagagcctggagtccctcctgtccaagagccaggagcacgagcagcgcctggccgccctgcaggggcgcctggaaggcctcgggtcctcagaggcagaccaggatggcctggccagcacggtgaggagcctgggcgagacccagctggtgctctacggtgacgtggaggagctgaagaggagtgtgggcgagctccccagcaccgtggaatcactccagaaggtgcaggagcaggtgcacacgctgctcagtcaggaccaagcccaggccgcccgtctgcctcctcaggacttcctggacagactttcttctctagacaacctgaaagcctcagtcagccaagtggaggcggacttgaaaatgctcaggactgctgtggacagtttggttgcatactcggtcaaaatagaaaccaacgagaacaatctggaatcagccaagggtttactagatgacctgaggaatgatctggataggttgtttgtgaaagtggagaagattcacgaaaaggtctaaatgaattgcgtgtgcagggcgcggatttaaagtccaatttctcatgaccaaaaaatgtgtggttttttcccatgtgtcccctaccccccaatttcttgtcccctcttaaagagcagttgtcaccacctgaacaccaaggcattgtattttcatgcccagttaacttatttacaatatttaagttctctgcttctgcatttggttggtttcctgaagcgcagcccctgtgaataacaggtggcttttcatggatgtctctagtcagagaaaaatgataaaggcttaaattgaggattaacagaagcagattaacctcagaaatcctgtctggctggcagatttcaagtaaaaaaaaaaaaaaggtgggttggggggacccttttctttctagttgtctttaaggaaaattaattttacttttttttttgttctggccgaaatttttatgagatat

SEQ ID NO: 5913 - DNA, 6000 bp, Homo sapiens
gcttcttaaaagagtgattcccacacatcagtcattcacagaccatcttctcaattttgctcttactctatactattacatttgatatttttctttgtttttcttgagacagactctcactctgtcacccacgctggagtgcagtggcacgatctcggctcactgcaacctccacctctagggtaagcaattctcctgcctcagccttctgagtagttgggactacaggcacccgccaccatgcccggccaatttttatatttttagtagaggcggggtttcactatgtcggccaggctggtctcaaactcttgacctcaggtgatccacccacctcggctcccccagagtgctgagattataagcatgagccactgcgcctggccacatttgatatttttcttaaatcagctcgttgtattgtccaggctggtcctgaacttctgggctccattgagtagctgggactacaggcatgcactactgtacccagcttcagactttttttttttttttaaggcaaatttgttgaaaaggaaaccgtgtcacctgcatcaataggaaactgtagtagaattgcatcatttccaataaatttaaggtaactgcaaaaataaacacaataaaagtaaaccaccgaccagcgatggtggctcacgcctgtaatcccagcactttgggacgctgaggcagtaggatcacttgaggtcaggagttcgagatcagcctggccaacacaatgaaacctcgtctctattaaaaatacaaaaactagccaggtatggtgatgggtgtctgtaatcccaggtacttgggagggtaagacaggagaatcacttgaacccaggaggcagaggctgcagtgagccgagattgcacccctgcactccagcctgggcgacagagtgagactctgtctcaaaatagaaaagaaaaaaaaaagtaaaccaccttactcggtcctcctaagtcaagcccatgagctggaagcctgtactagggagaagagcaggtatttgagatgttcaagtcctattagcaccaaatggaaactttctccttgatacaatgatagaactgaagaaggaatccctttcctgagtcacggttctgcagcatgtagtatcttcaccacatggcgttaacaccacctagtggtagcaggtccaccctggggaaagactggttctggctaaagcactcttgacccccgtctgggctgagcactgtctagagaaaacccctggactggctcccagcctgaaggggtgctgtgactcaaggtgagcctcccgagcagcagcctccagcctcccccatctctaggcgtcccccaagagccatctttataaagtgctgcttttcatatgttgtggtcactcccccactcaaagacctccatggctccccagtacttcttgggaaaagtccatggctgtcattgctcagtggtgtgatcttggcccactgtactcgctgcctcccaggttcaaatgattctcctgcctcagtctcccaagtagctgggattacaggtgcgtgccaccacacctggctaatttttgtatttttagtactgatgaggtttcaccatgttggccaggctggtcttgaactcctgacctcaggcgatcctcctgcctcagcctcccaaagtgctgggattataggtgtgagccaccgcacccagccaaggcctctgagactctgagccaactgcctcctacagccttttctgtgctattcctgatctgcttgattccatcttacccaactcccctcttcccacagagcccttgcacccctctctgcttaacactcagctcagatcctcagtgtcttcacgccccagccacctcctaaaatttctctagcacaggagtggcaaatacatggaaaggacttccagcccaggtgtctggatccaaagctggcactgtaggtaaaaaccccatgctggcaaaattatctcaggagctgggcacagtggcacacacctacagtcccaactactcaggaagctgaggtgggaggatggcttgagcccaggagtttgaggctgcagtgagctgtgattgtgtcagtgcactccagcctggttgatacatcgagaccctgtctaaaaaaaaaaaaaaaaaaaaaaaaatcccccttgacaatcactcataacatattgtgtacacaattttgtgtattcagcccactcacataatttttttttttgagacaagatctcactctgttgcccaggctggagtacagtgatgcaatttaggttcactgcaaccgccacctcccgggactcaagtgatcctcccacttcagcctcccaagtagctgggacgacaggtgcccaccaccacgcccagctaatttgtttttgtttttttttttgagatggagtcttgctctgtcacctaagctggagtgcagtggtgcgatctcagctcactgcaacctccacctcctgagttcaagtgattctcctgccttagcctcctgagtagctgggactacaggtgtgtgccaccacccccggctaatttttatatttttagtagagacggggtttcgccccttggccaggtttgtcccgaactccagacctcaggtgatccacccgcctcagcttccccaagtgctgggattacaggtgtgagccaccgtgcccggcctaatttttgtattttttgtagagatggggttgcaccatgttgcccaggctggtttcgaactcctgggctcaagcgatctgcacgctgtggcctcccaaagtgccggcattataggcatgagtcaccacacccggcctcctcacataattcttaagccccctgtcatttgggagccatgagctagactaaaaaaagaacaaaagaagggtcttgatgcaggtatatgaacatttgaactattcatcgtctttaagaccagtaccaactcctagtggtgaaaagggtgatgtgtggagaattctagagtgttctcaccttagggtgtctccctttggtgtttaatatgaagcctctggaaccttcatatttgttaatggagagtggacttatttgggtacctctcagtgaagaggctgggtttgactgtcaggttcatctcatggagcgatgccatctactggtaatgcctggctggagggagctgcctggaaatgcagttggatggaagtattgtgcttgattagtgatgtctgccatgaaggtggaagagggtggtggtgttagtggttatagccattcctatcctagttccacagcaacaggctggagagagtcttttttgtgtgtctctctttttctttcaaatgtgactaacttgagggcaggggctgcattttaaatttttctgcccccatgaagtgtctaggacagggctgggcagataggaagtgtctacctgacatccaaatagtccattgtaagtgggtgttgaggtgctgggaaggtatcagctccctttctctccctttgcagatggtgtctatgagataggcggcctcgttcccgtctgggtcgtggtggtgatcgcaggcacagccttggcttcagtgaccttttttgccacatctgacagccagccccccaggcttcactgggtaagaagcccgggttctccgagatggggggggagggatgctgatgtctcccacacagatgtcctgtctgcatctctgaggcactttgaccagtttgatcaggagtcacacaaagacaggtaaccgaactttaaagctgcttttgagagtgtttgtatctatacagggtttttttctttttttttttggtaatagcttaattttgttgagatgtaattcacataccatacaatttacccatttaaagtatacaatttaatgttttttattatagttacagagttgtggaatcatcacaatcaattttagagaatttcatcaccccaaaaagagacctcatgcccataagtcactccccatttccccaccccccacatagcccctggcaaccacgactctactccgcgtctctatgggtttgcctatcatggacattttatataaatagaatcctacaatatgtgatttccttttttttgagacagggtctccctctgctgtccaggctagagtgcagtggtacagtcatagctcactgcagcctcgacctcctgggctgaagccatcctcccacctcagccccccaagtagatgggactacaggcgcaagccaccacgcccagctaatttttgtatgttttttgtaaagatgaggtctcactatgttgcccagactactctcaaactcctggcctcaagcaatcctcctgcctcggcttcccaaagtgccaggattccaggcatgaggcactgtgcccagccttgggtttctaaagacactccagggatagaatgggatggcctttgtgggtgtctttttccattttccctagtctaggcactctaaagaatatttaggggtttgtccagagactttttccttaaaagtttacttaaattagctgggcgtggtggcgggcacctgtaatctcagctactcgggaggctgaggctggagaattgcttgaacccaggaggcagaggttgcagtgagatgagatcgcatcatggcacttcagcctgggtgacagagactccgtttcaaaaaaaaaaaaaagtttacttaatattttcattttggctgggcgtggtggctcacgcctgtaatcccaacactttgagaggccgagacgggtggatcacctgaggtcaggagtttgagaccagtctggccaacatgtcgaaaccctgtctctactaaaaaatacaaaaattagccaggcatggtggcgggcacctgtaatcccagctccttgggtggctgaggcaggagaatcgcttgaacccaggaggcagaggttgcagtgtgctgagatcgcgccactgcattccagcctgggcaacagagtgagacatcgtcctaaaaaaaaagtttacttaaaattttcattgtttagtgcttaatgattttttaaaattttagtttttacttttggaaactcaatgaatgtaccaaccgaagggtgttgaattttcagcaaatggatcatttagggaagttgccttttactacttagggaaaattgtctttcactgttttttcaagtaccgacgtgtgccacaacatggatcacccttgaaaacatgatgctgagtgagagaagactgtagcagaggatcacacactgtggcattccattgatgtgaaatgtccacgaggcacattcagagagacagagagcagagtagtggtcgagttgggctggtggggtggggctagggagtgaccgctaatgagtacagggatacttattgggatgatgggtggtatttggttcatagactggaaatctgatgaaagtgataaggaaccctttccagacaaaataatatttttttttagtatatgaaagggaggtttttttgtttttattttttttcttttttcgagacagagtctcactcagtcgcccaggctagagtacactggcatgatctaggctcactgcaacttctgcctcccgggttcaagcgattctcccacctcagcctctcgagtagctgggattacaggtgtgtgacaccagcctgactaatttttgtatttttagtagagacaaggtttcaccatgttggccaagttggtctcgaactcctgacctcaggtgatctgcccgcctcggcctcccaaagtgctgcgattacaggcggtgagccaccgtgcccggcctgaaagggagtttattaaggaaaaaagaaaataatattgaactcacgttttattgagcactaactttgcacaggcaccaatgcatatagtaacgtgttttatactcataataagctcatgaggtagatactgttatcatcccgtttcacaggtgaggaactgaggctgtgttcctgttggggctggccttggtcccacagcaaaccattccctccgcagc

SEQ ID NO: 5914 - DNA, 6000 bp, Homo sapiens
gcttcatccaatctcgggcccccaagttgcaactcttccacaatgacagccgcaaacacaaagggatcttgcaaagcactttatatacgtcagcgcatttgactcccaaaacagctctaggaggtaggtgctaaatgaggaaacgaaggcaccaaaaggtgaaggctcacctaaagccacacagctggaagtggcagaagcagaatgggaacccgggcagcctggttcctggccctgccattcacccctctgccatctagaagatgctactggtggcccacccgagtccactggggggtgatgcctgctgctgagggttcacatctgtgctctctggaggcttcccttggctactggaaggcaccctgccctggagataagtgtctgggaagttattcactcctctctggccccctcatccaggagccagtaaccggtggtgtgggcacactgtggtactgtgggctctgcctggagctctccgtggggccagctgaggctggacgtcctctgaagccacttccttgcccagctgctccctcccctcccctgcttccctgactccctcgctgaagccccattccagaccctgcttctgacaaacctgaactaaggcagcatctttgcccatagaatgacccagaagctggcacaccgttgagccaagaagtgcagtaggctgcggggattttatttctgcccccagaccaaggcaacggagccctcacctgcctgccacccccacactgggcccaagcaagctcaggtgagcgcacatacatccaccgtggcgggctcctctcgggtgaagccatcaccgaagccctcatcgtccaccaggtcgggctcacggcagcacatgggacagaggctgttgcgcacagcagaggctcggagccagacgacaaggttccaacgctcaccagtgcccaagggccgggctccatgcagctggccgccacggtggaggacaccctggcccaccacgtgctccacctccaggggctccgtcagggctgtgggtgcctgcagatggcacgactcaggcctgggcactcacagctgccccaggccctgccgcatgggtcacacactcacctggaagaggcccccaaaatacagggcgccccctgtgaagaccttgcccaaggccacattgagggtgagctcggcattatcatagtggcagcccagctccaggtcctggcccggtgcgtatttgaccacaaaggcccggtggctgtcgagccggcccccgccacagtcagggtacagcagggccatcagcggctgcaggaagcgctcccgcagtggtgtcatcagcggctcgtccagcccgagctcgtgcagcagcacctgggaggggattcctggggtcagcaaggaaactagagggctgcaaccctgggcttccactccacggtgatcccactgtgaccttctttcgcagcccgggcaggcagcccatctgcagaacctctgacactgcctcctgaccccagccaccccctcctctgccaccggccaggcctcacccaccccgtagttgttcatggtgttgggcctccccttaggcatgtccgattgctcgaagtgctccagctcttccagcagggcctggcagaagggcgctgtgaaaacaggcacccggtagatgcgcttctcctctgtggaaggagggatggtctgttggcctgaatgtggccgtgggccggccaggcctgggcttcagtcttcctgtttcatcacctgtgccatggagatgaggcctttgcttttcagggctattgtgatgacttaaggaagtaacatgaggagcaggggaggccgattcccatgccccccacttatgcccggaacctttccccagactctacaagtgtccacagggctggccctgggagctcacatatgggtcctgaggcccagagaggggaaggaagtagcccagggacacccagcaggccagtgacagccaagtcgggatcacagagccaacttcaggctctctctgcacctcctttcatctgatgagccaccgaagtctgtaccccaactcagaagtggctctgggagcctctgtcccccagcaggaaggccagaaggggctgttctttcttgctgggccctgagggggaagaaaccaggctgagaatggaaacctaaacatttcttggcggacgcaccaatgcccaggggtgcagggctagtgtgcccacgatggggccacctcgcagcctaggccctgccccagccaacagcctcagcactatctcagctgccggggagtggaaggcaatgaggagagcacccccaggctgggaggagggggattcattccacccatgactcccaacaaagcacaggctccatgaggggaaacttgtatctgcctcccacaggagcccctagcccaggctatcagtgccaataagaataggaaacactttccaaacactacgtgcgggccctgtgacaggcactctatgcagattaactcacttgatcgtcgcagtgccttaagagagggggttactgttgctcccattttacagatgaggaaactgaatcagaggttaaacaacacgcaaacctcccttgcccagcatttcctgctgggtttagccaataagtgagcccagcaagaaatccgaagagaagtggggcattttttgccctacttggagtttggcatggccgcaggcctccgcccagagccacaactccaggtggtaactgctccctcctgttgccagccctggggggccgggctttgccattccttactggtccctttatcctgcccatacctgtctcaatggtccctttaagatcttggatcagccctgtttgagtgtgccagctgtcccacacatgacacaaatatccactatttgctggatgagggcacgaaggaagggtgaaggaaagaatgaagataccaggctcatggcaggtattgaatgaatgaatgcggatgtcctgctcctggcaggttggtcccactgacccttccagctcctgctggtttggtttttggaggcagagatggtggctggagggaccccagcatcccacacccaggtttcccaggctgccattccctggtcctgccaggtctcagggccaggacctcacccgatactgtctccagccgctggagaaggcccttgaggtctgcgtctggggacacgctgtactcagtcacggccaggaactcgggggccagagctgcatcctgggagcaaaacacaccagctgtggggcaggcagcacccccagccctggatgctacctcctctttccagtaccggccttcaagcactctggctggctggtacctgcagtgagtcgtagacctcaggccgtgccgggtggtaggaactcgcgatgagggctttcctagctgctgactcctgccccagccgctgccgccgctccacctcctgctcaagctggggtggcacagggttgttaccaggtggggcctcccatcctcctgaggccactgtacagatgaagaaactgaagcccagaacgccagacagggcccaggctggaagccaagtctagcctacactcctgaatctatctgggtcaactgcaagttccagactgttagctgaaagggacttctagaaggggacccatcctgtttcaggctgccccaacctgagcctagctgggatgagaacccctagatgtacctcaaccatctgggcccacacagggacaggagacagtcatggccaagtcctgtgttccagaggttgctgaggactctcctgggaagcttcccaccactgactccaggggaaggaggaggagggagtggggcagcagccctggcagcagcctgcggggtatatggtaaggtgtgaggagcccaggggcctggaagctgtggctgggatcacatctgctcctgctgtaaaagcttgggcaagggatccctctttaagcctcagcttctcaatccaaaatgagagtggtgcttgtgcttatctcacagagctgttaagaacggcatgactaggcaacttagcaacttagcatttccccttctctctcctggtgccaagactcaggtgtggagggatgagtggggggcaggaaggaggaaagtgagggcctaagtgacccttcagggatcagggactgaggctaggctcaagctgtgtcctcaagctgcggacacaaatctaacgaggaggagctgtgcaggggcaggggactggtacctctgctaacagctgctggaagtccttggcgctaacacagcctcggctgcgcaggatctgggagcagaaagaacactgagcatgactgtatgacctgaggaaatcccttcactctctaagcctcagtttcccctgcttaaaatggggagaggagccccgacctcaaaggatcatggagagaatgaactgcggaaccctgtcaagctcaggacagggctccgggctggtgttgctgtgaggcggcaagctgagcccggccctgtcctaagcaccctacatgcttgttcattccttcctcacaatctcacagggagatactattacccctttacggtgagaaaaccgaggcagagagaggccgtcattcttgtatttgaagatacggtgcgcggcgtgcgcaaagcaaacgaccctggggacgaacttccctcctccactacccctctctgcccactgctccgtagggacgacagcggccactcaccgggccgtagtcccggcgcagctgctgctcgcctcggaagcgcacgtgcagcccatagcgcgccacgtacaagttatcggtgcagaagcaggcgcagcggcagaagtgccgcggagcccccaccgtcgccatagtgaagcacccacagccctaccagcttccgtagagagacttcgggcacgcccccaaccgcgggaggcgcggaaccagcggccaaggggccgctctaagttcccaagggcggaaaaggacgaagacgcacctcgccaggaaacggtctgcggagaaagatgctcctgggccgggttgggaccggcggcctcctcgttccgcctcccagttttcccactacgaggcagggactaatggctccactttacagacagctgaactgggtcgtgccttcacaggacggggagaggaagggactcggagccccaaggcctttgacttaaacgccgacccaccccccgccgtctgcccggagctcgtggagaaccagccgagctgaggacagtttaaagagctcggaggtccgactagttcccgctggtgcttcaatcatccagccctgtacgtttcagtttggatttagcatctaccccgggtccctgcctggcgcttccggtccctccgccacagtctgttggattacctcagattgccccagtgagtgtctccaccaaaacgctccgtctcgcattacttccggtggcgttcccaatggacgcgggagggcggggtcaggtgtgggagggcgacggggcgtggtctcaccgcagccaacaaatgacaactcttgcagaccgagcctcttctctccccggacctttgctcaggaatctaccagcattaaacctttgagctaggtactattatatcaccgtcttacagatgaggaaactgagacccagagaggcacagggacccgccgcaggtcacacatccagtaaggggcaaatatggcgtttgaaccctacagagttccccagttaaccaccacagggcttctgggagtggtggaagtatgtgggatttggggttttctcgtgcagagctgcccggcccgagaaggtgtttaacgttttacagtcgtcttgattgcccagtgatagtgagaggccctgctatctaggaaaggatccatttccccagatcaatgttcattacccgcctaactgccctttttccccaggaggcccagggcaggtcggctccccagccacccaccaggcaggcctggcacatgcagcaccccaccccaccctcaccccc

SEQ ID NO: 5915 - DNA, 6000 bp, Homo sapiens; identical to SEQ ID NO: 1759

SEQ ID NO: 5916 - DNA, 6000 bp, Homo sapiens; identical to SEQ ID NO: 672

SEQ ID NO: 5917 - DNA, 6000 bp, Homo sapiens
gcggcaggcaccgcgatttttggtgcatctcatggatttgctgagcgcacctctcaagtgtgatggttttgccaggattcagaaagctgttgtgagtcaggccggcagccgaccaccagacagcgacctccagacagcgaccacccagacggcgacctccagatggcaaccgccagacggcgacctccagacggcgacctccagacggcgaccacccagatggcaaccgccagacggcgacctccagatggcgaccaagcccttttttggtgcaagtttggcttttggcaagttggagcttcttctcaattcaaccattaagatggtcagcttccctgaccgcagcacagcctgcccatgccagctctgcacagccccacagcccaggaggacggggctcgggcctcaagcatgcctgtgtctcaccgccagttaaccccactcgccacccatctccgctcagagctggggttcaggaagccgtccccagccagggcgcacctcctgcccaagcctcatggccccactcagtcctccagctgcacccacacgtgatgagtgtgacgtctgagcctcgcctgcctcccctctagatgacagtttcacgatgaaggccgcatgtccccagcgcttccaggagaaccctacgagccctgttgctttgcttgccttgaccagaagaacaggtccgacttcacgggacggcctcgcccgcaggccctttgccaggcccacagcgccgccaaagacaacgtcagtcctgaatgtacagggggagtttttgacccaacgcccacgcgcagcagggcccctctcctgtctctcctctcgctgtgatgtgccagcccggggcctgcagacgacgggccccagggacccacccatctctggaggagtctcctgttttcccatctctggcctctgcagttagtgacggcccctcagccttggtgtgtcacccacgccacccgtgtcttcctcgtgtgaccagaaaggggtccccatccagaccccaagagaggcctcttggatcttgtacaaggcagaattcggggcgagtccacagagtaaagtgaaagcaagtttattagagaagtaaagaaatgaagtaaagagaagaatggctgctccacaggcagagtggcccccagggctgctggttgattatttactaattaacttttgtggttattttttgatcatttgctaaacaagggatggattattcctgagttttctgggaaaggcagcaggatttccccgaactgagggctccaccctttttagaccacgcagggtaacttcctgacgttcccatggcatctgtgaactgtcttggtgctggggggagtgtcttttagcagctaatgcattataatgagcataaaatgagccgtgaggatgaccacaagtcactcgttgccatcttggttttggtgggacttggcggctcctttactggaacctgtttgtttgtttgagatgaagtcttgctctgtcactcaggctggagtgcaatggtgcgatctcggctcactgcaacctttgcttcccaagttcaagcaattctcctgcctcagcctcccaagtagctgggactacaggtgcacgccaccatgcccagctaattttttattttttatttatttatttatttattttttttagtaaagacggcatttcaccatgttggccaggatggtcacgatctcttgacttcatgatccacccacctcagcctcccaaactgctgggattacaggcgtgagccaccgcacccggcctactgcaacctattttatcagcaaggtctttgtgacctgtgtcttgtgccgacctcctatctcatcctgtgacttagagtgccttcaccatctgggaatgcagcccagtgggtctcagcctcatcttacccagcccctgttcacgatgtggtttgaatggctctaatgcttggacttccgccctggctgtggggccagatggtcaggtagcacgggggtgaccacaggcatcgtcacccaaaccaggacacctgagagttaccagaggtgctattaataattaccccaagacaggggtatcaactcggattgtcttgggcagtggggatgcatggctagtaactagcattaactggtactatgtgctgcatgcaaggaagccacaggagtgagggtctttgccagctgtacctgccaaagcagcatggatgggtcagctcttggatgtgtaacaatccactctgaaatgttgcggcctaagacaaccatttccttggcccacaactctgggttggcacatggtctatgtggagcagagcggctctgctctcagctggccttgctgatgccggcagtcagcagccaggtgagcggggttggctggttggggtggggaggaatgggctcagctgggcggcttctctctgctccacatggtctctcatcctcatgctggcggccaggttacaagacagagatcggtgtgagtgcagtctcctgaggcccaagcttggccttggcactgggtgggttctggccctttctgttggtccaagcaaatcacgtgacgaaggcctagggtgatagcgtccccctctcagtggggagagctgcacacacagacgccagaaggcgagtccagcttatccccagttgctctcagtgcagagtgccagccgggctccggcctccttcacctgatcttcctctagtgtggccaggaaggggaggggcccgggcctcctgcctcttgagagcccctgagaggggggccaagtgcctctggctcctgtgggaggattttgcctgatccttaggtgttggtctcctctggcccacagagtggagaagttattgccaatattcatctgaaatttatagaggggttaaactgtttcccttgagactgtgatgggagagcctttaaattctccctctgcataagcatcaatctcccggggagcgcggcacaaggcagatgatatactggtccctggcttcaaaatatgtgaaaaactacacggtcattaactctgacgcagaaaagagacctgccccgggtgtggggacgccacacaccagtgctgcttgcgcgaggagtcgtggtggggggtgggggctgtcttgttctttccctgttttgcagggattggaaaggggatgttgctgagggcatgggggttcactctccgactttatcactcctgagctaatggccctgctgaaaagccaggtcacgcaagccgtgggcccttgtgcttagggggcacctcacacaccccgaaagctcaggggtctgcggcccaagcccggagactgaagcagcccagtccccggctgtgacaggtcctcagctaatgatggaagttggccgactcccaccgcccgggagcctcgcctctcccgtagcttcggtccttctagagacacggtgggggacccgagggccgagagacctgaggctgcattcacccaagaaggggcctcggcaccacccgcaagctcagcacacactgacggggctggcacctgtggagctggcttggggaggcctcgcagaccgcccagcagtcccaccaggttcccatgtggaatcgccccagcgccacagaaggccccggggacagagtggccgtaagtggctgtggggttcctaaagggaacacattcgttccgcagctatttatcaagcacctactgtgtgcccggcctcgctctgagcactgggaggcagctgtgagcagaagcgacagaaaccctgtcctgcggagctgagccatggggagggacaggcagagacggggacggatagcaggcggcgccatactgaggggtgtgagcctctggtccggacgcccagctatggggcaaggacggcggctctaaacaggatggagggagaggactcaccctgaagacttgatggtgacatttggggtttatttttactttttatgttttcagacagggtctcactctttaacccaggttggagagcgttacgtgatcttggctcactgcagcctcaacctcccgggctcaggtgatcctcccgcctcagcctcccaagcagctgggaccgcaggcatgcaccaccacacctggctaattttgtttttttctgtggaggtggtgtctcactatgttgcccaggctcgctggtttttttaatggacaaataggattgtccccgttcacggggtatggcgtgccgcactcaggtcagccgccatctccacatttgccatttccttgtgtgggggctcggctcctcctcccagttgccggctgggtcacggtcaggtccacggtcctccctcagcggcaccagcactggctcctctctgcctgtggttttggtcctttttttttttttttgagacggagtctcgctctgtcgcccaggctgcagtgcagtggtgtgatctcagctcactgtcacctctgcctcccgggttcaagagattctcatgtttcagcctcctgagtagctgggactacaggcatctgccaccatgcccagctaatttttgtatttttagtagacatggggtttcatcatgttggccaggcggtctcgaactcctggcctcaagtgatccacccacctcggcctcccaaagtgctggaattacaagtgtgaggcccctgtgcccggctggttttgtgcctttaactaatctctctggcactagagctttgaaggctggaggcagtggagcatgcagagacctgggaagggcgcccggcgtgggcaccacctgtgccaaggccctgaggggtgcacgtgggggtgctgggaaggccaaggtgcttcgaacccagggggtgggcaaggcaggcgtcaggagccctggggggcttcgtgttccccagcgtgaggcccgaggacaggattctgtggtgggtggggggaccgagtcaccgtggcctctgtactgggggtagacaaggaggctgaaactgctggaggtcgtcccagaggccagtgtgccaggcgcttctgaagacgggtgggcagacgatggaggacgaggctctgtcccgcccctgcagagcttccttcgttccggccccttccagcgaagggcagggctccgaggtgcttcccccctccttctcacgaaacctgggtggtctcaggttgagggtgggagacatccgcggagtgggagggcggtgggcgggattcaccagcggggccccttcccgctgcgaacagaaatcccgaccctagtctggaaggcagaaaggaagccccggctcagggggctggaaaaccccaggcttttctcaggcaggttgtcccacagcagagacaacagacagaaacccagaaaccacctgccacgatgtgaacctgatgcagaaacgcggttcgctccctcgggatgcaaaggccaacttcagcctggcacggcggcgccgcggactccaccatcccggggaaggagccggacccctgtgggtgacgtgggactgtggggcgggggtgtccccggctgggctgagctgagcagcgaggaggctctgggttgccggaccggggtcagggagcctggcgttagctgcgtgctgtgtggtcatctcggcgaggagggagcggctccctcctgccccggactctggatctgtcctgcggtgggcggtgtcggagcagccgtaagtgatcggcgatacggcctcccggttctctctctccctgggactcggcttcctgaaggcagagagtccgggggagggaggagccccctgctcccccacacaagggactgggcctctggggtgggctgggctgacaggcgacccccggaggatgcagctaggggacgtgtgagtgtggccctctttgggaaaagggatctttgcagacatgattaagataacggcctggagatgagagcagcctggacgaggatgaaccagagtccagggatgactgagggatccgagctcagctgggcagaggctccaccccgtgcgcccctgcagttgg

SEQ ID NO: 5918 - DNA, 6000 bp, Homo sapiens
cctcaacctctcagactcaagctattctcctacctcagcctcttaactagctgggatcacagacatttgccaccatgcccggctaagttttgtactttttgtagagacaaggttttgccatgttgcccaggctggcctccaactcctgggctcaagtgatgcctgcctcagcctcccaaagtgttgggattacaggcgtgagccaccgcacctggcctgttattttttaattagctgtggaatttttttttcccagataaaatattataaatttattaaaactttatttctcaagaggggaacgtgaaatactaattccaccaaatgttccttttacatctagagttacaaatatacacaatagaacttttcttcaattttcgttacttttttgtttgttttgagatggagtcttgctctgtctcccaggctggagtacagtgttgtgatctcagctcactgcaacctctgtctcctgggttcaagtgattctcctgcctcagcgtcccgagtagctgggattacaggcgcccgccaccatgcccggctaatttttgtatttttaggagagatggggtttcaccatattggccaagctcgtcttgaactcttgaccttgtgatccgccttcctcagccttccagagtgctgggattacaggtgtgagccaccacactcgactgttacatattttttaagccaaagaacaatacggaaaagcatttgttctacttacaacatagcttggaaacaaatcagtatacaaattaatacacttttttacagctgcagtgcatttatatgaggtatttaaagacgtaggccaagccaggtgtattttagaagtatagtttgggccaggtgcagtagcgcatgcctgtaatcccagcactttgggaggccgaggcgggccgatcacttgaggccaggagttcaagaccagcctggccaacatagcgaaactgcatctctactaaaaatgcaaaagttagccaggtgtggtggtgagtgcctgtagtcccagctacttgggaggctgaggcatgagatgtgcttgaatccaggaggcagaggttgtagtgagccaagattgcgctgctgcactccacacttcagcctgggcaacagagccagactttgtctcaaaaaaaaaaaaccaacaacaaggaagtatggtggtgtagcctggacaacaaaaagagaggaagctttaaagcaatggtggctccagagccctatctgctgttttttcggagacagggtcttgccctgtcacccaggctgctggaattcagtgttaccatcatagctccctgcagccttgacctgttgggctcaaacagtcctcctgcctcagccccccaagtagctgggacataggtgaacaccatcacacctggctaattgtttaaaagttttctgtaaggacagggtctcgctatgttgcctaagcaggttttgaactcctggactcaagcgatcctcccagcgtgctgggattacaggatgagccactgccgggccctcactgctttttccaaatacctttggaacccaggttcagcattccttaatcagagtttttaatacatttttttggtacccaaatgtatcccttcattcccagtaacgttcaggagggaggagaattccaggcagtcagtctgctttcatggtctcgaaacacagtcccagcaaaggctgtcttccctggctccgtgcaccttctcctgaggtcctggagcgtgtggcttctgtcacgtctcgcactgtgcactccaggaagcagcatggagctagaggcgatgcgggcaggtctagcctcaggccccaggctgtcctcacacctccttttcagtgctacttcccttggctgacgccgtcctcctcagggccatggtcctgggctttttcacgagacgcttggccagcgtgggcctgagcacctggaggtctgggccgggccctagctggctgaaaaggctgtatccctggaatggcacctgtcgggcgtctggctgagggcaggccctggtgtgtgtctggctggatttgttcagttaagataagcctcctcacctacaggggctcagagatgcccctcctcacccacaggggctcagagatgccttgtcaatggggacttttgggtaggtcctgctacaaaccgcagtctgatgagctacaaacagcatgatgagcgctggctgatggcccgcccgccctcccactcaggcacgcagagcccagacagcgcatattttgagatgggaagacgtgtagtgggtagtggggcttgcgtgggagacactgagggggcagccagtgaccctcaccctggggcctccagggacaggctggtctgcatttcttgcttgaaattgagcaactttttactttgtgggttttttttttaaggttggacagatgacccaggcaggtctcctggagcacctgaaactcgagaatgtgtccctgtcccagcagctgacggaaactcagcacaggtccatgaaggagaaggggcgcatcgcggcacagctgcagggcattgaggtgaggctgcggccggggccgtggaagcttaggagaacagacgcagacatcgataccatgtgtgttttcttacatgttccgtctctctgtgtgtatctcttaaatattctcatggatggcgggcagtgactgctcgttaaggctttgggaccccccccccacccctcatccctcacctgtgggggcttagcatggatggcctgcagtgactgctcgttaaggctttgggaccccccccacccctcatcctcacctgtgggggcttagtgcagtgagcacttgcggctcttttcctgcaagccccgccttgggcctgggcccccggctgtcagtcattgccagtcagggatggcgctgggtacagagtgggtacggaggaaggggccagtgcgtttttgcctgacagcctgtcgaagcctagggatgagaggattttctttgcttactgagcactcagactgcattgccatttaaccctccagcaaccacacgctgtcgaggtcatggccgctgcctgcacagccatctccagaggacagaaatgcagcagccttgatagctgttctcctttagctgtggggcgctggacaatttcttacctctctgagccgcatcttttttttttttgaggtggaattttgctcttgtcgcccagggtggagtgcagtggtgcgatcttggctcactgcaacctctgcctaccaagttcaagcaattctcctgcctcagcctcccgagtagctgggattacaggcactcgtcaccataccctgctaattttttgtatttttagtagagacggggtctcgccatgttggccaggccagtctcaaactcttgacctcaggtgatccgcctgcctcggcctcccaaagtgctgggattacaggcgtgagcctcatctttataaaatggggatagtgtcacctactcgatagccttgtggaaaaattaaagaagaagaaatggtgtaaaaccccaaggcagtgtatggagggaggttctgtgctggatgttgctgggctggtctcgttgccgatcttgccagttgtacagggagctctctgcagcctcacgtggtttctcatctcctgcgactgctcccacctctctgtggcattagctgggctgcccggctgggatgagaagaatcacgttgcgtcagccatagtgcttcaagggcttagtagagaagaactgaaaagaatttcaagtttcaagttaggaatttgtgttttccctaagaagtgtaccccgatgtgaggctgtgttcactgcgggggcctctggtctcttacccggtagcaccaagcaccgctcttgtgagagcatgtccgggtctcactcccgaaaggaggcagctgtcgccacacgagaaagtcggggaggctctgctcaccagtgggtccaagtccttctcacggggttgctggcctgggctgggcctggcctcggtctcctggttggggggcggccaagctgcccatcctgggccctcagtctgcagtcggtagacaggatgaggaggtggatggggcccatgccagggcggtgggtttctctgcagagcacggggccaccggctgctgttcactattaaggtttcctgcctttttaaaaacaagtttcctgggctcaggctgacatgttggatcaggaagcagccttcatgcagattcaggaggcaaagacgatggtggaggaggaccttcagaggaggctggaagagtttgaaggtgagagggagcggctgcagaggatggcggactcggcggcatccctggagcagcagctggagcaggtaagtccctgcagcccttcaggctggacccaggccccaggtgatcccgagcagccaggactgcacacaaggagaccgagcagtcctctgctgtggggccacgtccgctcaggtgggagttgggctgtcggtcagacgctgctgctgctgcagacctgaccctgtgtttgccctgctggttcttctataccaggattgtgcgtgaaaaaaagaccctccatagtgtccatcaaaattacttgaaacccgaacaggaaaagggcatacgctctcggaggagggtcaggcgcagccatgtgggcttcattccttctccaggtgaagttgactttactccagcgagaccagcagcttgaggctttgcagcaggagcacctggacctgatgaaacagctcaccttgactcaggaggctctgcagagcagggagcagtccctcgatgccctgcagacacactacgatgagctgcaggccaggctgggggagctgcagggcgaggccgcctccagggaggacacgatctgcctcctgcagaacgagaagatcatcttggaggcggctttgcaggcggccaagagtggcaaggaggagcttgacagaggagcaagacgcttggaagaaggtaccgaggaaacgtcggaaactttagagaagttaagagaagaattagctatcaaatccggccaggtaatgcattctgctgtgttttgttttgaatcagaaccctccttgcaggaatgatgctgattatttgcttctttctttctttcttttttttttgaaacagtctcgctgtgttgcccaggctggagtgcagtgggatgatctgcgctcactgcaacctccacctcccaggttcaggcaattcttgtgcctcagcctcctgagtagctgggattacaggtgtgcgccaccatgcccagctaatttttgtatttgtagtagagatggggtttcgccatgttggccaggctagtctcaaactcctaacctcaagtgatccacccgcctcggtctcccacagtgctgggattacaggctgaaccaccatgcctggctaatttttgtatttgtagtagagatggggttttgccatgttggccaggctagtctcgaactcctaacctcaagtgatccgcccacctcagtctcccacagtgctgggattataggcctgagccattgtgcccagctaacttttgtatttgtagtagagatggagttttgccatgttggccaggctagtctcgaactcctaaacccaagtgatctgcctgcctccgcctcccacagtgctcggattacaggcgtgagccaccgcgcccgaccccttttttctttttttttttttttgagatggagtctcactctgtcgccaggctggagtgtagtgcggtgatctcggctcactgcaacctctgcctccggggttcaagtgattctcctgcctcagtctcccaagtagctaggactacaggtgcatgccaccacacccagctaatttttgtatttttagtagagatggggtttcaccatgttggccaggatggtctgcatctcttgacctcatgatctgctcacctcggcctcccgaagtgttgggattacaggtgtgagccacctattctgtctttaaatcccac

SEQ ID NO: 5919 - DNA, 6000 bp, Homo sapiens
ctgttaaaacactctgccgtcctcctttttgtgttcatatgagcaaatgagcattggtcagggtcagctttcaacagtacttgagtagtacagtggtgttaagcctgcttgagcacatgagataagaatgtctttgctgagtacagctgagcattctgttatttacatacatcagaagaaccaaattcctgagcctttgacttagagaatgataggcagaaaccattagcagcctttgcttagcatgtagaggaaaagaaaaagtgaatagtgcaaaagtctagcaaatctttccttagaggagcagaggtaggaaatagtttttctttaggtctgcttggttcttacctgttgtgagagcagcattgccattttcctcttctcttttagatgtccattttatttgtgagtatgcatcccatagctgtgcttacatatattgctgtataccagcagtttatttggtaatgtccaaagcaagtaataggttctttatctgttgagaaagcttaccaaatgacagcttgttttgcaagggtcattgttaactctgtgtcaaaatgtaggagcagttactggcagaggcagggagctcctgtgttgctttggctgatacacgggtttcaaagtggatttagatcagtggacttcacatttttttttccatcatgacattttctattacagtcctgaacacgtgtatctatacataagttcatgtatatataaattacaaaactttaacaaaatagtatttaatcctccacgtatgttacagtctgatattttaaattttattctagttcatttaaaaaaatgctggttgagactcatttaattgatcttagaacttaggtcatatccagaagtttaaaaaaacattagatgcttctggaggcagtaaggcagtagggctgtggctgagtgatttgctagacttttgtacttgattgctatttaggggtctgggagcttatagtattctctcccatcccccacccccattaggtcatttgttaaaggcatttaacaatttttaagtgcccagttataggttatagatttagattaaattttttcttcttttttcttttcttttctttttctttctttctttcttttttttttttttttttttttttttgagatggagtcttgctttgtagcccaggctggagtgcagtggtgccatcttggctcctgacctcaagtgatctgcctgcctcggcctcccaaagtgctgggattacaggtgtgagctgagccactgcgcccagccttagattcctattaaaaataggtgatgccaggtgatgtgatcattcatcgcctctccaccccaacaacgcctgctgcttcaaagagaagatgggatacgtaaaattgcttgtattgtaacctgtgtctgtagaaggacaggctaggacagtttaaataaactcctggagctgtcctttccgaaaacatttagcaacattaattcaaaacccttgaagactgctgacttactaagctaagcctctcttagtgaggctcattgctttttttttttttttttgagacggagtttcactcctgttgcccaagctggggtgcaatggcgtgatctcggctcactgcagcctctgcccccggcttcaggtgattctcctgcctcagcctcccgagtagctgggattacaggagtgcgctaccacgcctggctactttttggatgtttagtagaaatggggtttcaccctgttagccaggctggtcccaaagtgctgggattacaggtgtgagccactgcacccggctggctccttgcatttgtaaatctttagaacatagctgtgttgtcttgtgtgacagtgtcccagagtttgaagaaccttctttttcctttaaaactggaagctaattttatatgctactttgaaatattcagtttacagagttaatggtgctgtgctgtaatactgacttctggctctttgtttctcttctgcattactttactctcttcttgtgactcctaggagtgtttttgggcctaggcctgagtggaatcattcctaccttgcactatgtcatctcggaggggttccttaaggccgccaccatagggcagataggctggttgatgctgatggccagcctctacatcacaggagctgccctgtatgctgcccggatccccgaacgctttttccctggcaaatgtgacatctgggtaagtatgtcggggtgactgagtgtgtaggtatctgctcatgagttattggcatcctgcagagtgatgcaatagaaaaagttttagacacaaagtcaggagagttgtatcctggtcctaactccctattgagctttctctggacaataagtacaataataactaacatttagtgagcacttccttggtgctcagcatggtacagagtgctttgcacggattacctcattacatacattagccctatgtggtatgataactcttgttaatgtcttcattttacaaagcaggagactaaggcttagggaggtgaggccacttgtccaagccatgtggctatttaagtggtagaacaggaatttgaattaggctagttttaatatcagaatctgtgctctttttgacaatggcaagtcattttgccattctttgtctcagtttccttatttatgaaatgaggatgatagaccagattttcaccagagccctttttaggaccagatttctatcagggtctttttttataccgaaatttagtgatttgtaatgggagactgagtgtatgtatgtctggtggaagaagagggattgtgaagaagagggaactggattgaactggattgtggtcattggtaagagaggaggaaagagaagagggaaaagaaaatataaggactgatatagatagaaaaacttataaccaaagagggcctgaaatattttcaacaagacaacattggaaatacgcttaatgtgaaatctgacctttgtaattctgttcctcagcctattgctgattattatagactaacctgatgatctcatctctttaaagtttagtttagctatctgtaaaatgaagatgatcttgaacttaagcaatctttctagcttcaaattagctaatttatctttctgattcatcatcatcattttaacattggtatggaggggtttttgccctttatcccctttctttgggggaaattaatcccctttggtttcctaggaaacatctcttgggatgtgacttgatttcttctagtttttgcttctaaaatcagtgtttttctcttgataaatactgctttgccactgtactttttcattttgagattataatgacagaatagtgtaatttttgaagtgcagcgagcaattgattacccttcttgagatgtggaatagcattcaacagaacaggtaaaatcagaaataatgtcacttgcttgtagaccagcttctgacttgagaagtaaaagggcctgtttgcttagtttttgacacattatgtagttcatgaaatttgagaatcgtagcactgaaggaaactctggggaccatatgttgtgacattccacacaccatcctggaagcctctttagtttttctaacagagagcaacatttaaatgaccatagctctagtcctcttgtccatgacaaaatgtccatcagcagtgagtaggaaaaggactgtatgtgtaatcatagcccatggctaggtgtcaagggatccttgggacctttgtggcctgttagcaagagagtctgtgtgtcatttgccactttagcaagagagtctgtgtgtcatttgccactggtttcagtgttaagtttgtagatttttatgtgtagagcttagtggcagcaccttggtttctttgggaacagctggctttcagctcagcagaatgtgttacacctaatggatgttccaggatctgtggacgccttgaatttgagctctgtcacatccattccctgccttctgctcagcataaaccaggattaaacgatcctaagaatctttagcagtcttaataatgtatgggtttctctacccccttctcttcttttttcccctccagtttcactctcatcagctgtttcatatctttgtggttgctggagcttttgttcacttccatggtgtctcaaacctccaggagtttcgtttcatgatcggcgggggctgcagtgaagaggatgcactgtgatacctaccagtctccagggactatgaccctaaaccagggcctgcggcacttgcgggcctccctgctggctactgatgccagtaccagaggagccccaaaactttgacagcctcgtgggctttgtgacggcccagtggctctgcgtggtacatgactgagaagagaaaaacaaaaataaatcatacctcaaaggatggagtgcatcaattgggagaaaaggagacatagcccaaaccctggcttattcttgggatctactgattgcgggctctgcaagacccttggcaaactggcttctgatccatatcatatttatttgtagaagatggcgaaacagtttagctggtggttctttcttctccctttctctctctctatgacaataatacaaaccaatttaagtgaacatttatatccgataaggggtgggagtgtgattttaaatgctcttttgggagaacaaagaaattaatgtaaataagatttctaactgtttaaataagactttatataaatgtttaaaacataggggtaagggagggagggagaatttttgtatagaatgaaacatgcaagtaccacacactgtttgaattttgcacaaaaagtgactgtaggatcaggtgatagccccggaatgtacagtgtcttggtgcaccaagatgccttctaaaggctgacataccttggaccctaatggggcagagagtatagccctagcccagtggtgacatgaccactccctttgggaggcctgaggtagaggggagtggtatgtgttttctcagtggaagcagcacatgagtgggtgacaggatgttagataaaggctctagttagggtgtcattgtcatttgagagactgacacactcctagcagctggtaaaggggtgctggaggccatggaggagctctagaaacattagcatgggctgatctgattacttcctggcatcccgctcacttttatgggaagtcttattagagggatgggacagttttccatatccttgctgtggagctctggaacactctctaaatttccctctattaaaaatcactgccctaactacacttcctccttgagggaatagaaatggacctttctctgacatagttcttggcatgggagccagccacaaatgagattctgacgtgtccaggtttctcctgagctcatctacatagattggtagacccttcctttggattaggaaagatgagttttacctctggtacactgtcttggtaagcctggatgtgacagacacctcggctctccttgaataagaaagccagcagaactcttaaagccagttgtagtacggagttgtcagcactcactgaacctcactttacagggataagagtggtgtggcattttaaatacaatggtatgttattgccagggagtgaggtacaagacgatggctcatgtcacaggcctacctgatacggtgtcagagaaagtggtggggaaaggatctggttcatggaattctgatcttggcccataggtgaaccaccaaaatagtgctcgagtcttaggttactgtcatcaaagacttgggatgactccattatatcctggggttgtgggtattagaactaaatatggaggtcctgagcatggggactggcgtcctcagtaggtgtttgggaatatgggaagggtctcctatttattcaatagagttttctcagttattttcctcccttgcccttgcaatctccagcaaaaggtgggatctaggaagaaagaatccagtgtagaagttgagaaga

SEQ ID NO: 5920 - DNA, 6000 bp, Homo sapiens
aagtgctgagattacaggtatgagccatcgtgcccaggcgacttttttttttttttttgacagagtctcgctctgtcgcccaggctggagggcagtggcatgatcttggcccactgcaaccccccgctcccgggttcaagcgattctcctgcctcagcctcccaagtagctgggattacaggcgcccgccaccacggccagctaatttttgtaattttagtagagacagggtttcaccacgttggccaggctaatctggaactcctgacctcaggtgagccacccgcctcggccttccaaagtgctgggattacaggcgtgagccaccacgccaggcccaggcgatttttatagatgtggaaactactattctgtactggtagacatgagagtggaactctttttttttagacgaagtctcgtcctgttgcccaggctggagtgcagtggcacgatcttggctcactgcaacctccgcctcccaggttcaagtgattctcctgtctcagcctcccgagtagctgggattacaggcccggctaatttttgtatttttagtggagacggggtttcaccatgttggccaggctggtctcaaactcctaacctcaggggattcacccacctcagcctcccgaagtgctgggattataggcataagccactgcgcctggccgagagtggaactcttcatacattctacctctcactctaccctcaggtcatctccatgtcagaggggtggtggaagtctcttcaggtggaagattcctccgaagtaactttgtgcattacactctggatggagcagtagttaactgtgcaggccctccagccagacaacctggggttatatcctagcttagtcaattgctggtgaaatgaccttggagaaattacttaacctgtctcagcctcagtttcctcatctgtaaaaatgtcgggatggtgatgctactacctacctcatggtgttgttgtgaggatcagtgggttagaacatgtaaagtacttagaactgtgcctggcacataaacagtacatgttagctgttagctgctttgcaagtcacttgaaacctatggccgaatgtgaagtgttggcggaaccccgctccggcagcgtgcactttcgccactaggtgtcgcaattcagcaggcacagtcctgaagcttgacttggggtggttggctgggactttaattttagcctattgtcatttttgatttgatttggtgatttcaaggggataaactgacatgctatcctttgaagtccctggggatccagaaattccagcagagttgctgacatccaggcctggaaggagctgtttggagtcctgcctttgttcacagttaaaatggcatataatttatcatccacgccaggatatttcgagagtgaaaggggacttaggaactatgccaggacaagaggagtaagtaggatgtgcccccgaaacctggatacagtcaccctacctatatctaacctcagcatttttcagaatctcctccagaagggaaatgcaatgacatttcctcagaagcctggtatgataagcagtgacttcatgcgtttgtaagtcccttccccaagagggtggtgcgtcattgtcaggtttacttgcgtttagtcctcagtggacactatcagtgtgtctgcttcacagaccactagtcacctttgtgtcctttatgctgaataatcccatctcctctacagcttttcttcagagcttccttccaactgtcagcccctcagaggcactgaggcattcacctctgaatgtggtgaaggagagtgagcagtgaagccattttctgggctattgctgagggatttcttctaagatttcatctatctctaagacttcagaattccattatttcagatttgctctaattaattaattaatttgagacagagtctcactctgtcacccaggctggagagcagtggtataatcatggttcactgcagccttgacctcctgggctcaagcaatcctctcacctcagcctcccgtacaggcatgtgccaccacgcccatgcacacctggctaatttttgtatttttagtagagatggggttttgccatgttggccaggctggtctcgaactcctgggcttgagtgatccacctgccttggcctcccaaagtgctgggatgacaggtgtgagccactgtgctccgcctatctttttttaaagggcaggaggactttgggaggccaaggtgggaggattgcttgaggccaggagttcaaaactagcttgagcaacatagtgaggcctctgtctctacaaaacaaaacgaaaacgaaaacaaaaacaaaaacaaaacaaacaaaaaccccaattagctgggtatggtggcatgcacgtgtggtcccagctacttaggagtctgaggttggaggatccttgagtccaggagttggaggctgcagtgagccatgatggcaccactgccctccagcctgggtggcagaacaagtccctgtctcaaaaacaacaaaacaaaacaaaaaccaaaaagggcaggaggaagctagcatttgtagagcagtcaccacacatcacatgttgtgcttttactccatcatcttggtcagcccatcaaccctgtggaattggtttttttttttttttttttttgagacagtctcgctctgtcgaccaggctggagtgcagtggcacgatcttggctcactgcaacctccgtctcccaggctcaagcaattctcctgcctcagccctccgagtagctgggattacaggcatgtgccaccacacccggctaatttttgtatttttagtggagacggggtttcaccatgttggccaggctggtctcaaactcctgatctcaggtaatccacccgcctcggcctccctaagtactgggattacaggtgtgagccaccatgcccatccccataattggtattcttatgccccattccacaggtgagaaaacaggcctgaagaggtcccagccgataaaagcagagccaggattcagacaggtgtgtctggctcccaagccctgcggctactccctcaccaggctgcgtccaatggtctgccagtgagttggcttgctggcagacaatcctagtatatctctttccctgtctgagacccagtttccttttctgggtacatgtacccaactctgccgcagtgactggagagattggggctggtgggggttccttgggaagactttgttataggggcattgaacagggctttggatgaagcaaaatgtagaaggagaatattttccttgtggggaaagggagatcagaaggaaatgggttatgggtttagtctaatagacaaaaacaaggttgcatgtgtgtgacggaaaggggcccagaagatgagtggaaacttccagtctaattagcagaaagcaaaagtgaccctagtgattatagccaggttttaaaaacttgtccccagtcaagcttagtgcaatggtagggcacgtgggaagcacagcatacagtttctttaaaatttaaaaaaatttcacttttaaagacagggtctccctctactgcccaggctggagtacagtggcatgatcctagtttactgcagcctccaacgcctgagcctcagcctccggagcagctgggactacaggggtgtgccaccacacccggttaattaaaacattttttttttgagatggggtttccctatgttgcccaggctgttcttgaattcctgagttcctgagctcaagcaatccttccacctgggccccccaaagtcctgggattacacgcgtgagccaccacacctggcctagaagacatttttgatgacagtaatgatgagaagagatggcgttttagtgctctttggaaacaagtttaggccttctagctttaagaatccgggcctataatcccagcactttgggaggcagaggcaggaggatggcttgagcccgggagtttgagaccagcttgggcccagggagaccaccgtctgtacaaaaaaaatcaaaaacttcgccggacgtggtggtgcgcgcctacagtcccaactactctggaggctgaggcgggatcacttgagcccgggaagtcgaggctgcagtgagccgtgatcgcaccactgcactcctgcctgggcaacagagtgagtccttgtctcaagaaaaaacaaaacaaaacaaaaagcaaaaaacacataaaatccaggcctgaaaaagcgcccgggccagacatgcctagctggagtttctcctgccttagcgcacccctcaggcacacggtgccctgtagtcgcccttggaggccgccagctcctggggaggcatggccctttctgcgggaggtgtctcaggcaggctccaacacacacccgcgctgtcagcatctcgcacagtccgcccgaaacaccagggaaggggttcgtaggtgtgggggtggggtggcgaggccaggcagcctggcgcgagggagagagccgaggcctgggccaggaaggcccttgggtgccgtgtgggcgcagagcccaggagagcgcactgccaggcccggacctccccgcccctaccccgggaagaggcccgttcgccgcagggggaaggcgggatcatagcacctcggaggagcggccggtccgggcatgcgggcggcggggcggggagggaggcttccggaaccccgagagagcacccgtgcctcgcgggccccgtgccccgtccccgggctccccttcctctaacgcaggggacccagcccggggcagtgccgggcactggcgctggcgccccgctcagccctgcgatccttctccgccccgcccctccccgctccgccccgcccctccccgctccgcccccgggccgccccgccccgcaggctcgccattcccgggcaggccccgccccctgtttccgctggcggcggcggcggcggcggtgccggagcgcgagcagagcggagacccccaggtcctgcgggcgcggtgagtgcggcccgggcggcgggcggcgaggcgggtctcgagagcgtgcggagtcgcgcggccttgagccggcgccgggcgggctgggcacccccaggccgagacccgagaagggggagcggccgggggcgcccacgggaggcagtgtgggcagggcggcggtgggacgagaggacgaggaacagagtaggcgccgtgcgggaagcgggccgggaaggggagggtgggtgcggggcccgggcaccgagcgaagtggggtcctccaggggatggctccgaggaagaccgtttcagaaagggagtaacccggggccggcaagggtttccgactgtgtgaccccgtgcaccgcttgggacagtccatacaaggaccccagagagggccagggggccttcgggcagggctgggatatggcctgcagccccccggcacccgcgaccgctccctgggccactgctggaagatcagcactccgagtgacaggactctggcacatcccgaagttggagatctagcccatctgtgcattcaagtttgggacttcaaaaaactttcttgtggtttttaaaaaaagatccaaacaagaaaccggcttgttgttgtaagagcaatatttgtacttgtacatcttggaactggagtcttggatctcctccctctttgaaaaatatacgagtcactgcttcatcttcccccaaatgcctgttttgtctggggaagcttgggctagtatgggatcccctgagctacctttttctcgcatcaccaaaacggggggtaagaaggcaggggcttacctgccttacctggtaactcttagttcagagacccagtctctcattatgtgcgcgtgcccttctgacctgcagctgtccttttccctggggtgactcaggtatttcctcctccaggaagctttcctggactagtggagaaaactgaagactcatgcgaggatccctatatatacctgccagctcccttctctttactgaa

SEQ ID NO: 5921 - DNA, 6000 bp, Homo sapiens
gaaaaagctaattctgttgtggcagcacaacagaatcttttgggtctttctcatccttagagaaaggtaggtaacaagagtattcaactttttagaataaaacagcaggattaagctataaatgcagaagtattatactaagaaaatgcctcccagatattgttaaagcaaatagtatcatatccagcacaaaaccgcagtgaattgatttaatcagacattatcagagcaaggaagaaataacattctggttttaatggcaaaagaaaaatcccacctcatattgctttgcaggtattggtggcactcagcgagttgttctttggaatgcagtttaaaaatattgggccttgggttagggaggaataggaccacagaggcttttgtgtaggagaacggcccaggtgtggggctgcctggaggctcagccaggtagctggctgctgcagccttggcttggctcccatctggcccagaagacactaagaacactgctggggtagctgccatgaggtggtgatggatcatggctctggcctgattctcgaggagtcgtggattcactgcagtgtgctgtggccatatgtgaaccctggccatgtgtgaggtcccctgggaggaggaggagaaaaccacataatatgtcgcccctttcagcagcaacgaccattggaacaagctagagcctgagatttcccaggcagcatggtccgcagttaaaatgctgcttcctgattctaggggcctgggattttgggcagcagcaaaaggaagtgttggttggcccctggagatgaagtatggtacagtcttcaccttctggggttccagcatgggctcagagttgacaggagacagaattacagagtcccagcacaaggcaggtggaacctcagagggcttgctcaaccttctggcgtttgtggggcctctacatcatttacgccaacaattaatctaactgagcctttccagtaataggaaactcacttcttctgcagcatctcacaaagctggataacctttgtaattgtaaccctccccaagggtctcatcccaaccatcaacacagctttcctccagtccaggcctctcaagaacctgtgagttagagatagacctccttacagtgtggggttcttgttttggatcttctgtaacttagggatcttcttcctctgcaggtgtttttgtctccagatattcttgtccagttgtcctccaatcatcactgtcccttagaattagaggcttaaagaatcctgatgcccaaacctcactaaatcatactctctgggggtagaactaaagcactggtatttttaaagctctccagatgattccactgtatagccaaggttgagaaccactgtcttgctccctgaacctggtcaacttcttgaggtttatgctatggaatcaggtatcttagatttgaatcttgcctctaccacttgggcaattccttgtgtttttgttttctcatctgttatatggggataattgtatctacctcaaaaagctgttgaacgggctacatgagaacacaggtaggtcaagaataatctctggcatatagtaagtgttctataagacttagcaagtgttctataaaatttaactcatgtgcctaggacagggcctagcgaatgttgacataatatttgtgcacttgccatgagataggcattgttctaagcactctacttttgttgtgttgaagatctagtataagaaaaattacataaataaaatgcgtcttcagaacctctttacctggtagggtctattgtttcaaactacccatttgactcacacactagtgaactctctgaaccccttatcatcccacatgttttcttgcctcccatgaaaatctccttaagagttctacagaagatctgtacctgtaaaagcatccaacatgactacattaagagctcatcaatggtcaattcaatatgttttgttgcctcttgttaaggctagtgcctattaatgagctgggcatttaagagatgcctagtaaattatttgtgggatgactaaactaattaacctggtgaaagactatgctaatatatttttgcaaaagagatagagaaagactgaattcacaggaatggtagggatgctgagaaaatagttctacaaagtacctactatgtgctaggcacttttcacaatcataagatgtgaatgttcaggtcatctcttggtgtataacaaatcaccccaaacttcgtctcttaaagtaataattagcttgcttgtgaatttgttcttaggtggttacatagcaggaacagcacctctttgttctaagacagctcaacagggggctagagtatccactttcaaaacagttcactcctgtactccagcctttatggaaccaccctagtggcataggctcctcactcacagccccaggctggctctgggttggatgggttgggacagaaaactcttgccatgaaaatatagctctccatctcagcctctccactccccattccaaagggagacgtgtctgtgcttggggagaagccaagcaaagcaaaagatttcaacagcgaaaggaggaaacacacccactgaggttctcatagcaacataatcacgcacaggcagcagcctatttcggtgggagcttgtttcagctcccctcctccctggttagtcacagaaggcatgcacaagcagaagcagtgttgggtgggggcagagtgtcggactgaaagtcaggaggctggggagctgggtcctctgcttgctgatggaccatgggcaaatgtcctcctctctccaatcttggggtccttatttgtaaaatgagaggattggaccacagagcggtgaggatcatttcttttctgatttcctttgattgcacaaacactgagacacttttggtagggaattagatgtctctcagaatcttttgtctctgagaagatgcctagagaaaagggaattcaataggataaaagtcattctccagattcacatttattttcctaccactttctgcatgttgacagaacgggaggaacgactgggtgttgtcaaggattctgctcactcacccccaactctaacccaggtctgtgttctgagaagggaaaaggttaaggaggttaaggtcatctttttattcaagttttcacacacacacacacacacacacacacgcgcgcacacacacacacacacactcaagcctcttgctacattttcatccttctcattcttcatcctctcctgtctctatccctcacttctcacctctacttagtgcaatgtatcctctctttgcccgaggaccagatgatggaggcatgtttcctactgagaatgattctagaccttttcttcaatggactctggggttagttgaggacagtcaggctcacacttcccagttatcgaaggtgatgataaaaagcaaatagggcatttgggagggacctccccaaacaagtacagagatgaagtgaagacagccgggtgctcagggagcatcttataggtctcagtccttgactcgtaggttgaaagcttaaaagtacagctgttttaaggagtcagcctgagtgtcctgttgcaaagggagaggcagaatggggtcccccgcttttgttctatctcccactgcccgacagatggccagtaaaacagagaaaaagaagctctcaaagtgaagacaggaatgcattgtataaaaattcacaccccctgctgccgcccaaactcccttaaaaaaggatcaagagaatcctgacgggtacgtgacatcctccctctctcccataaaagggacttcaaaatctggcgatggtgggggaagggtgaggagggagaagagaaatgcgtgggcagggggctgccagggaagactggagtgggggggggggcactgcagtctcgcatttgactttctcccaccctctttcccaagccactctggccgccacctttgcccctccctctcagcctgaaaggggcttggagtcccaagggctttgggtacaaagagagagagagagagagagagagagagagagagagagagagagaaaaggataaagaatgacaccacacttacccctagagttgaaggagttaaggaccctcccccatccagacacccaccccttcgttccccaaatcgtaattcgccgaggaaggatccaggaactggcagaggagcgggagagctggggtgggccggggtggggagggtgcgagttaactgtggcccggtctcgcccggacctcgccctaggtgggagcacgcgcaccgggtctgagaacctgcaagagcctcgcccggcgccggctttctctgggccccccgcgcgggcctggcctccacgtaagttgtgtgcagcgccagggagtggaggcggccgagaccctcggagactaggggagggggcgggcccgggggcgctgggggccctcggtctgcgcccagccgccgccggctccagcgaacctcctaccccgcccccactcacccggctcagcccctaggagagacgcgcaggaagcgtgttgcttcgcccagcggatcggcagaagttgagaggagttggcggctgcctccggccggccggactttgcgagcagcctggagaggatccgcgaccgccgccgccgccgccgcggaggcttcggggctgcttccctcgagcttagcccgcagcgcgggtggagaggggcggggagggggtcgggggcacgagaagaacttgaaaccgtgtgaaggaatccggagcagatgagaagggaggaaaataaaagaaagtggagactgcagaacagactccgctgtggctgactgtgccggccgacgctccagctgaggggctgggttggatttttttttttctcccatcctctcgctctctcttttaaagcgacaccagctctctctcctcctctactatctcggtatcaccaaacccttgccggctcttatgggcatgaaacactcctcccgctgcctgctcctgaggaggaaaatggcggagaacgcggccgagagcaccgaggtaaggaggcgagcgagcaggggctctcggagaccccgccgcccacccggaccaccgcgccgccgccgccgctcagcgccgagtgccaaactttccccagtttcatcccgctcgcttctgccggcctcctcctgtgtgtgtgtgtgtgtgtgtgtgtgtgtgtgtgtgtgtgtgtgtgtgtgtgtgtgttggtggggggtgggggggaagttcatgtctcaggtcccctccctcttgaaaatgcaaaacagtcactctcaccccatcaccctctcctgccacccgctgctcccttctcccgcccccaagtcccaaaccccgggcagccgcgctcccctgccctctcctctgggctccgtgagggctcccgggtcccggctttgtgcagagctggggtgggtaatcctggggccaggtctgccccctgcagtgccttgaccgtctcctgccgctgcctcagctttacccttcaagctcgagtcggttcccgagctctccgtccccgcagccgcgcggagagcccccggccgcgggggccgagccggcaggaggactcgggcacctcctacagaccctccggcccagatctgggccagagagaagtctgcaatcctcagatatcagagccgcctctgggtagctaaacccggcagggcacacgggccgcggccaccttcagcaccagggacagcgtccgcccctgcagcagccgagcctgcgcggactgtgggggctgcgcgccgccggctgcagtgagaaatgggtctgcagccacccgtcccgcaagggcttttgaggaggtcgctctagctccgcaaattgtgttctcggcccccgccttcggcagcctttttctctactctccagctggccctgagccgcagagagccctgctgggctttgcgtcccgagactcgaggctgtgatccctcgcctccct

SEQ ID NO: 5922 - DNA, 6000 bp, Homo sapiens
taacgaattcaggagttcaagaccagcctggccaatatggtgaaaccccgtctctactaaaaatacaaaaattagctgggcatggtggtgtgcgcctgtagtcccagctacttgggaggctgaggcagaagaatcacttgaacccgggaggcagaggttgcagtgagccaagatcgtgccactgcactccagcctgggtgacaaagcgagactccgtctaaaaaaaaaaaaattattagccgggcatggcagcgcacacctgtaattcaatctgcttgggaggctgaggcaagagagtctcttgagcccagggatggaggttgtagtgagccgagattgagccactgcactccagcctgggcaacagagcgagacttggtctcaaaaaaaaaaaatctgcaggctcttggatatcaggacttgcatttacagagagatgagttaaacagagaaaatggtggaaggcacaaaaggggatgagtgctccaggagaggtctgagagagaagggcaggggcctgagaaagccccacgcccagccgtcattctgcagatgtttgcagagggcctgctctgggccaggaagggaccgggagctagggagagcacagaaattaatcaaatgcaagtgcaccctcgaggagctcactaccaagaagtggacacataaaggaagatgatgatgaccagagaatcacacatgcgagactcaaggtaatccacggagaaaaagactggagtgctccaggaaggcttcataaggtggtgtatttgagcttagaaagaggaacaggagagaagcttctagaagtgaaggaggtgaatcaagatggccactggtgtggtggctggaagggccttggtggcctgtgagagcgagggtcctacctgttgccttacaaagccattgcccacagctggagggacctggggcatgggtgtgacggctcattaggtcacctggcctctgcgtgttcaaatcttaccaccagggggggcacaagagccaaagtggaccctgagcctgagctggggtttctttcccagagacaggacgccttgagggaagggaggaaaagctttcccactccagcaccacaaagcctggaaggcctggctgcttccatgtgatttctgactcaggggcttacccatattttcctcttccggttaaggcaaaacataatttttccatcgctcaccttcctggttgcctgtagcactaactgtctgtaacaaatgcactttggcccaggggtttattgtgacacagaatgtcaggaggaatgaaagacacctcctgatccaaaatgctgtgaaccaaaaagtatctgagacaggtctcaatcaatttagaaagtttattttgccaaggttacagatgggcgcccaggaggcagatctgtgccttctgcaaagatgattttgagggcttcaatatttaaaaggcggctggtggggaaagaggaagaaagtttttttaaggtgtgggtaggtaagaaacaaacggttgcattcttttgagtcactgatcatcctctcactgaatgcacaatttacatggcagaggagggtagagaaataagtcacttatgccttgtctagcacagcgaatcttcatttttacattggaggaagcaatcagatatgcatttgtctcaggtgagcagagggatgactttgagttctgtccttttttctgtacctgtgaagatatgctatcaatttacattgtcatggtgaaattcaacagaactgttttagggcaaatatcatagggtccaccagaaatttcctcatgggcaaattgtgaaagaagtgcatagctgcttttttttttttttttttttttgagacggagtctggctgtgtcccccaggctggagggcagtggcgcgatctcggctcactgcaagctctgcctcccgggttcacgccattctcctgcctcagcctcctgagtagctgggactacaggcgcccgccgccacgcccggctaatttttttgtatttttagtagagacgaggtttcaccgtgttagccaggatggtcttgatctcctgacctcatgatcctcccgcgtcggcctcctaaagtgcttggatcacaggtgtgagtcacagcgcccaacaagaagtgcatagctttttttgttttttctttttgagacggagtctcactctgtcgccaggctagagtgctgtggcgcgatctcggctcactgcaacctccaactccctggttcaagggattctcctgcctctgcctcccgagtagctgggattataggtatgcgccaccatgcctggctaatttttgtatttttagtagagatgcggtttcactatgttggccaggatggtctcgatctcctcacctcgtgatccgcccaccttggcctcccaaagtgctgggattacaggcgtgagccactgcgcccggccgagaagtgcatagctttttaaaaaatctttgtagctatcttatttaggaatgggaggcaggtttgcctgtggcagttcccagcttgattttttcctttggcttattgattttggggtcctaagatttattttcctttcacaatactcttgtacaggtgaggagactgaggcccagagaggaggctgcctgcctaacatagaccaaagggtcagaaccaagagtagaactcagaccccctcacttcaggcccaatgctctcatcacataaaaaggatgccttgattatacgaatgtggcactgaactatataggctgaccccaattctttcttcagtgtaaacaataataggaataggagcaacaggcagcgtttctgcagcgcttctgtggcaggcaggttctaaggcctccctgtggatttcctctgtcaacactcacgtttaccctaataagtaatttctattataaacttaaatatttactgaactcctcccaccagtacttgttaacttgggagaagggggagatgcaataaaatctttcttttcctaagacctgtctcccaagatagatggacgcaggcccaaaagggcacaatggaacactgactgttttccggcctccttcccaccctccagggtgcttcacactcctcccctgtgctggaatcatcctggacactggttaggatgtgtaaagtcaagcatcaccaaaattcctctgcttgtcctcttggcattaggctcagtttaggccctgcctctccttccttgtcctccttcctccccatgtaccactatcggttgtttccccagtgcagccagctgcccgcttctgtgtctttgcatatccagttccctcttggaattccctcctccgcattgactactgactccaccttcccaagtcaagtcagctgctgcaatgtcccctgctctggggagcctctcggactcagattgacgtggggatgtgccctgtgcccctacttgttactagcttctgctgctctgcctctgatctctccctccccttcccggcctgacacctcatggggttttgccctgccttctctaggctttatcccattgccccgccttcattcattcttctctcacctgaactactccacagcctcctagcagatttgcacctggtcctcagctcaactttcatctaccactgctcccctcatattacctgattgcgtctccccaaatacaacatctccatgttccatgcaatcccgtaaagcactgagccaaggactggagatgccaacaatggtcctggtcctcaaggggcttcctacctgcccctccggccttcccccacccaactacctaaaacacaggcagagaacctctgaaaacacagcagatccaaccattcccctgcttgaacctttcggtggcccctaatgctcagagtgcaaagtccaggagcacaaggctctttctcaccttcccacaaactaccccgtgactccaggctccagcccagagcccggacagcccctgccccagcctttgcccaggattctcccttggcggcaactttccctgtggttctgcagcatcatctcccagtctgggtcagaggcctctccttagcctcttagcccccaagcctctccccgtaactgcacctatcaccctcaaaccattgtctggctgcctgtctcctcccacactggtccctgagcagaaacaaggactaatccatgtttttcagctcctacccctaatgaaataccctaatagatactgaaaaatgtttttgaaccaatgagacaagtctactgataataaacaggcaaataacagcaatgtgctaacagtggctgtttctggtgagcagaattttgaggtctgttcctttcacttcttggtatttcggttgtttctgtaatgactgtatcttgcttttgtaatcataaaggacagtaaaggaaacttcattttgaaaataatacaaagggattcggggacttcaaaagaaggtgactctcctcgtccactccagagaatcaggaaaggagtgtttaaagacccacagaattcctacaagtgacgttgggggggggccagccagccagggcgcatgccggccagcgagtggggtgggctctgggtccgggagaagtcagatcagtgctctgtacagggccttgagggcaagacgaggaatttcgacttaggtccttgaatctggagagctacagaaagtttgtgagctcaggagaagcgctccgagctcggcatctggagcagttcaaggcagcagcgagcaagtccaaagacgcaggagggagggtggggtggaggagtagagagaaaacagaagccgtctacagaccctttttccctctggggcaactaaacctcaagtgcaggaagcgcttggggactgcccagccctcagctgtgttattattcggtgataggtatttgctaattacttccaaaagcctcccatctgtcatcccacccagactgcgcgcttctaattcctcctaccccacatgctgtgcccaatgaaaagtatggtcagcgagcgaaggtttgcaaggagacagacgagggcgaaattaagccaggcggcttccctttaaatcctcgcaaagcagaagggcccctcactctggcagcaggccttggccaaggggcctttagccctgacgacccggggaagagtctcccaaagcagaacgcccggtccggcgcccagaccaaacgcgggggaaccggaagggcgaggcctccacgtaagtccgcggtaaaagtggcagggagtggctgcctgcaaagaccccaagacggcttgaagaaggagtgggtggcgggtgggggttagggcgactaggcggggaaacagggagagggtcgggctccgcggggcagctggggccggggctcgccgacctgggcgggggcggggggcggggggggtgcggcccgggcggggccggtggggcgggaggcgtggccggcggggggagtgggggcggcttttcccggcacatgcgcaccgcagcgggtcgcgcgccctaaggagtggcactttttaaaagtgcagccggagaccagcctacagccgcctgcatctgtatccagcgccaggtcccgccagtcccagctgcgcgcgccccccagtcccgcacccgttcggcccaggctaagttagccctcaccatgccggtcaaaggaggcaccaagtgcatcaaatacctgctgttcggatttaacttcatcttctgggtgagtgagcgcgactgccgcgcgctcctctcagggcccacctgttcgcgggccccggacactggccgcggccgcgagtgccggcagctggcactgcccgcaccgggcaggcaccgggcgggaagagagagcgccctgcggctgccagctggctccaaggccgggtccagagccgggcgggacggccgcgacgggcgcattcgggtgggggctcatcaccgcccagccggcgtggggagccgggccctcttgagatgaggcgtgcgggagggtcctgagcactttagctcgcct

SEQ ID NO: 5923 - DNA, 6000 bp, Homo sapiens
ccctctatacccagctgtacctaacccttatactttgctttcacaaataccagaggaagcagagtggtttacagtcctggatcttaaggatgcctttttctgcatccccgtacatcccgactctcaattcttgtttgcctttgaagatcctttgaacccaacatctcaactcacctggactgctttaccccaagtgttcagggatagcccccatctatttgaccaggcattagcacaagacttgagccagttctcatacttggacactcttgccctttggtatgtggatgatttacttttagcagcccgttcagaaaccttgtgccatcgagttacccaagcgctcttaaacttcctcgccacctgtggctacaaggtttccaaaccaaaggctcagttctgcttacagcaggttaaatacttagggctaaaattatccaaaggcaccagggccctcagtgaggaacgtatccagccaatactggcttatctttatccccaaaccctactaactgttggatgtgcctccccctgcacttcaggccatacatttcaatccctgtatctttaacctccttgttaagtttgtctcttccagaatcaaagctgtaaaaactacaaatggctcttcaaatggagccccagatgcagtccatgactaagatctactacagacccctggacctgctaggccatgctctgatgttgatgacatcaaaggcacccctgctgaggaaatctcaactgcatgacctactatgccccaattcagcaggaagcagttaaagcagtcgttggccaacctccccaacagcacttgggttttcctgttgagaggggggactgagagacaggactagctggatttcctaggccaactaagcattcctaagcccagctggggaagatgactgtactcacatttaaacagggtgcttgtaactcagctcacacctgaccaatcaggtagtaaagagagctcactaaaacaccaattaggctaaaagcaggaggtaaagaaatagtcaatcatctattgcctgagagcacagggggagggacaatgatcgggatataaacccaggcatttgagctggcagtggcaaccccctttgggtcccctcccgttgtatgggagctctgttttcactctattaaatcttgcaacagcaaaaaaaaaaaaaagaaaagaaaagagttttagacatatgactttaagaggattaagaaaattgaataaatgtttataagtttgatttattaaagggttgaataaaagttcagaaaggttttgcctagtagtgttgtttgccctgtcaggtatttaaaatatgaatattaaatgtcacatagttaaaaatattaggaaatttgtcttttatttctaaaaagcagaagtacagcacagtgtttaagagcatggactctggaataagactgtgtaggtcaaagatccacaaactatggcctggtccctgtttttccatagtctgcaagctaagaagtatttgacgttttttggctgggcacggtgggtcacatctgtaatcccagcacttcaggaggccaaggggggtggatcatctgaagtcaggtgtttgagaccagcctgaccaacatggtgaaaccccatctctactaaaaatacgaaaattagctgggcatggtggcatgtgcctgtagtcccagctactcgggaggctgaggcaggagaatcacttgaacctaggaggtagaggttgtagtgagccgagattgcgccactgcatgccggcctgggtgacagaacaagactgtctcaaaacaaataagtatttgacatttttaaatagttggaaaaacatcaaaagaagaagaatattttgtaacatgaaaattatataaaattcacatttcagtccccataaaaagcattactggaatacagccatgctcatttgtttaggtgtggcctatgtctgcttttgtgctccaacagcagggttgagtcactgtgacagagactgcatggactacaaagccaaaaatattgaccattgagccctttacagtttggtgaccgtggtctgggttcaaatcccagctctgctatttattagtatgaccttgtgcaagtcactcaacttctctgtgcctcagtttcctcttttgtaaaatgggggataatagttattattaataactattaggaggattaaataaatcaatagttgaaaagtgcttgaaacaatgcctggcacacagtcaatgcaatgtgtgtctaaacatctattgaacttgaattcgtcaaacattaaagaataagtaaaaattatttttattttataaaaattactacttttatgaatagaacaagaatttaaagttgaacctggattaacaaaatctagggtttcaaatctagagcttcagtaaattaaatattaaacaccaaagtcactctattagccctttcccagcacctctggctgggactgtggaccaagttctgtgaatgattctatggcctaggagatcaaagatctccatggtttatcagtaagtcttctctaagactgggaagtaggtgcctagagttatgcctggattaaattttgacttcctagccatctgattttgcacaagtcttatctgtaaagtgggtctactaatatctatttaataggggtattaagaagattaaaaacattgagatacataaagtgttttacacaacacctggattttagtaaacatcagttattattattagcattcttccaagatctgcacacaaagtgagttacggctaatcagttgataaactcctagcagagcagaaggttatgtgtgttgtgatgtttaagtggtactgggaaactctggttgccttgaggttctgaaattctactgtatcagatgggttcctttaaacattgctctctctagggggtcctctttttaaaagtatgcaccttctggagggcatctcttcatccttgtgtggtttagtttatcaggtattttcctcacgatggcagcctgagaacaggggacgcccaagggctgggatttgtgtgctccggaagaaaacggggtgtagaagtggggcctctgaaagagggcgaaaaggcaaggaaaaggagaaatgttgcacagtcttatggtctgtcccctgccattctgttcccctgaggtgtcagagcagcttctctgtcttcccagggatgagtttacacagacattccctgtggccccctgaggcctccacctctgaaatctgcagaacagccaggaaacaagcccggcccatggcgccacctgctgcctgcctgcctccgctcatgcaccctgggctgggatggtacttctgttcgtctggcattattgcccttggtcatttaccggcagccctgggcccctccttgctcttctccatgacactaggactcccttggtcttgaagctgggtgagattatcagggtttgtttctcaatgactttgaggtttgacagcagagcacactctttggcagatgagggggcttgaggcttagtcttattccgtgattaaaagcatttcttgtatgtttgtcctttcccagcctggagtgatgggaataaggccactatgttgacttagcggaaggaagggctgactcactgttcaccttccctgtacgttaccagctcgaggtctcaggatgcgttggaccctattttggtctccggaatttgtcatcatgcagtgctattttccccattatgcagaggtggagagggattaaggcgggggcgggcccctgtctccatggagacagtgacgctaccccgctaggggttatttggaagcggggcaggcctaggaggctgaagaaggcttcggactggactccccagcccctggtgttagggcttttctctttcttgggcttgggaacattagccagccccattttagaggggaaaactgaggctcagaaagggcactgaatccccttaggtcacaatgcgcccaagggaagaggcaggatcgactgagcctaggatctcgcgtcttcggctttcccccagagcctgggaagcccttcttagctccactcttctttgagctttccgtcaaacaaatcctagggcccgtggccttttcgagcgctcctaaaggcgactctccaagacccgctctctaaggtgctcttcccctttaagactcacggctcttcccgtcaggctgcgtcgcagtcttaaggccccgccttttcagacagcttccgctgggcctgggccgctgcggggcggtcacggcccctttaagcctgagccccgccccctggctccccgccccctcttctcccctcccccaagccagcacctggtgccccggcgggtcgtgcggcgcggcgctccgcggtgagcgcctgaccccgagggggcccggggccgcgtccctgggccctccccacccttgcggtggcctcgcgggtcccaggggcggggctggagcggcagcagggccggggagatgggcggtggggagcgcgggagggaccgggccgagccgggggaagggctccggtgacttaaggggagggaatgctcctctgccgtgctcaccgcgtgctggggctgcgcggggctaggtatggtcgggctgttttcccactgtcccttcttcgggcagtgtcgccgtccagcctggttgttgaagcgtccccgtggtcccccggggtccaggcccctttgtggaggcagctgctggcccccagcccatgggaccgtagtcgcggaggcctctgcagaggcgcaggctggaagcggtggcctttgaggggggcggcaggagagagtaccgacctccctcgaactcctggcagaggtgggggtcgcagcaaaagcactggggtggagggcggccagtgtggggcagacgcctgtgtgccttcctcagatacgggcagagttgtggatgtgagaagggtctggcttgggtacctcagttccaaacctcctgtgtccatcagagagctggcggtcaccatggcaatgcgggagctggtggaggccgaatgcgggggtgccaacccgctcatgaagctcgccgggcacttcacccaggacaaggcccttcggcaggagggattgaggcctggcccctggccccccggagccccggcctctgaggcagtgagtgttcttgaggtggaaagcccaggtgcagcctctgaggcagtgagtgttcttgaggtggaaagcccaggtgcagcctctgaggcagtgagtgttcttgaggtggaaagcccaggtggtggtggtctgaggtggaggggctgtttgcacatcttggtataactgctttctctattgtgttgcaaatcatagtagttaccacttactgagcgtttataaacactagaaaaccctgtgcacctttaaataaatgcaaccattttatagatgaagaagccgaggctcagatgcctatgggcttcatcaacccctgattttagaggaactgcgtcattgtacatctctgtctttctctcttaggcctccaagcctttgggagtagcttctgaagatgaggtaaatagaccagtctcttttctgtcccatttttctcttgcccactgtgtttttacctttaaacttagttcacccgtatttcaatttttgggctttcctgaccgaatgagaatgcctgcttgtttttaaatgtattttttcgtccttctaaatctatggaaagacagtttctctttatgtgtctccagtttctgtgttttcctttccttgtatctaacattgggatccccctccagtgggtcctgcctcttgctggggcctcccaagcctatgggttcatttcatcatttcccttctggcagttggtggctgaattcctgcaggaccagaatgcaccccttgtgtcccgtgcccctcagaccttcaagatggatgacctcctggctgagatgcagcagattgagcagtcaaacttccgccaggctccccagagaggtg

SEQ ID NO: 5924 - DNA, 6000 bp, Homo sapiens
gaataactaaacctctagctattgtatttgtcattggagaccaatgcactaaaattctggtttcatctatcaatttaaatgtgataatataagagaccctgggccaggtgcagtggcgcacacctggaatcccagcactttgggaggccgaggcaggcggatcacctgaggtcaggggttcgagaccagcctgaccaacatggcgaaacctcgtgtctactaaaaatacaaaattagctggtgtggtggcacatgtctgtaatcctagctacttgggaggctgaggcaggagaatcgcttgaacctgggaggtggaggttgcaattagctgaagggcaacaacagtgaaacgccatctacacacacacacacacacacacacacacacacacacacacacacacaaagagagagagagagagaccctaaatcgaagaaatcagacctatctttatggtaaattccacctgttttcagattcaaatgcttgagtgggggagaaaaaaaagtatgtttggggcaattgagaaaatataaatataagctctatattagataatgttggaaaatattagtagtttttaaggtgtaataactattgtggttatggaggaacatgttcttattctcaggggggatataatttgtatattgggatggtgtcatgtttctaatttacttttttttttgagacggagtctcgctctgtcacccaggctggagtgcagtggcatgacctctactcaatgcaacctccgcctcccgggttcaagcgattctcctgcctcagcctcctaagtagctgggactataggtgcgcgccaccacacccggctaattttttgtatttttagtagagacggggtttcacagtgttagctaggatggtctcgatctcttgacctcgtgatccacccgcctcaggctcccaaaatgctgggattacaggcgtgagccaccgcgcccgtcctctaatttactttcaaacggaaaaaatctaggtgaaggttatagtggtgttcatcatactatttgtcaaaattctctacatgtttgaaaatattcataaaagattgaaaaaacttctaacccttgaaatcattttaaaaagtacaagaaacatcaaaaatgtatttgagaaaatgtgagctttttaatgtagtattttgattttggttaaataagacattttgaaatgttttactcgattgtgttaatttaaaatttactttcataggccggattacatctgtaatcccagcactttgggaggccgaggaaggtggatcacttgaggtcaggagttcgagaccatcctggccaacatggtgaaaccccgtctctactaaaaatacaaaaattagccgggagcggtggcaggcgcccatagtcccagctattcgggaggctgaggcaggagaatcccttgaatccgggaggaggaggttttagtcagccgagattgcgcccctacactccagcctggcgaaagagtgagattctgtctcaaaaataaataaataaataaaaataaatacaaaactcacccacaaaattaaagaaactaagtttcattactggcaccagaaaacgaatcacatagtcccacttcttcatgtatttttcttcatggcatctttcaatctttatgtataaaaattcatgagggcagggcgcggtggctagtacctgtaaccctagcactttgggaggccgagacgggcgaatcacctgaggtcaggagttcgagaccagcctggcagcatggcaaaacctcgtctctactaaaaatacaaaaaaattagctgggcgcggtggcgggcgccttgtaatcccagctactcaggaggacgaggccggagaaaattgcttgaatccaggaggcagaggttgcagagagcctagatggagccattgcactccagcctgggcgacaagagagaaactccatatcaaataaataaataaaataaataaaatccatgagttattttatcacattatatgtttataattttaagtcttactttcaaattgaaaacagtttaattttcagtcgctcatgttaggtttttttttttttttttagacagagtctagctctgtcgcccaggctggaatgcagtgacacgatcttggctcactgcaagctcccgctaccacgcccggctaatttttttgtatttttagtagaggcggggtttcacgtgctagccaggatggtctcgatctcctgacctcgtgatccacccacctccgcctcccaaagtgctgggattacagtcgtgagccactgcgcccggcctcattttagttttgatgcaaatatagttaaaccctcccgggttctcccttccgggttcaagtgattctcctgcctcaggctctcgagtagctggggactacaggcgagcgccaccaggctcagctaattttttctgtattattagtagagacggggtttcactcgtctcatgttggccaggatggtctctatctcttgacctcgtgatccacccaccttggcctcccaaagtgctgggattacaagcatgagccaacgcgcccggcctatttttatttatttattctttttgagacagagtcttgctctctctcccaggctggagtacagtgggcgatctcagctcactgcagccactgcctcccggattcaagcgattctcctgccttagcctccacagtagctgagactgtaggagcgcgccaccatgccttgttaatttttgttttttctgtagagacagggttttgccatgttacccaggctggtcttgaactcctgagctcaagcgatcctcggcctgggcctcccaaagtgctgggagaacagacgtgagccaccgcgcctggccccctgtgggtgtttttaaaattagagacactgagaccccgactgaagaagataggccacggggctgctgttatctaatatttatcagaactcacccgacttgtatgggcaacgcagccccttttcactgttctttttctttgcaaactccacagtcctccctgtcgctgccctacagtactggttggaaggtctttcttctttgactctaggtggggaaatccagaacgaggcttcgcctcacctgccctaatgcccaatcttctactagcattccaggcagcgctttctagtcacgtgagggatacctaaccactggaactaaataagatgtgggggaacaactgaggtcatcacctaaattgcttgatactctcttttccagaagacgagccccctttctgagtttatggcagaaagtgaatccctccctccctcccttcctttctttttctgtaagacggtgtttcgctcttgttgcccaggctggagtgcgacgccgtgatctccgctcgccgcaacctccgcctcccgggttagagcggttctcctgcctcagcctccagagtagctgggattacagccatgcgccaccacgcccagctaattttgtatttttagtagagacagggtttctccatgttggtcaggctggtctcgaactcctgacctcaggtgatccgcccgcctcggcctcctgggattacaggcgtgagccaccgcgcccggctagaaagtgaatcatttctatatttgattgtacgtgaagccctcggtagtccttactgacatcatgtctcctttagactttgattacactccgtgtccttcatctgactcctctcttcagattcctgagtcacgctctgtttatgttgctgttcaggagcgaactgcggcaccgcccaaacactgtgacgccagcgcgggaggagggccgcgggaggggcagcggaacgcgcagagggcacggtgcaagcacgggacagctctgcattggccaaagggatcccaggaggcctggccctcttttctcctgaggctggatcccaaccagcaggaaaaggctggattttcgccttttgtatttgttttggggcccaaccaagaaaaacagtggagggggaataaaacatgtttaaatcttttttttgtcttaaaaccatctttaatttcacagtcacaaaataaaacataactcgaatgttttgatgtttgcagtgacatcgattgtgaaaaaggttagccagaaaggaaacgcagtgagacagagcgctcggccaccccctgccctgggcgcctggcgcatggggggcggggcggggctcgcggggtgacgtcacagcccgacgcgccacccagctgtttttgtgctcccagctctagcgaaaagccgccggtatttctccatctggctctcctctacctccaggcaggctcacccgagatccccgccccgaaccccccctgcacactcggcccagcgctgttgcccccggagcggacgtttctgcagctattctgagcacaccttgacgtcggctgagggagcgggacagggtcagcggcgaaggaggcaggccccgcgcggggatctcggaagccctgcggtgcatcatgaagttccagtacaaggaggaccatccctttgagtatcggaaaaaggaaggagaaaagatccggaagaaatatccggacagggtccccgtgagtgtagaggagcggaggggatgggaggggaagggcccgcgggggcgggggcgggtagtcgagatggcttccctggggcgcccaggcggctctggagaagggaggttccgagaattacttaatcctgaacgcccttcagtgccagagccaatggacgtccagactgtagagcttttaaaaccccgtatgcctgggccccgaaccccacttcagggctgacggcgttttgggggccgagccgccgtcttcagtgactcagcaacccacacacggtctcagcagctgagaccgtgtgtgggttgcggtgcacaaaatagggcccctgtgggcgagactggttagatcggggccatggattggctgcctttaagaacgcagggacattgtgctgtgcggtgaggtttgcgcaaacccagtcgatttctgccttggctggttctcctttaatgaagttgactttggctctcatatcattggtcttgggacgaaaaggttcagaagctattcagtaattttcttgcattacagggggttaggggagcacaagacagtcctggcctggaaaacaaggtcacgttctctgcccaacagccctcttgcctcatcgttctaggctccggggcttgtgtggggacagccagcctcctcgtgttgatttctgatcacctggtacctggtcgcgataaggcaggactgagacgttttttctccgttttggacaccggcttaagtagttaaaactaccgcaggcagtgagtaggaacagaaaagtattaggtatctttcagcatccgggcgttttccccattaccccctcccccgcccacttgcctggtgtttctctaatgcaggctgcgcagccgaattggagggcagaatatggcttaagtggtagggggaccagcagctgttggattttggaaatggaggagcggagattttaaaattgtgctctttatcttcaggtaggaacattagtattacgtgtcacataatggtaaaataattgctgttatctgatgtcttttcttgactcacagccactctgggtttcttctctaatccttacctaacgttcgtggttttatagctaccagaagccaccagggccttagcccagcagtagaaacctcttgtaacccttttcctttaaaaagaaaaaaaagtcattagggctcttcattccccaggaattacaaaaaggttttcagcttatagaggggtgagctaatcccttactcgggaaaggatcctttacaaattactttcctggtttctggaccttggatacctgaaaattttgcccagttctggtgataccaatcttttgagcaatgatatttaaaaaatacaatcaagttttattgatagtttaccctagcggtattataagtactcagtctgtaatcattgac

SEQ ID NO: 5925 - DNA, 6000 bp, Homo sapiens
tgaagttttggcttaagacaaccacattgatactaaacaaggggaaacttttcttagaacaaaactaaaactgtgaaacagattccacattatctgggcacaatgaatcagataaaatgaaatataaaattaaggcaaagtctgtaaatggattcatgtcttaacagataaactcaggaggaataatttttatgtgatgtggtttaattggaagtgtcagaatctgaggaaactatagtgaaggactttattattactgaaaatataacctgggattataactattgttttttgcagtattttgcataagatgcttccttctcattgtgctccgttaatgaattacgtaaacttctaataatcctgaatctttttttgcatagcatatattccctgttagtatatgtcccattatatatccatctgtggtatctatgttccccttgctaggagtgagctctttaagagtgaggactgtgccctagtcatcttcatatccctgatacctatgtgtaatatgttttcaatgaaggatttttgtttgtgaactcagagctcaaagtgtaattccaaccacttctccctatcctttgctcctcttttaaatggggactaatgataccttccatacctgctttacaaggttgtgtgaggctcagcatcttagagctaatgaatgaatatgttttctaaactgttgtcttatctcttcccctaggacaatcatgaggaagactattttctgtatgtggcctacagtgatgagagtgtctatgggaaatgagtggttggaagcccagcagatgggagcacctggacttgggggtaggggaggggtgtgtgtgcgcgacatggggaaagagggtggctcccaccgcaaggagacagaaggtgaagacatctagaaacattacaccacacacaccgtcatcacattttcacatgctcaattgatattttttgctgcttcctcggcccagggagaaagcatgtcaggacagagctgttggattggctttgatagaggaatggggatgatgtaagtttacagtattcctggggtttaattgttgtgcagtttcatagatgggtcaggaggtggacaagttggggccagagatgatggcagtccagcagcaactccctgtgctcccttctctttgggcagagattctatttttgacatttgcacaagacaggtagggaaaggggacttgtggtagtggaccatacctggggaccaaaagagacccactgtaattgatgcattgtggcccctgatcttccctgtctcacacttcttttctcccatcccggttgcaatctcactcagacatcacagtaccaccccaggggtggcagtagacaacaacccagaaatttagacagggatctcttacctttggaaaataggggttaggcatgaaggtggttgtgattaagaagatggttttgttattaaatagcattaaactggaattgacaagagtgttgagcatccctgtctaacctgctctttctctttggtgccccttatctcaccccttccttggaatttaataagtctcaggcatttccaattgtagactaaaaccactcttagcatctcctctagtattttccatgtatcaggacagaggtgtcttatgtagggagggggcaagtatgaagtaaggtaattatatactactctcattcaggattcttgctcccatgctgctgtcccttcaggctcacatgcacaggaatgctacatgatggccagctgcttccctccttggttatcatccactgcagctgctagttagaaaggtttggagggatgacttttagtaaatcatggggattttattgatttattttcacttttgggattttgtggggtgggagtggggagcaggaattgcactcagacatgacatttcaattcatctctgctaatgaaaagggttctttctcttgggggaaatgtgtgtgtcagttctgtcagctgcaagttcttgtataatgaagtcaatgccatcaggccaaggaaataaaataattgcttaccttaaaaatccactgagttcagcaatgttgcctttattttgtatgtattagaatagatgatatgtggactctctgaacaaaagaactaagtggggaaagctgttagtgatgaatgttcacatatggtcagacccatatatgtttactcagttctttagtgagcaggagttgctgttcaagggtgaatgttatgctggggcagtgtgcctgctgcgttggtggtgtgtgtgtgtgtgtgtgtgtgtgtgtgagagagagagagagctttttctcctccaaagataagtgcatcgtcactgttctatgtgtttctgaaagctgaaggtggaagactgcctacgtagaggtaaggggtgggctgtgctaattacaaatgcagatgtctaggccatctcccagatttagctgactcagaatctcagcgttaggtgtctaatttttaacaagctcctgatatgactgctgcacactgaagtttgagcgtcattgctttttgcaccaggttttgctgtaggtcccaaccacaccttactctctccatcacaacttggtcagtctgaagccaccatctcccaaagcagcaaatagcacctaggcaaggctcccggcatcagaacaagcttggtgtcttctgaccatatgaaagtcttgttcagttattcaggaacgaatatgtgggtgggctttgagcatgcaagttaaatgagagaatggaaaacagattagtgaaaacttctttcatgaaaaaccttaagacccatctctaaccctctctaatctcttgcagtcatatccccaagtgatgtctacctctgtagagagttagggaatatatcaaggtcaccaaaaaggaagtaggaagttataaaagatccatgccaagcagcaccacatgcagaaaattatgtaagattacggaattttgatgaaggcattgaaaatggacacttgtccctaatgacaaaaatatcaaggtgctgttccctgataaagccaaaaggaagctaatatttgagtttaagatgtgaactgtattttgaaactaacagatttatccatgacctaggaatgagactggatgaatatttgaaagaaagcaaaaaacacatggcggcagatcctaaccctctgtacacatctgaaacagtccctgtagggcaagagactgtaggccattgctaaaccaaagagatcgtttgaatttaggggctgtgtctctcccaggtaggctttgcttattgtaggcctacttcctggattttcctaaggaacaaattttgtccttggataggacattacatatcattttcgacaagctgtctgattttacgaaacagtggagtttttaaataacagccaagttcagaggcaaagtcacaccagctgttgtggaagtgtgtccggaattggtgggtttttggtctcactgacttcaagaatgaagccgcggaccctcgcggtgagtgttacagctcttaaggtggcgtgtctggagtctgtcccttctgatgttcagatgtgttcggagtttcttccttctggtgggttcgtggtctcgctggctcaggagtgaagctgtagaccttcgcggtgagtgttaacagcttttaaggtagcgcgtctggagttgttcgtttctcccggtgggctcgtggtctcgctggcttcaggagtgaagctgcagaccttcccagtgagtgttacagctcataaaagcagcgtggacccaaagagtgagcagtagcaagatttattgcagagcaaaagaacaaagcttccaccttttggaaggggacccaagcaggttgccaatgctggctggggctgcctgcttttattctcttatctggccccaaccacatcctgctgattggtagagccgagtggcctgttttgtcagggcgctgattggtgcatttacaatccctgagctagatacaaaggttctccacgtacccatcagattagttagatacagagtttccacacacaggttctccaaggccccaccagaggagctagatacagagtgtccattggtgcattcacaaaccttgagctaaacacagggtgctgattggtgtgtttacaaaccttgagctagatacagagtgccgattggtgtatttacaatccctgagctagacataaaggttctccaaggccccaccagagcagctagatacagagtgtcgattggtgcattcacaaaccttgagctaaacacagggtgctgattggtgtatttacaatccctgagctagacataaagactctccacgtcctcaccggagcagctggatacagagtgtcgattggtgcactcacaaaccttgagctaaacacagggtgctgattggtatatttacaatccctgagctagatatactctccacattcccactagactcgggagcccagctggcttcacccagtggatcccacaccggggctgcaggtggagctgcctgccagtcccgcgccgtgcgctcgcattcctcagcccttgggttgtttgttccttcccggtcgatgggactgggcgccgtggagcagggggtggtgctcgtcggggaggctcgggccgcacaggtgcccatggagtgggtgggaggctcaggcatggcgggctgcaggtcccgagccctgccccgcgggaaggcagctaaggcccggcgagaaatcgagcgcagcgccggtgggccagcactgctgggggacccagtacaccctccgcagccactggcccgggtgctaagtcccccattgccccgggccagcagggctggctggctggctgctccgagtgcggggcccgccaagtccacgcccacccggaactccagctggcgcgcaagcgccccacgcagccccggttccgctcgtgcctctccctccacacctccctccaagctgagggagtgggctccagccttggccagcccagaaaggggctcccacagtgcagtgggggggctgaagggctcctcaaatgccaccaaagtgggagcccaggcaggggaggtgccgagagcaagcgagggctctgaggactgccagcatgctgtcacttctcagcaggctggattggatttggcacttctttactgaaggtcagttcttctcagcgccgcttccatgttttctgctagtcaagcttttaatgcttctttgtgccgtcaggccattgtgaggcttgtcatgagctaaaagtagtttaagaagcccttcgttaacctggcccagtgttccatgttaagattagttagattgttagttagattggcttactctgattgacttgcttctctctggggataaaggttgaatgatgtgtcaaatgagattagggaggccagtatgacatgaacatcaaagatgagtgagtccttagctcttccatacacttcggtagaaagatttcaaatatatgtagggtaagcatacatcttaagtttgccaaagatagtcttgaattatgccggttgtcctgattgatttattagtggttccttatttcactgtcacatgacccccccccccccattggacgaaatatgtggtcactctctatgtagtataaacattgaagcctcttccatcaagagagacacaatgcctgtgccatccaggtttagtgctccccagtatgggtcttaccctgtcaggtggagggagactagacaaatcattctacttgtgaatggcagtctattctgcttttcttgatttttcccccaaccctgacttgttttcctctttcaaagcattgtgctttcaaagcattgttaaatttttttactgtattgtgcaatcagaagttaagatcgcaaaagaacaaagcaaattatgattaatgtacagtagtaaccaggcagacaagatcactgcctcatgcactgcctcatcactataaaatatgaatagagcccccccagagtggtgcag

SEQ ID NO: 5926 - DNA, 6000 bp, Homo sapiens
aagacagggagggcaccatcacaaaaatctaagatgaaagagagtcgctcttttgcttgattctcacatccattcttccagcctgcaatgggcagggcatatggtcaggtggatccaggggccaggcactcgcacacaccaccagggctgtgatgcatgggcccaggtagaggtgccgtgggaggggtcattgagacagagagtgtgagctgggcagaggaaatcagacttgactttaggggttacagagcaacccaaggagacaaaatgctgctgaattcccaacagcctatcagggagggaatgttttctgtgactcatttaagtggcctcacttggtggattatattctgtcattggcccctccagcccttcccccttttaagaagaggatgtttgtaaattagaagcaacaggaacaagaaagtcatttgaagagcccgaggaggattaaacataagtattcgttatgtaatatttgtaattccctgcaatcagcctgttcctttccccatagggggcaaggagatcaggatctggtgaggtgtgaatcttgggaggtatgaggaagttgggctgagaaagtgaactttctcctggtctttcctgagggtgtgctcttagaggtctccccccttaaggggcaagggttagacaaatgacaatttctaagaggaccgaaaggattgtatacaccctgcctcgtgaactagacagcagatatcttattacttgcacttaacatggggcagcctagcgattgagtaactgggttgggttggcaacagctacccggcttcacttatgaataatagtaataataataaccgcagctaaagcaaccccattattagtagctgccatgtgtcagacactaggtgttttacataaacaatctgaattcatcctcacatttccctttgcaattgacattgcgacttccactttctaaatgaggaaacagatgagcggtcaaataactggatatgattctaattcatcctctgtctgattcaaaaatctctttttactgtgcatttaagtcaagcagaaaattggggaggtgtgctagaacctgagaaaagcaaaaatgaatttgaatgtgtggggggattactaatagcagacatgaaagctccaacctctcccctgaagaggcaggataaacgtcataatttttgcattcacagttaagttggacacattcctaaaaaacagcctgggttggaaggaagtggccagattgggaaggggctgttggagacggtcagggagaatggtggaagccattgtctgcctctcattccttgcttgcagagagcaaggcaccctgatgtatattagatcactctagatttttggttgcctgataaagacagtgagaggagataaaaggcatgtgaagtgttggaattatagtatcagtgctctctaataaatacctgatgtggcatgaaagtgcctcaagcacattcaaagcatcaattaaattaggtggagtgagagagggcagtggaacaattgcaggatgcgcctggccatctcctcccttggttggggcatccacacatccattctgtctagggtgtgaataacctcaagccctttccttttgatgtccctctgagcctgcactgctttgtgacagtcttaggcatgacaaagctctccttctgtagctgacataaatcagaatagcctcccccatgtgtatccttcacacttcctttatttcctaggctttatgatcaatgggctcccttctctgctgtgattatggctgaaagcttttgtttatccatgcacattcttaatcgatattagttcccaatcctcccaccctgtgatttatgcatttgcctgtcttctgtattgagtcctgaaggattggaatttgtgtaaatgtcatgtacaaggagaaggcacatttggtgctatctcaagttgcattacttttaaagcccccagaaccatcacattgagctgtggaaaatatgactctctgcccagaccaatggcaggcttcctgccatgaggcacacagagcccaaaggctcaggtgtagtaatactagtctgaaatgctcagtcacagggtgaccagaccattaaactgtaattaggttgttataattattgaaaaccaaacagcattataataatagaattgtgcctctcacattttatatctcgcccaggatcatattagtagcctattcagtatatgggcattgagtaatagctgctattcttcagaaggcatttacttctattaaaagtgctgggtgagcaatttgatgaaagcatggacattttcctagtggaaaatggacatttatatgacattgttcagagacctggaaattataaaggcctacttctttgaaaatcaaagtcctatttttaacctctaaaacacaaacaaaataaaatacgaacagttatcataaaatgttcttgttccttttttgaaatagaatgtattagagaaatgaatatgtaaatacccaagaagaaaccaaattctgtttccatgtaggtatgtataactggatgaataggcacttaggcaaatcagaactaggttacaggggtgttttcaggaatttatgattagattgtgatggtttttagtgcagctcttcctcatgttagcagatagcccacacgtgtgggaaagctgagtcgtcttattgaatctgacagtaaccgtttttgtccctttctttttcttttcagaactctctttgctcacaagttaccaaaaaaaaaagagccaacatgttggtattgctggctggtatctttgtggtccacatcgctactgttattatgctatttgttagcaccattgccaatgtgagtaatgttcttttgttcattcattcattgagaaatcattcgaatatttacatcaagtgcacaaaagaagtttaagccacagcccttgcccttcatgaacttacagctcagttgtgggaaaacaaaataaacacacgcttgcccttcaaacaattaaataacaggaggataaaagtgaatgtccacaggagtaatcctgccagagctgtaggtggttaagggctggaggatctagtgcagcttcttcggtctctagaagagccttcccagcagcaggggtgagtggagcttgaggtgaacctggaggagtggtagatggctgaggtttctcttagtgaaagagggaaggtggaaggatcatagggatgcattcaggtgggagtgctagcaaaggagcatatgtaggaaggacaagctttggtcagaggataaggaggacacacacctatgtggctggagccgaacttcccctccttctgagaagcttgattagaaggatagatgggaagaagaggatgccagactgacaaattcaaattttgagcaaagagtagcatgtgaaagtggagttttgcaagattaacccagtgccactgaattaactaactcagacaaaacgagaaaaaaaaaatggaggtagtgtcttttctctctgaaccctgggctactctgacctctagtggtggcttacagcgcccaatttgcttttacttgtgcttttctcagaaaaaagccagctccttggacctaaaaaccaaggccaccaatcactaggcaggcaaaccatggtttcagaatctgtttaggtccctatcacagttaaagtataagtgagttttaaagttcagatagaagagctttgcaaacattagtgggtgtgatcataagcaaggctaattaagaataactgtgataagacaacccccgcccacgtgacctccttgttttgtaatttagccattctatatgtcaactcctatatctatccagataaatctgataagcttcttcaaagtgtattaatgagcgccaaagcgctgcgtatctgtgaattaccagcccctaatataaggctaggcacacagttgtttattgaatgaagagcagggattggcgtaggtgatgcatgttcccggccccacctttccagtgtgtgcatttgtgtgtgtgtagacaggacactgcacttgttttctcttccagaaggataattccttttcttgggccaggcaggaagggatggcggcaccatgatcagtctgggggaatccattcaggtcacccttcagcttttagtagcccctacaggaaagcacttgctgtagtattttactatcaaattactttgcatgttgtgacagtcaagtttgatccttctgtttagatgaaagtggcttattaaccactagattcattgttattttcccagtaggtcttatgtttcttaattgtttccagttggacatttcacttttttcctggttaaccagggacttaaatgaaacaatcttgttagagtatatgaactgcacatacctaagccagtttcctcatcctggacttctgtttctcagaaccttagaattttaaaccactgtggttgagttacttccatttttgttaagtcgtgaagaatgtggagcccaaagagggctaggtgatttctttctgggtttcacattcttctgtgtctcttctcttggcaactttgtgaacttcagttttaatcggaccttatttccgcccacagataagctgcatagccatagttatagctaaatagaatgtctttattaaaatctgatcccgatgcaagctgatttgttattttatttttaaatcagagggccagctttcaattaacattttctttccttctggtttcaggtctggttggtttccaatacggtagatgcatcagtaggtctttggaaaaactgtaccaacattagctgcagtgacagcctgtcatatgccagtgaaggtatatataaagatattgacccagtgctgacaataggtgtggtcagggaatgttcagcccctggagtgacctcatgcccttgttctcctcgtcctgtgtctacagatgccctcaagacagtgcaggccttcatgattctctctatcatcttctgtgtcattgccctcctggtcttcgtgttccagctcttcaccatggagaagggaaaccggttcttcctctcaggggccaccacactggtgtgctgtgagtatctcatgggtagactccagtttacacttttaagtccatcttaccatgggtgtttctggcaacttgaacagattagcacatggttcagtgaaacttccttgtgcaattttctcctctggttatttgttctcttgtggagaaccttggattgctgcttaggttaagaaccctcatctgcttcattgttcaaaaccagtgctcctgggtagctaccaagtggcagtgcatatctgttagtagcacgtgtgtacaagacacttcaagaaggcagaaaggtaggagttctcagaaagatgaaaccactgccacaatgcacatcattattgtgattctcacttaattgttgttctttcccaatatactcggtttggtggaaggacatgctcttttgcatccctgagtagctttcctagacccacaagggccagacaggacagctgggtggtaggcatgaggttctgtgttttacatcacagcgtggccacacaaaccagtgcagacatgagagcccagacacctctaatttatcaacataccgtcgagcttggcccaggggacatccatcagaactcctgtttagggacaaacaagcagaattcattttcctattgctaatgagggaaataggatcttcttaaaattagtaaaactttttctcgactttaatgtaagaaaacacaccgacaaatctccttttcccctgcagggctgtgcattcttgtgggggtgtccatctacactagtcattatgcgaatcgtgatggaacgcagtatcaccacggctattcctacatcctgggctggatctgcttctgcttcagcttcatcatcggcgttctctatctggtcctgagaaagaaataaggccggacgagttcatggggatctggggggtggggagga

SEQ ID NO: 5927 - DNA, 6000 bp, Homo sapiens
tcctataaggacaccagtctgattagattagagcacgtgctaacagcttcatttaatttaatcacctctttaaaggccctattcatcctgggtgtggtggcttacgcctgtaatcccaaaactttgggtggctgaggtgggtggatcacttgaggtgaggagttcgataccagcctggccaacatggtgaaaccccgtctctactaaaaatacaaaaattagccgggtgtggtggcaggcacctgtagtcccagatactcaggaggctgagtgggaggatcgcttgaatctgggaggtggagtttgcagtgagccaagatcatgccactgcactccagcctgggtgacagagcaagactccacctcaaaaaaaaaaatagtcacattctgaggtactaagggttagggtttcagcatatgaatttaggcggaggggatataattcatcccataacaaagatagaaagcaatcaaaatgcctttgatgtcattgtattccctatcatatgcaattgcctaattaatatttagccactatctactttaatcttgtgcttctgagaatggaaaacatgagtcatgtaaaccaggggtgtccagtcttttggcttttggcttccatgtgccacactggaagaagaattatcttgggccacacataaaatatgctaacactgatgaatcaaaaaaatttcactaaaagtatctcacaatgttttaagaaagtttatgaatttgtgttgggctgcattcaaagccattctgggcagcatgcggcctacgggccatgggttggacaagtttgatctaaaccatcttaggctgtggcactgagctggccttgacttctcatgagaagtgggaaccccctagccagtttttgccagaaatttccagacttctactctaggcaataagaagaaatgctctaactcagtactattcatttgaaacataataagggccacatgtataactttcaattttctagtagccacattaaaaattagtaaaaagaaacaggtaaaattgaattcgatatactttatgtaaccaaatatatccaaggtcatattgttccaacatataatcaatataaataattattaataagatattttattcttttctcacactaggtctttgacattctgtctgtattttacatttgcaacacctctcaatttggactagccacatttcaagtacgcaacagctacatgtggctagtggctgtgttggacaattcacattccgattcttacattttaaaacatttcctgggacagttgttgtcttgagtaggaaaatctaattataagcactcccaattcaattatactttcacttgtgaaatcttgtaatagtaataagttcataattataataacaataaattgtaataactttctttgtttcctttgggataccagagttaaatttctgcctgattaatttagggaagcacaccaatcacgaagatcctgaacagtcctcaagcaggtgatttatgtatgtattcattgacctatagagctgacatgtaaacgtcttccagaaaagtacacagtgatcacaggtgcagggaccttgaaataatctattgccctcatattccacccaaaaagaaaaatttgttacgtggttgttagatgtcccagacctttaggagattttcctgaggatcttatcacctagagccacattctcagccagaacaaaggaaaccctcactgcagtattcatgtcgtattccttggaccactgggagctcttgcagtaattcatgatagttcttgactttgcccctgaaattggataattttacctacataaaaacagaagagaacattaagatacaacctcagcgtgtctggtcttgcctggtgcttgaatcctcctcttttggttgatgaatcttgactcatgttttaaatcagccgataaataagattttttgagtacctataggtggctacttcaaatgaagacaaagtcatttataacacatgacccttgttcttaaagaatctaataggatctactagaatcaggccttcactcacatagattatataggaaataattaaaggcagtagaatgtcagagaagggataaatcattaagagaaagagtcaccaaatgagacttcaaggaggaggtaagactttttcttgaccttcgaatgagcagaataaagagcatactgattgaaggcaaacatgggctgacatagagcactgccctgaagttcagtgagaagactgtctttcccaggaggcaacacatctgtgtgtcaggaatggtggtgaagctggttggatagcatgcagccagtttaagcaggatcttaaagacatggtatgtttggatgtgataccacagacaatgcacagataggatttaacatgagtgaaatggcattttaaggtgattttaatccgttgttgacaaaatgaagaaagaattgattagagccagggaaaaagaggcacagcaagtttgtgatgatcaatgaatgtgatcacaaaagtctagacatgcaatataatttaaaaatagattaaaggaggccgggggtggtggctcatgcctataatcccagctcccagcactttgggaggcagaggcaggcagatcacaaggtcaggagatcgagaccatcctggccaacatggtgaaaccctgtctctactaaaaatacaaaaaaattagctgggcatggtggcatgcgcctgtagtctcagctactcaggaggctgaggcaggagaattttttgaacccgggaggcagaggttgcagtgagccgagattgcaccaccactgcactccagcctggtgacagagcgagactccatctcaaaaaaaaaaaaaaaaaaaaagattaaaggaaaaggtaacgagtttttaaaagatatgctctctgggactgagaaataagggaagagcctcagaattgtgactgaggaacaattctgtagtgtgcatttttaaaaaagaaaagcctaggctcagcctaactaatcattcatctatgcccccaaacaacttcacacttggttctatagattcaagttccacatgagtcagaatccctaaaggacataatcctattagcaaaggcagttataaaggaagtgagaagtggaaattgacctctgtgtttcattagcagtcttcctcagagcagaagtgggacaatacaatgcctggaggactggacaattcattgcaagtgaaaaagggctcctgacacctattgtgaattttgcttgcctaagaagaactcatctctttcctccttcaactcttctgcctaaccttgtcaagttgctgcaggaaagaaacatgcttctttttagttggacacaagtttaggagatctgtgataaatcatggcaagaatgattttgacatacttcttggtcctgggcagagtcacaatgatgatattctagaaacaaggttcaaatctttccacacaaagatgtgtacctgtcaaagcagtgaaatggctgacaggactttttcaagcacctctaaaggacaggagctggagaacagacttaggagagtggggcagaaaatgaaaaatccaagtaacaagcaggaagaaacctacaacagtgggtagtcgtctgacaggcgcatataggtggatggaggatgctgttatgtgaacctagcagcaaggtacaatatgtccaaataagcaatgtcagggggtctgagagcaggtaacagggaccccagcttaaaaccttgagttcaggcacagcactctgcatactgggggacctagagggaaagacaacatccaaaagacagggtcacaagcagaagaccaggagacattcaggaatggagaatgagacagcagatgactattagaattgaggaacaggcagggttttttggtctcaagagagcaatgccagtgactcaattactagaaataagtatgaaaaggacagacaacacagcttcctttacgaatggatttatttattattaagataaaatgtctaagataaaaaatttatctaatgttttattaatcttccaatcccctcctatcaattcttttcttaaaaaattatattatcagccaggcacggtggctcacacctgtaatcccaatactttgggaggccaaagtgggtggattgctggagcccaggagtttgagaccaacttgagcaacatggcaaaactccatctctgcaaaaaatgcaaaaataagccaggtagtcccagttacttgggagtcgaggcaggaggatcacttgagccagggaagatgaggcttcagtgagctgtgttcgcactactgcactccagcctgggtgacagagtgagacccccgcctcaaaaaaaaaaaaaaatgatactatctgtttagctttatctttttaaattttgactaaattttcaagcagccatttttctgtctgaattgttccagatagtttccagagaaaggaagacaggttgttggctaaataccaaactgcatctcatcattagaaggaagcacaccaaatttcatttttctccacctttattaagtgcagatttttgtttctcatccaggaagttctgtattatcagggcaatgctaacttcagtataaatgacacagaaactattaatagattatgactatgatgaaactgaagtagaaaacagaagtgttctgaaaagagaagtaaaaaaatggaagggggaaaaggcaaagtattctgccttccaagttagatagctatctttatgaaaggacatatttcaaaggcaatataaagtctttatggtgctcttacctacctatatttgaattgggggatgcttcacctgcttattagtgaaagaagaaagaatacacttagtaaattaaattttttttaaaactttgtctttgctcagaaccagctccacccaaatcactcttcgcagtgaacaaaacccagacttcagtgactttgctgtgggtggaagagggagtagctgatttctttgaagttttctgtcaacaagttggctccagtcagaaaaccaaacttcaggtactgtaccttttgatctaccttttctcagttaacttaagtaaggctaattatctgggcaaaataagaatcttctatttctttgagctatataaaatgaaaactgtttatttgctcttttgtgtttcactgatagaaattaacagcaggcttagaccaagcccaaaagttgttatgagaacttttatctttgtctgtatcacttgttcctaattcataagtcactccaggtcagacaaaggaataaaggtagtaggccattgaattgatcaagggaagaaagaccctacaatataaaatataatttaacaaatatgaaccatttgccaagtatataaaggcactgaatagaacacacatgatagaatcaatatttgccttcaaaacatttttatatggtgtagacattgcataagtatagaaaaaagtaaagtaaaatataagtaccacaagacaggtccattcgaccaagagaatttaaaagaaacgtgcatatctagtttgtaagggggacagtcttattgcaaaatgaagactgagagaaggttattgctaaagctctagaattacaaatggcagatacgataaacagagttattcaccaggtcagaatgaatgaaaggaaagagatgaacctgcagttctatgagtggcaacgccacaaggaaaaaatatttcacagccagaagtgaaaggaaaaggacagatttgttagggattttacataatatagtgtgtagactaatactgcgaacataagtaattgatcttttttaaataatgaagttcatgagattgagaagaaaaaaggaatgctgggagtgcaaatcttttcatattgaatgctaagataatttgctttgattcctttctccttttgagattcccttctatgaatgtatctcttgttgatttgtactgaacagctgaattttc

SEQ ID NO: 5928 - DNA, 6000 bp, Homo sapiens
tgatcttgaactcttggcctcaagtgatcctcccacttcagtcttcccagtggtgggattacaggcatgcgctacttgtttctgatttcatttatttgactcttctctctgtttttcctagtctagctaaaggtttgttgattatcttttcaaaaaaccaactttttattgtattgatcttctgtgtttttttttagtctcaatttcatgcaaatttcagctctgatctttatgatttctttccttctacttatattgaggtttggtttgttttcttttctagttccttgaggtgcatcattaagttatttaaagtctttctacttttttgatatacatgtttattgctataaaccttttttcttcattctgcttttgttgtatcctatagattttgttatgttgtatttccattttctttattttaagaaattgttgtttccttctcaattacttcaatgacccattggtcatccaggaacaagttgtttaagtttcatgtgtttgtgtattttctgaggttcctcttgttattgatttctagttttattccattgtgatcagaaaagataccaggaatgatttctacttgtttgaatttgttgagacttgttttgtggtctaagaaatggtctattttagagaactcatgtgctgatgaaaagactgtattctgcagcagttgggtgaaatgttctgtaaatgtcagttagacctacttagtctagagtatagtttaactttgatgtttctttgtcgattttctgtctggaagatctgtccattaatgacagtcaggtgttgaaatccctactattattgcattgcagtctatctctccatttatatctattaatgtttgttttatatgcttaggagtgccagtgttgggtgcatagatatttataattgttttatcttgctgaattgacccctttatcaatttacagtgacctctttgtctctgtttgtttttagtttgcagtctattttatctgatataagtatagttactggggagtgattaagtcatgaaggtggagctgtcgtgaatgggattaatacctttataaaagaggttgaagggagctcccctgccccctccgtcatgtgaggaagcagcaggaaggagcaatcttacaagcaaagagcagccctggcacacaccaaatctgctggtgccttgatcttggacttcccagcctgctgaactgggagaaataaattttctgttgtttataaattacccagtctaaggtattttgttatagcagcctgagcaaactaagccatgctcctttccagctaatcactgcccccaccccattagaaacaaccactattatcattttgattattatacattagttttgtttattttttaatttaatgtaaatgaaatcatactcttttgggtctggtttcttttgcttggtgtaatgttgaaatttagttagatatttttgtgtgtatcagtagtttcttacttttttatgtgatgtagttagcatttccttgtatgaatataccgcaacttgtctttgcactcttctgctgatgaacattatggtttttccagtttttggtaagtatgaataaagctattaaaatcattcttgaacaatctttttggtggccatatgctttcatttctcttgggtgaatactgtatttagaagcagaattgttggattataaaacagttctatgtttatttcataagaaactatgagacagttttactatttgattccattttataccctcactggcaatgtatgatggtttcatttgctccacagctttgccaatgtttgattttgtttgtctttaattcttgccttttcaatttttgggaagaagcaaatcgttgtggttttgatttgcctatctgtgaagactaatgacattgaataccttttcatgtgcttcttagtcattcatatatcttcttttgtgagtgttgaaatattttgaatattttcaatttttaattttctacttttgtctcaattattgtcataggtgttcttttgcatacaagttctttgtcagatacatggtattgggaatattttctctcagtctctggctttcctatttattttcttaataatgtcttttgatgaagttcaatttatcagtttttttttgttttatagataattttttgtttcctgcctaaaacgtctttaccgaccccaaggtcatgaagataatcgaggttttcttccagaggctttatagtattagccttgaggtctgtgattcagcttgaatttttgtgtatgatgtcagttaagggtcaaagttcaatttttttaccatgtggctattcagtggttccagccccttttgttgaaagctttcctttcttcagtgaattgtcttggcaccttgttgaaaatcaattgatcaattaaatatagttctatttctggattctattctattcttttgacctatttgtctatccttatacccttactatactctcttgattagcttcaagaatttttatcattttttagttctgttcctttcatcgtggctacttttgcctcttgacaatattagcttaagagtttatttcagaagttagcacagctttcaggctgctgtgtatctcagagtgtctgtctaaaaaataggaaaaataagaactcccttatagggttattgggagaaataaacaatctagtatacatgtttaaaatgtattataactctaaaataatccttaagtgttcagaatattgcttatttttgtttcactttttgctctcttgaccttaaaacatattcttatgcaagtttactgaaatcccccagtaagtttcagattgtggcagggcacctgttctgtggatttagggaaaaacaaaggccccaatataattgaggggagtgacaggcacctgttttcttcctatttacagcaagccttaacagaaggtgatggcaattctttctgccatttttactttgtctgttttaaaaacagacaaaggtattactggacttccaatgctttgctcttccagatatttctaatttgatcccctgaacagtctgctttttttttctttattgtggtaattcctttttcagatgaatgacctttgctctcctcaccccaaatcaatgaccttttaaactgttttaatatttactagggaattacttgttctgaggcttggattgagtttctctaaaagatggtattctagaatttaaatggtggtgagaggaagggttgaaaagctgaatccattcttttacccagacgaaactaagctgaataacaactctctctctttctcaatcatttaagagcttataacaaagatgaatataaagtgtcaattattttacaacttttacctgttaccgccctagttcacaccccaactgtcattcttatttctaaatggaaactttccttccacaagcttaatggcaactttttacctttttggcctttgtgtttactagattgtaaaatcctggaggacagctctttgacgttatttatcttagttttagattttagcatcaaaccaagtacattgcattcatttaataaatgtttattcaattaaaccaactgctaatattctacccaatacagtgtcatatatatatccgtatgtatatatataatattgcctgatacacacaaacacacacacacatatatatatgtatgtaacaggcaataattgttcgtgatttagtgatagtaggaactcagtatttattcattgatcaattaatagtttgaacacattctatatttagagcattagatgagtcaagtgctactttcttttttaaaaaaatgttagaaccagctggacgcagtggctcacgcctgtaatcccaacactttgggaggctgaggcaggtggatcacgaggtcaggagatcaagaccatcctggctaacacagagaaaccccgtctctactaaaaatacaaaaaattagccaggcgtgatggcaggtgcctgtgatcccagctacttgggatgctgaggcaggataacggtgtgaactcgggaggcggagcttgcagtgagctgagatcgcgccactgcactccagcctgggctacacaggcagactccgtctcaaaaaaaaaaaaaaaaaaatgttagaaccattcaactagcattctgtagaccaaattatctaaacagtagctctcctcttcctttttctgccatgttatccataagatttggcctgtatcaccttataataaatgaagagagtcttaaattcttataataccaaactcctttggagagaattcagaatagatttatgtcatctcaaattctatcctattccagttaatgttacagacagattctagtatactttacaaagataggtgaataagtagagttttgaaaagatacagacataaaagtgaagaacagatgccttctgatgctagattttccaaaactcctactgttatgcttatatagaaatcattctcagaccttccttggattaatttctgttcctagagcaaactggtagttatttctttctttaatagaacatgaacttgtccatcacatcctagaaagttagtcctagggatatcctttaaagcctaaaggagtaaattaagagcaaaaaaaggaagtagaccttgcaacaggtggtgagtgtctgagatatagcactaggagagaaataatatagattgaaaacagaaatccttaaacatttctcatataaacccatgaaagatagatccataaatattgtggggactatggggactaggaagcttggaagtatccctaatctagatagtgatggtaggctaaatatctacggcttccgtaaacgttcctctaaacctccctgtaaaaaacacactaagctgattgtgtaatgagctgatccagtacaattgcctccaatttcattctggaccctgaacaggaggggacatcgtgacaaagcaaattgtctggtatcatgaatttggaacaccgtaagtgatctttactgagggttacattctgtcattgtcagccttttaaggaggccttgccaccagcgcaggggaggtgaagtctaagggaaggtaatattgtcaatgcctgctaattagttctaccctggagattttaactttctgcgaagtttttaaaaacaacttccaaaactctgctgatcctgaaatgttcgagaattcagagttcctagacaatggctactgtcccccttcccactgattaggggagttggcatttcaggaaccagagtttctaagggcgccaaatagaagggctcaaagggaatcagcaggcgatggttactgtgggcgggtaaatcaggtgatttagaggaggggtttggcgaggttggggtcgggctttaaacgtgggagggctaattaacaggagattaactggagaggggcggtgcctgcgtccggcccgcgcggccacagtccctgcattgcgcgcgacccggcggcgggacaggcttgctgcttcctcctcctcggcctcaccgtgcgtactgggaggggagaaggggaccgcatgcaaagggtggcaggcagggagggccagggtgggtggcagatggaagacttgggggggtctctgccagctggaagtgcttggctccacttagcagctaaacttagcttttcaatcgatcgcttttgaaagggaattgtatttctgtccccgtgcgggtaagttttcccatttctcaaactccaggaatgaaacgagagagtcttttcatgcttgagtgatgatttccaaacttagccttttcaagtcaaagtaacctcctgtttgaaagggtcccttgaactctggggaaggaggaaaaggcacgtgtagtaatggaggaaatgcctgtagtttgaacgactgctgttctccccaagagtgcaaaagcctgcgatgtctcaggtttcatgggcatagtggcctttatgcctattgtaaggcagg

SEQ ID NO: 5929 - DNA, 6000 bp, Homo sapiens
cagttgctgtagcattcaaagtcaaggtaagaaccgtcgaggttgtctaattaaaacatttcttttatgtaagaaattttaacaaatttcagtgaaaatgtttttggtagttatgataaatattacagattttatgctctgtgtcttctccacacttttgttctgagcccttaaagccttgtaaatatcccttctagaaatagaagagcctcagatttatatactcaaaaataagagtaaatcatacctttataaagtgaaaaataaagtttggagtcctatttctattgctttctaaacaaatgaaacatgaagtctgaaaggatggacttctagttactctcttaaaatatactataagataattatttgtataaactgtattgaattactataccaggctccctatttctttgatttcactttaactggataagtaggagtgggcgggtggaggggtggaaaatatgtttcaaagtcacttaatcacctcactttcctccattcaactcgtttgatttagggtgaggggaaagagattttctagataacttttttatctctgttcaaataagagaaaaaaatcttctgggcacagctcttggaaagaattaacagctcaataaataatggtccccttcacccattcaggaaggtggcttccctgataagacagttatttttattgtgaaagtaaggtggggatgcagaaattctctcctctgaacaatctaagaagttaggaaatgctgttttcccttttatcctcctcagttccataggtacatgctagaaactgggtcacttggcctgcactggttttctataaccccttaaatatgaaaagctaaacagaaataagcagaggctggtaagattctgccctctacttcagcccaatcaaactgtgaagaactgacctgttctgttcagggaagagttgcaatgctgcatacaaatgcctgtggctctgtctataaacatattgtgtcctcaacatttatttatgtcaataatttggaactcagaaataatatgttcagagcaaaatatattaaacgcttctaaataaggcttaaaatgccacaatgaagtaaaaagtgtggtatttattcaaggctaaattgatattcaagttttgtaggtactttgtacttacttgatacatttttttttttttttttttgagaaggagtttcgctcttgttgcccaggctggagtgcaatggcgtgatttcagctcaccacaacctcagcctcctgggttcaagtgattctcctgcctgagcttccagagtagctgagattacaggcatgtaccaccacacccagctaattttgtatttttggcagaaatggggtttctctgtgttggtcaggctggtctcgaactcccaacctcaggtgatctgcccgcctcggcctcccaaagtgctgggattacaggcatgagtcactgctcccggcctacttgatacaatttaacctttctgagagatgagaaaccaagtgcccacatttcttatttttctggatgggtattttatctgaacataaaagagagaggtgtggaatagttgtcttggaaagtacgggaaataacagaaaaaagtaatgattattcgggtatgttctccagtggtacagaaggatgagaggatgagagagtttatttcaactagaggtaaatagggaaacattaaagtggtgtgatttggagccgcattacagccaagagatagggaaggacattccaggaatggaagacatatacatgaaggtagagagcttttctgttgggacagtggttccatacatctgcaagtgcttatggttgtattgggaaatgggactaaaaacttggattcatttaggctgtgaagaccctcaaataggaagtgtaagttttatttttgttgtaagagggatctttgaatgattccaagaatggacatgatatgcataggaaagaaagcaagctggaagacaggacaagtagaaattaatcaattgaaagaaacaaggcttgagtggtgagataatagtcttcaagccttcaagaatatttgtttagtataaagaaaaagaaaactctaaagctgaaggaagactatctgccttgcaagtcgttcaaaaagatttgcaattatagaattaattggtaaaaaataaatattttccaacttttaaattatgaagaaacagagatattcgtggaaaaagtggtgtaaatttattaaggggctgcttattaccttgagaccaccaaattattgatttttttcctcactttacctacaaaacacatacaaaaagtggaataattgaacttctcttagagatacataggtatgggtttctccattcatgagtgtatttatatacactcgcatatacataagtgataatatcttcagatattgatttttccatattcatgcattatccactaaatatgcatgatatatatttatggtttttatgcatttataatatagagaatcaataaatccttgttgagtaaattaatgcataaaatatgcagtagatcttcattattcacagattctatattagaaaatttgtctaaacactaaaatttgtttgtgacaccaaaattaatactgctgggcttttgtgatcattggcatgcatgagcagagtggtgaaaaatttgagttgctctgtttccagttgaagtggaacaaagtgaagctctgccttcctctctcagctcccatactataaacttcacagtgcatttatcgccacattgtttccatagttgtgctttgcgatgctgagtttactgttttaaatggacttcaagcatagccctgaagtgttgtcccgttgttcccacctcctagagggcctgacagaagaggtacatatgctatgtaagtttccctcaggcatgaactacagtgctattggccactaattcaatgttaatgaatcaacagtatatactaaggtgtctttaaacaaaaacatacataaaacattatgtattaagttatgtattgatccgttgattaaaatattgtgaccaaagccacacagtcacctaacactgtatctcttctaggaatgatggattaatatttgcaaattcagtgttcccagcaactttatggaacataattattgcaaaacgtgagaatcaattgtacatataacctatatcatacatattatataatcagtatcctattacaaatcggatgcttatatagataacattgatatttacatacttagatatttacatatctaaggtatctatatgagcagctacatagcaagtatctacatagcatgtatccacatatatatgctatatacataacatatacctatatctatgttatgtgtctgcttatatactttatatacataaatatgtgttatgcatatatgtatgaacaagaatacatctctaaaccttataaatattccactgttctatataaaagagtcaactgacgtaaaaagttgactcattttactggtctttaaaataggggcttaataactctgaaacttatgatttctcatatactttgacttcaaaacttcacttgtaggaatttatcctacagatatgaccacacagaaaatgacatataacatattaagaacattttctaatatgaaataattagatataagctaaatagttaacgatatagaactagttacatatattatgaacaacagaataccctgctaccataagcaaaatgaggacttttattaatataaagtatatacagaagataaaaaggtagagtgcagtaatactggtatgcttacatttatattaaaagagaaaatattatgtatttaattaaaaatgcatattaaggctgggcgcggtggttcacgcctgtaatcccagcactttgggaggccgaggcgggcggatcaggaggtcaggagatcgagaccatgctggctaacacggtgaaaccctgtctctactaaaaatacaaaacaattagccgggcgttgtggcacgcacctgcgcctgtggtcccagctactcaggaggctgaggcaggagaatggcgtgaacctgggaggcagagcttacagtgagccgagatcacgctactgccctccagcccgggagacagagcaagactccgtctcaaaaaaaaaaaataaaaaagcataccagatttctggataaggggacaaaggttataagcagaatcttgccttttcttttcttttctttttttttttttttgcatttttcaactacatgcatgtattttctcttgaaaaataagtggataaaccctaaatacagtaagatcatgatgatggtaaggtcaagcatggccagagtctctctgagagatacttggaatatattttgctcttttaaacaaatccaaactttatctgctttttgagccttgttccataggcatctcctctatgaaactgactgaggctatcctaatcattattatttacattatttttcaacccattttgagtatccactatgtgcaagtcatcatttggcactttataaacttataaggataacgtaaacataaatttcctttcataaatcttgtaatctggatatgtagaaaatataaaaattttaatttctataatttaaaattgttgttcatacaatctagtgtgtggttttatattatttacttgtttcaaatttctctctatgaaaattatttttctaagcaaattataatctctttaggctaggagtttgtctctgtctttcctcctctgtgtccagcattgacctagtcctgtggtcaggaaatagcaggccctgaatgaatattagagaatgattgattgattgatattgagcttgtggcttttcctatttttaaattgtatattgttaaagtaaaataaattatactttttcttttttaacaggtgatcatttcaaaccaagcatcagcaacaattaaaaatattcacttggtatctgtagtttaataatggaccaacatcaacatttgaataaaacagcagagtcagcatcttcagagaaaaagaaaacaagacgctgcaatggattcaaggtagaatgggttttatattttcaaactaaaataagttaatggaaaatttttatgtatagaaaggccactaactgtcaaaaagaacattatatctcatattacaatttttccattgaagcgtacattaaaatattaacaaaataatccctatattgatttaaatcagtttttaatctgattgaagttatttctttgctagaattttttgatgaataaaggtttatttatttttaactttttaatttttaatttttgtgggtatgtagtaggtatgtatgtttatggggtacatgagatgatttggtacaggcatgcaatgtgaaataagcaaataatgaacaatgcggcatccatttcctcaagcattttttcattgagttgcacaccatccaattatactttattttaaaaggtacagttaagtaattgactatagtcaccctgtgggctatcaaatagtaggtcttattcattctttttaactattttttgtacccataaatcatccccatcttcctacccccacacccccatgaccctttccagcctctggtaaccatccttctactcactgtgtccatgaattcaattgttttgatgtttagatcccacaaataactgagaacatgcaatgtttgtctttctgtgcctggattatttcagttaacataatgatctccagttcattttgttgcaaatgactagatttcattctttctatagctgaatagtactccattgtgtatatgtcccacttttttttacgcattcatctgctgatgcacacttacattgcttccatatcttagttattgtaaacagtgctgcaacaaacatggaagtacagataatcttagatatacgaattcgctttcttttgggtatatacccagcagtgggattgctggatcacgtg

SEQ ID NO: 5930 - DNA, 6000 bp, Homo sapiens
aggatattacaaaggatacaaataaagagatgcatagggcaaggaaaggggggagggtcgcagatccccccccaccctccccaacccaccatcctccaagaacatccttgtgttcagctatccggaagctccctgaacactgtccttttgggtttttatggaggcttcattactaggcatgattgattaaattattggccatgagtgaccagcttcacagcccccctccccttcgtggaggttaggaggtagggctcagatttccagccctctaatcttgccttggtctttctggtgaccagcccccatcctgaagctgcctaggggctgccaaccattgatgataactcattagtatacaaaaagacatcaccttgtagagactcttaagtattttaggagttgtaagccagaaaatgaggtcaaagaccaaatatatatttcacagtatcactacatattttaagacccaggaaaagtttagtttctttgcatttttaaaataaactatttcattctcttcctatactgaggtagcttaactgatctactgtcaattttaaactggttagaagctgtttaacttctgtagacttgtatttctaccaagaaagaatgagacatactgtgaggatcagtatctggcaggtagtctcttagtgttaactaaatgttttgacccttagtacttacttagtaaatgatagctattattattttcatggttctacacatatggtctcaacagcccctttctttttatcagtttcaccccacacaactcatagttggagaaatcttcagcagttgagctaactcataatctgagttatatatagctaggcctcatgtacttgtcacatttttaccaacaatcacaaaatttttaattaagtttgtagttatttctaagtttgaagaccctcaattattcagaattttaacaggatactttctttttccttggttagcaattattttgaaaatagaaaatgtgtaaatattaagaaccttttttttccctctcccaggggcttctttcctgtcgttgttggctttattagaagagtgccagtccttggatccctcctaaatttacctggaattagatcagtaagtaatcatgtatattttaggccaacaaaatacgtattttgatgctttttacttctagaaatttgagtaattgatacttggttaattgctgagttttgtattatgatatagttacttcacatagatcatgagtaccatgaagaccaaaaaataattattgctaaacctataaaatgtgaaattttgttttaccgtatccatttctggatccatattctctattttttaatgttactcagatttgatatgctatgctacctttctctttgagagttcagggcattttttatttaacttttatataatctctaattttagaagcaataatgtaaaaaggaaaccattatttcctacaaatattttgtttctcagactgtatcaccaatagactagattcagacaattaaataaggccgggtgtggtggctcacaccctgcactttgggaggctgaggtgggtgaattgcttgagcctaggagttcgagaccagcctgggcaacatggtgaaaccccatctctacccccgcaaatacaaaaattagctgggtgtgatggtatgcctatagtcccagctactcgagagactgaggtgagaggattggcttgggcctagggggtcaaggctgcagtgagccatgattgtgccactgcactttagcctgggtgggtgacacagtaagaccctgtctcaaaaaaaaaaaaaaaaaaaaaagagttgaataaagcactattatactgggattcagatggtaagagtctattcccagctctgtttacagtttgaacaagcttgtcaaatttgttttccagtgtgtgccttggtttccaccttgataaaataaagggaatcaaatcagacaagagttaaagagaatgttttcaaagttaacaaatagagtttcttccttttattcaatattcattcaacaaatgtttcgtactaaactgctaccttgaaggttgtaacatcttttggtggagtcttagaaggccattcagaattcagcttattttttgccaccttgggaaaagctttcctgactccctgtggctgactcggggtgtgcttctataacattcctgtgcacaactctatcatagcatttacctctgtttttttctttgtttttgttttttcttagagagagtctcaaactcttgggctcaagcaatgcccccacctcagcctcccaaagtgctgggattacaggtgtgagccaccacacccagccttacctctcatttaattgtcaaaaaaaaaaggcttcaggccatgcatggtggttcactcctgtaattccagcactttgggaggccaaggtggaaggattgcttgaaccaggagatcaaggctgtgttaagcgatgctcacaccgccacactatagcctgggcaatagggcaaaaccttgtctcaaacaaaaaagaaaaaagagaaaggaaaggagaaagggaggcacttccatgtaaaactacagtccttgagggcagagacaggttgtattttagtcattgttctatccccagtgacccagcataatatctgccgtataatggaaactcaaaatattttctgctaagcaagtgagtgaaggatggcattttgttgacctcagggaacttgctcaatttcaagacaagaccagatgactgtctcttagcctacctcctcagtttcaaaactaaacaaaatccttaatttctaaaagaatctaggtgatctagaattcagctgagttggctacaatccttttggctctaggtcagacccatatcagaagtattcatatccttctttggattggtttcatagatccaactctgtcctaaataactaggataaactagctttataggaaaacttaaaagactacaagttccagttaggttcagggaagttaatcaactttctaaagttgttcacagatttttatagatgtttctagagagaaagttcatagcattttattgaatgctcaaagagctaaagaatggcttacctatggaagaataagtaccactataagcctaatcccatttccatccccagggtaattttagggtcagaaccttacagccaagacaatctaaatatttcaagttacctttggagagagaatattgtgctttctctccacttaaatttaccttaaaattctaataaatccatgaattctttgagagcaacttttagtttcagtggccagccacctgtttgtgataatataacaaaatgttggaatgtaggcttataggggtatactctgatttcatttgcattaatctgcaaattcatacagtggtcagtgttatttatacctagaatggcttttgaatgtactgaaacttctagttacagagttgtaatcattatttgtgcccttaatttaaggattctcaagaatttgcataaatggacacccaatacaatagaatatgtttcttatcgttattcatcatgataagtgcttatgtaaacatgtgaatcgtgaaacaaaataaatgatcagatgattactagaatttgatagtataaccacctgggttatataacttttaatgtctctaccaattatatacaatatcagtctttacatcaccatctggaatgttaaaaaaaaaaaaaaagcccaactgctttatgtttggggtggagtaaccaaagtaaataaccacttacagtaatgtgtgttaaaatttatattcaataattataaatttatgcttacatcattaaatctatctttaatgtcattaccactttcaatccaaagtccagaatacacatttaaagtatttttagtcaataactgttgttaactattgaacttaatggagttaaatctgtttgtccaaagactacataggcccagaagagatccacagtaatggtcagttgaaatatcttattgggttcattaatgcatgaatggctgacatttcagttttttttatgtttttattttttattttttgttaagctagcagtgttatcttcatcttatacaatttctttattcattgtgttgcatttttcatgttgcacccttaaattcatatgtataacatgtcatgcaaaaaacaacttttagaaaaaaaaattttatacacgtttatgtatcagaagatgatggtgagtagtactggattagtcattgtcagtcataccttaaatttccacaactcttcttgtaaggctgggtttttaaaatcaacattttaaatattgatataatgttttataatgttccgggctttctttaattctctgtttttcttctccttacagtttgtagataaagttggagaaagcaacaatatggtataacaacaagtgaatttgaagactcatttaaaatattgtgttatttataaagtcatttgaagaatattcagcacaaaattaaattacatgaaatagcttgtaatgttctttacaggagtttaaaacgtatagcctacaaagtaccagcagcaaattagcaaagaagcagtgaaaacaggcttctactcaagtgaactaagaagaagtcagcaagcaaactgagagaggtgaaatccatgttaatgatgcttaagaaactcttgaaggctatttgtgttgtttttccacaatgtgcgaaactcagccatccttagagaactgtggtgcctgtttcttttctttttattttgaaggctcaggagcatccataggcatttgctttttagaaatgtccactgcaatggcaaaaatatttccagttgcactgtatctctggaagtgatgcatgaattcgattggattgtgtcattttaaagtattaaaaccaaggaaaccccaattttgatgtatggattacttttttttgtaaacatggttaaaataaaacttttgtggttcttctgaatcttaatatttcaaagccaggtgaaaatctgaactagatattctttgttggaatatgcaaaggtcattctttactaacttttagttactaaattatagctaagttttgtcagcagcatactccggaaagtctcatacttcttgggagtctgccctcctaagtatctgtctatatcattcattacgtgtaagtatttaacaaaaaagcattcttgaccatgaatgaagtagtttgtttcatagcttgtctcattgaatagtattattgaagatactaaatgatgcaaaccaaatggattttttccatgtcatgatgtaatttttctttcttctttcttttttttaaattttagcagtggcttattatttgtttttcataaattaaaataacttttgataatgtttactttaagacatgtaacatgttaaaaggttaaacttatggctatttttaaagggctattcatttaatctgagttttcccttattttcagctttttcctagcatataatagtcattaagcatgacatatccttcatatgatcactcatcttgagttaattagaaaatacctgagttcacgtgctaaagtcatttcactgtaataaactgactgtggtttcttaagaacatgacactaaaaaaaaagtgttttttttccaccgttgctgattattagacagtaggaaatagctgttttctttagttttacaagatgtgacagctttagtggtagatgtagggaaacatttcaacagccatagtactatttgttttaccactgattgcactgttttgtttttttaacagttgcaaagctttttaatgcataaaagtataattgaaatctgtggtatttatttacaaacatgtctacaaaaatagattacagcttattttatttttagttaaatctcttaatacacagagaactcccaatcttgctcatctaaataaggaaagacttggtgtatagtgtgatggtttagtctta

SEQ ID NO: 5931 - DNA, 6000 bp, Homo sapiens
aaataggcatgttggactgcatcagtctgaaaagcttctgcacagcaaagaatacaatgcaatgaaaagacaacctatggaatgggagaaaatatttgtaaactaaaaaactgataaggggttaattttttgttgtttttttgtttttgttttttcctttaacttttaagttccagggtacatgtgcaggatgtgcaggtttattgcataggtaaatgtgtgccatagtggtttgctgcacagatcaacccatcacctgggtattaagcccagcatccatttgctattcttcctgatgctctccctcctcacctgcttgacaggcttccagtgtgtggtgttccccgcaatgtgtccatgtgttctcatcattcagctaccactcataagtgagaacatgtgacgtttggttttctgttcctgtgttagtttgctgaggataacagcttccagctccatccatgtccctgcaaaggacgtgaccttgttcctttttatgactgcgtagtattccatggtgtacatgtatcacattttcgttatccagtctatcactgatgggcattttggttgactccatgtctttgctattatgaatagtgctgcaatgaacatacgcttgcatgtatctttataatagaatgatttatattccttgggtatatactcagtaatgggattgctgggtcaaatggtatttctacctctatttagatctttgaggaattaccacactgccttccacaatggaggaactaatttataccccaccaacagtataaaagcatacctttttctctgcaacctcaccagcatctgttgtttctgggatttttaataattgccattctggctggcatgaggtggtatcttattgtgattttgcatttctctaatgatcagtgatgttgagctttttttcatgtttgttggccatgtgaatgtcttattttgagaagtgtctgttcctgtcctttgcccactttttatttttttatttttttgagacagtctctctctgttgctcaggctggagtgcaatggcggggtctcgatctcggctcactgcaacctccacctcccaggttcaagcgattcctctgcctcagcctcccgagtagctgggactacaggcacacaccaccacacccagctaatttttgtatttttagtagagatgggctttcaccacgttggccaggctggtctcaaactcctgacctcaagcaatccacccgcctcagcctcccaaagtgctgggattacaggtgtgagccactgagcctggcttgaccactttgtaatattttttttcttgtaaatttgttaaagttccttgcagactctggatattaaacctttgtccaatggatagattgcaaaaatgttctcccattctctaggttgtctgttgactctgatgatagtttattttgctgtgcagaaactctttagtttaattagatcctacttgtcaatttttgcttttgttgcaattgcttctggtgcttttgttgtgaaatctttgcctgtgcctatgtcctcaattttactgcctggattttcttccagggtttttatagttttgggttttacacttagtctttaatctatattgagttaatttttgtataaggattgaggaaggggaccagtttcaattttctgcatgtagctagccagttctcccagcaccatttattcccattgcttgtttttgtcaggtttgtcaaagatcagatggttgctggtgtacagtcctatttctgagttctctattctgttccattggtctatgtatctgtttttgtaccagtaccatgctatttggctactgtagccttgtagtatagtttaaagtcgggtagcgtgatgcctccagttttgttctcttttcttaggattgtcttggctatttgggttcttttttgattccatatgaatttttaaatagtttattctaattctgtgaagaatgccaatggcagtttaatgggaatagcattgaatctataaattactttgggcagtatggctattttcatgatattgattcttcctatccatgagcatggaatgtttttccatttgtttgtgtcctctctgatttccttaagcagtggtttgtagttctccttgaagaggtccttcacttatggggttaatatttagaaaatataagaaacccctacaactccagaacaacaataaaaaaacacaaataactagatttaaaaatagacaaaagacttgaataggcatttctcaaaagaagacgataaatggtcaaacaggtgtacaaacatactcaacataactaatcattaggaaaatgcaagttaagactataattagatattgtatcatacctgttaggatggctattattttaaaagacggccggatgcggtggctcacgcctgtaatcccagcactttgggaggctgaggcggatcacgaggtcaggagatcgagaccatcctggctaacaaggtgaaaccctgtctctactaaaaatacaaaaaaattagccaggcatagtggcaggcgcctgtagtcctagctacccgggaggctgaggcaggagaatggtgggaacccgggaggcggagcttgcagtgagccaagattgtgccactgcactccaacctgggcaacacagcgaaactgtgtctcaaaaaaaaaaaaaaaaaaaaaaaaaagctactcgggaggccgaggcaggagaatggcgttagcttgggaggtggagcttgcagtgagccgagattgcgccactgcactccatccagcctgggtgacagagtgagactccgtctcaaaaaaacaaaaacaaaaaacaaataaaaaaaagtgttggtgaggatgtagagatattggagtcctagtgcacagttgggggaatggaaagtggtgcaggcactatagaaaatgttatggagggccgggtgcggtggctcatgcctgtaatcccagcactttcggaggccgagacaggcggatctcgaggtcaggaaatcgagaccatcctggccaacatggtgaaaccccgtctctactaaaatacaaaaaattagccgggcatggtggtgcgtgcctgtagtcccagctacccgggaggctgaggcaggggaatcgcttcaacccgggagccaaaggttgcagtgagctgagatcgcgccagtgcactccagcctggagacagagcgagactccgtctcaaaaaaaacaaacaaacaaacaaacaaaaaaaaacagttacagagttttctcaaaatattaaaaattaaactaccatctgatctaggaaccccacttctgggtatttatccaaaataattaaaatcagcacctggaagagctatttgcattcccatattcactgcggcattattctcaatagccaagatttggaaacaacctgaatgtccacggatgattggataaagaaaatttggtatataaatacaagggaatattatccaacctttaaaaagaaggaaattctgccacatatgacaacatagataaacctggaggacactatcccaagtaaaataagtgagtcacagaacaacaaatactgcacgatcccacttctctgaggtatctaaaatagttaaactaatagaaagagagagaatagtggttgccaggagctaggggaggggaaatgaggagttgctactcaataggtataaagtttcagttatgcaagatgaagatgttctagagatctgctgtacaacattatgcctgtagttaataatactgtattgtacacttaaaaatttgttaagtgggtaaatctcctgttaaatgttcctgccacagttaaagaaaaagagagaaaaagagagtgagagagacaacgataagctattgaaggacgctcagtggaaagtgtggtgatgtaggcagtttttatttttgcttaggattttgtttgcttgtttaccagtatggtaagcattctgtgagaccattcttgcctctcatgtggtccttcgtgtaaccagggctggatttgtgccagtgtgcagtggcattctgactaaatgttaacgtttgagaggcatgcacaaggcctacggctgacaatgtcttccttgctgttttgcaactcccgacatttatcaccactttgagttaaggtccatattcaagtcagattgtttccagataatcattgaggtactggcatgtaacacacattaaataatctcatctgctaacagagagtaagtgcatttttacatgttttagagattagaattggatccaaatgaggtgtaacgtaatggcaccatgagatctgtggtggggaagggtgatggggagaaaagcttcagcaaaaagaggactaaagtagaaatatcaaccgccagctttcatctgtgcctgggggcggtccttcctgtgctcgtggcacgtgtttatactatgattgacaacccttaaggagaaaggctaaggtcatgaaacaaagctctctttccttttcttttccctccccctacctttaccccattcctttctttttctgtaaaagctagctgtgatgtgtaaatgttgcacctgtcaccctgacctcattgtagagccatcttctgagtaactggcaactggcaactgatgctaagtgctatgaatgcagctggtgggaactgaacacaccagtgtaaaagatgaaactagaagtccttatctgtaaagtgagggtgtcaggctaagcgaccaataagctttgcttaagattttatatttgtgaagcatttatatgtaaatactttcactttttcctctgatctctaaggaagtggtgttaagtttgagtttgtcataatttcacagggtgactcttagttgaaatgtcactgacagcttgcggtttggacttttttttttttttttttttttaactccagtcagaaacaactagaagccattaaacaactacaggaagatgctgtcaaccaggaaggcatccttaggaagaggctccaagaaaccagccaacggctggaggatgtggaggagcaggtagggtggctcatggctacattagattcaggggacatctcctcagatgccctgcaaaccatgaaataaaaatggaggaggaacaacaacaacaaacaaaaaaaaaaagcaaagaggaactgcaagttcagtccctagcgactaacagtgagcagaggaagtaaagggggagttgtaagagaggcggtatcaacagcctgctgatgaaagaggcgactctgcagaaagaggcaacttgacatatcaggactttaaccgctgtagaaatagctcaggcataccaagcccatgcaaacacagaattgcagaagttcaggagaggcttatcacttccctgagaagaaaaacacattttcagttttgcctgcatcataagagtgagcactccattgctttctttcctggccacactgctacaatccagcactaactatccatgtccagggtaaggatcgagatcgagaagcccacactgccagtgaaaaagctacgtctttactgcataaattagaggaagcaatttcggaacaacggaaccttcaaactataaatactgaattatcgaacacttgccaggcacttcagcagaagacaaggaaactgaagagtgagtagcaaatattcatttatgacccagtttttgtccaccctcaggcggggcataggactacagacatttttctagattacagctaggatattattcctgagtttatgacaatgaaatggtttgagaaggcaatattgtggggctttcagagaggtttgctgagtggctaggtgcatgcatgggtttaaccattaacttccctttttgcctttttattataagctggttttgtctgtggctgtttttttcttttaaaattaattaaaacttctcaaaatttctaaaagtaaacaaggagaaaaatctagtatgcatggtatatttgaacttgcaagttgttatatatt

SEQ ID NO: 5932 - DNA, 6000 bp, Homo sapiens
tctgtgagacactttcctgctggtttctgctgatttgttgcttaactgtgggtactagtttcctgaattcagagaggagttcaaataaaattgcatctaagttcatttaactgtaaaactctgtttctaatgatatcagacattaatgaataatgattttaaaccaacagatattaactgtatgtgtactatatatttaaactcaatttttgtattgtatattatgtagcttaaaaggtaccataaggataaatggtatatatcaaattgcaatttcccatagaaataattcactcagttttgttttcattttgtttgtttttaatcttctcttttgactacatttgagagggaatttctggctagcacagaatcctttttaatttgtttctgtataatgtgcagcagatatacttaattaatgaactgattagcaacttccttaattactttccagtagtttttttcattattaaatgttcagcctttgaatgaatatctaccaatatatgccatcacaatttaatcaaatagaatatatctgtattttgtattgtactgaaaccgtctaaaataaagcaaatatttatatatcaaatagggaaattgacagcattgtatgtgatacaacacaatattataatgcattatatgaagtccttagtttgctttttcttatatctaatttgttttggttggtaccatgcaaaaaataaaaggcaaccactaagtcatagaatttaaatggcatattttaaatgactttgacaatttgtatataatgttgactgacatcttatcttcatataaggctttacagttttttaattaataaactttatttcttagagcagttttagtttcacaaacagcagaaagtacagagttcccatatattccctgtccccacacatgccttacacccctactaccagagtacacgtgttacagttgataaacctacattgacacatcattacacacaaagctcatggtttacatgagggttcactcttgatgttgtatattcaataggttttgacaaatgtataatgacatatccatcactgtagtacctacagaatagttttactgtctgagaaattctctgtgctctgcctattcacccttttctcctgccaatccctgtcaaccactgatcttttaactgtctttatggtcttacctttcccagaatgtcatatagttagaagcacagtatgtagcttttcacagattggctcctttcacttagtaatatgcatttaagtttcttccttgtcttttcaaggcttgatagctcattatcttttcatgttgaataatattccattgtctgatataccatagttcatttatccactcaccttctgaggatctcttggttcttttcaagtgttggcaattatgagtaaagctgctgcaaatatccatgtgcagatttttgtgtggacctaagttttcaattcattggttaattaccaaggagcatgattgctggatcatatggtaagagtttatttagcttttgtttattaaacttgcatcctgaaactttgttataattgcttattagttccaggaggggtttttttggttaattgtttcagattttctacatagtgtttcttatgtgaaagacattattttagatgttgtggatacaaaaataaacacataatccatgtcttcaaggatttcataatatatagggcaaaaggtgtaagcaaattattacaatgtggcttgtgaatggctataatattagtataaatgaagtgtgatgaggcctcagagaataggcagctaatataatctggaaatttcagagaagactttccagaggaggttgagtctgagttgaatctccagggatggacagatgctatccaggagaccgacagaaggaagattatgcctggaagaggaaacagcatgttcaaaaacaaagatgagaatgcttcatccacagagaaacttcctagtggtttaatgtgatagacaccgagatgcacccccagattcctcttcaaagaggatttcctatgcagctgcaggaaatatggccagtaatttatagctgtctgttcaggttcagagagcagtcttttccaaggtcctacccttaaccagggcaatctgcatctggtagaggagagaagtctgaatacaaatgcaggacaactctgatagacatatttgttccagagctttctgctgagttggctgaagttctgttgcgtctgtatcgcagttcaacttctctctctgaccaatgctgtttcacttcacttcctatcaaaggtttgatccctaataagcaccctgcatgctggcatgctgaaattcttgttttggcgtctgcttcctgagaatgcaatccatgaatttggtaccaggactggtccaagagagtaggtgatgggctttttgcctgagtcattcattgcctcctggcattacttgtggtaaatggagcacaaacagctattatcacaaggtagtaatcaaattattaacattttcactgtttgtgaactggccagatgaatcagatatatttgagatgtatggggaataaagtagcgataaagataaaggaattggatggctattgctaagcggtattgatgctctacacaaagataatgaaaaaatcagagcgaataacaagcaattaaaaaccaagtgagattgtcagagggcctctttggctgcataaaaaagaagctctcatttcctgcaggaggaggctggagaaaggtgaagaccaagactagactttatagtcagagtagctgaacttcaaagatggttatatgcccactaagatagatggttaataataagcaaagttgaaatgctgggattgccatggaagaaggttgaggaagggaaaggctgaggaaaataagcatgctggaatgaaaatacaaataaggctggaagactgagaggaatatgttccatgggaaggcccaaaggatacacagtttaccaaggctgtaatgaatgagctggtgaaagaagcactagcaacactaacaagcagagtagtgatgctcctctttaggccagaggtcactgtaggagaggccattacagaacctgactcattggtaacaaagaagttgatagaaccctggaaaaacagaggccagttgtggcatttaactgccagaagccagggattttaaataattgtaagcatcaacaaggtcagaatggcagcccagaaagaaccacagaattatggaacatattaatagaatttgacaatgctagagacaaaataaattggtagtgacaatggaatcactcagcatgtactgttagaagaaatcaagcatgaataacagagtgatactttattgtgtcataatcccttgcccagtttatgggcctgagtcaattttcagacctgtatctcattcattgacgtgtttaggcctcctggggatggaccttgtgatgccatggcaagtacacctggtaatgattcccttagtccttcttcaaagggaccaaaggccatttacttggtgatacggtttggctctctgtccctcccaaatcttatcagaaattataatccctacatgttgaggaaggaacctgtaatccccacgtgttgagggagggaggtgggatcatggggacagttttctccctgctgttctcatgagatctgatggttttataaggcagttttccctgctcttgctcattctctctcctgcctcctgtcaagaatgtgcctgcttcccttctgccataactgtaagtttcctgagatctctccagctgtgcacaactgtgagtctattaaacctctttcctttataaattacccagtctcagggaagttctttatagcagcatgaaaatggactaatacacttgggtaatgtgaaccagctggacatttagttgacactgatactaggagaaccaacacattagggccttaatttatagttggagcatgtgaaggccagttttaaaaatggaattctgtccagattcagcttatattgggcccactggttgcaacaaggaccacctgacttataaagcttaaaatattaactatctgttcctgtacataaaaagtttgctaaccccagatctaaaggatgcagaatggtcatacccatccactggattcactcgtcttgcttctgcaaaaataggatggatcctgaagaatgactatagacttcctcaagctcaaccaagtagtagtagccctcctgacagttattatgccagatgtggtatctttattagagtgaatcaacatggccttaggtacatggcatgtggtcttcagtttggtgaatgcattcttttccatcccacttagattacaggatcaaatatcattcaatatgcattcacatggaaagaataaatatacattaacaaggcagtagcagccgtgaagtagaggaaggagagcgaaagcatttaaggaactgcatctgaaaagaaccagtggctattccacactatatatcatcccactcctctttgtaataaaatccccgaattttagcaggccacaaagctgcccagacaaagagggcagtttgaaacttaccctgtagctcggtatggctatgtggccaagttctagccagtgagatgtgagagtaaaatgtttgccttctgtgccctgctctgctaaagaagaggtatgcccttcacttccccttttcccttttcctgctagttagaatgcggacataatggcagaaattggagcacttatattagaccgtggaaaggacgccatatgttgaaaatgggagaacaacaagatgtaaggaggtcaagtagcgtctccttacgtggagccactgtatcagccctgcattgcctaggcttatgcttttatgtgagataacaattagaacttatcttgtttaagtcacaattattttggagtctttgttaaaggagctgaaactaatgttctaactaatgcaagtgcttacaaaagcaactgagcaaggaggttggataggttgtgtggaggacagatgataactttgttttggaacacgtaagttctaatttcttgtgggacgtctatgtacatatctagtaggcagctataaaatctagtcttaactgaaatctattcttagctattcttagataattctggaccgaataattaaaaaaaacaccaaactttcactgggtcatcaaatgtggatatggtaaatgggttttgtgtagatatgtagaatacattaatgtagattgagaaataagtttatgtagaagatatatgtgtattccagaattatttacgttaaggtgatatcgtttgtgatgaatagaaaagattaccagagaatgcctaaatccaagtgagaagagaacaaaggatagaaacttgcagcatagctacaatgaagaagaaggtgaaaggagactgtgaattggataaagaatcatctgaaaagttggaaaatcaggatagaataattttgttgaggttaatacaagagtaaatttctatagacagtgacttgctctctcaaatgcatgtgtattttagtgaataaatataattaagagttaatatatcccatagctacatgtagtgattataaagcatattcatgtcactacagatgattaacaatggacatttatgctattattataaatttggggaaatgatgcctatgcaagaggtaatcatatggtgattaagaactaataacattttcttagcaaagagcatgctgttattcatattatttttaataggattcttataatccatattttactcagcttaattatcaaatatttccataagagattaacttgtgggtatcttacaaacataactgtactaaaaatatgacttcattaaagcaaaagacaattttattgctacttaatctctagtgaaggcattatcaacatttgttaaattgtataactttgatagaaaattattaggcaaattatcatatg

SEQ ID NO: 5933 - DNA, 6000 bp, Homo sapiens
aatgtaaataattttaaagctagagtaaattattgtttggcataagatttatcagttggaatataattatcaagtaatttaggcataagtttcctgtactttttcggtattgtctgtttcataagttttatatataaatttctcaaagtaaaatatggttgatgtatttttgtatatcgcctaacttactttttttctaggtccataacttagtggcaattgaactggcttatatcaacacaaaacatccagactttgctgatgcttgtgggctaatgaacaataatatagaggtaaatataattcttaaatgctttttcacaggtagaaaaatctgttgtaactcagttatatcaaacttatttagcatggagtaactataaaatagacatgtgccacattagtgcctgctgcatgtcaggaaatatgctgaggggattacattgttttcttaattctcaaaaccacctgcaggcattattactttctgcttatgaaattgaaattcagaaagaatctgaaaattcattgatttggtgtgactggctctattttggtaacttatagtttatacaggggaagtgtgtacaacaaagtatttaaaattcttttcatttggctttgaaagctgtgaaggaaacactcaagaattaaccaacttagcataaatttggaaaagcagagtgcttttttcaccactactggggtggctgcatttcatggatcttttctttccttttgattttaatgtaacaaattgaataagatctcagatggagccaaggctggtggacagagcaatttatccagaagccattttttttctctgccgcttttctccaaaaatagtacatttttctgctactccctaattcagtaagacctgagtcccctgctataccaaatttcctcttctgcatatccatggtgagaaaattgtaaacatgcaattcagaagctggaagggatcctgtgttattgacttcaactctggttaaaacagatggggtggccagacgtggtggctcatgcctgtaatcccagcaatttgggaggtcaaggcaggtggatcacctgacatcaggagtttgagaccagcctggccaacatggtgaaaccccgtctctactaaaaatacaaaaaattagccgggcttggtggcaggtgcctgtaatctgagctactagggaggctgaggcaggagaatcaacttgaacccaggaggtggaggttgcagtgagctgagatcgcgccattgcactccagcctgggcaacaagggcgaaactccatcttaaaaaaaaactggggagcttgaggcttacagatagcagttattcctttggtgcttattttgcagggcactattataggaagcaagcaccttcttaacacaggtatagggaactaatttttggttacatagctgggggtgattcctgttatcagaaaaaattccaaaatgcatacatgagtaggcacttcaaaacactcagaaagtaggccagatcacagttatgttaaaaattagcatgtagacacttaaaggatttagttttttttacattgaaactaacatcatgaaaaacttgtgtttgcggtagttctgttacactgacaaggtcatatgtgatatgatttcagattagtatttttctacaaatgaataggtttctggttttaatgactgtgccagagaactttatgtggatattttcatttaatctttaccataccctgagggcagatcatgtcattaacagattaggacactagggcttcaaaatagttggtaagctgtccagttagcaaagcaggtactccacatctgctggggtccaggagcagctcagatcataactggttagtaacagactagggtgagaattctagataccgtggccttttgctttgtatccctgttcaaaatgtacattttatcatgctaattttttattttgaagattgttaatatctatacttttattatctgttattttttattactgaatacccgcccatgaaaaaataaaattgggtcaaatttctgtcaaaaaaaattattacacatgaaacatcactgtgggctgtgtgcggtggctcatgcctgtaatcccagcactttggtaggccgaggcaggctgatcacctgaggtcaggagttcaagtctagcctggccaacgtggcaaaactgtctctactaaaaatagaaaaattagccgggggtggtggatgcctgtaatcccagctagtagggaggctgcagcagggagaatccattgaatccaggaggcggaggttgcagtgagccaagatcacaccactgcactccagcctgggcgacagagcgagactccatttcaacaaaaaacaaaaacaaaatcattgtgaggctttaacttatatttttttgcaagttggactgtgttcatgaaatacttcctacttaggagcaattgtgactttaacctaaatagtttctactttatctgatgctgcctgtgagagatccatcattaattaacatctacagatttctatatcttcataatcttttttttttttttttttttttaagacagagtctcactctgtcgcccaggctggagtgcagtggcatgagctctgctcactgcaacctctgcctcctgggttcaagcagttctcctgccgcagcctcctgagtagctgggattacaggtgtgcggcaccatgcctggctaatttttatatttttagtagagacagggtttcaccattttggccaggctggtcttgaactgccctcaagtgatctgcccaccttggcctcccaaagtgctgggattacaagcatgaggcactgtgcccggccaatattttcataatcttttacctatcttggtgcttggatatagcagatgctcgggacattctaatttgaatttgtcagtttctttagctttgtacaagttactttgataatattagcaaattagaacagtaggcaattgatcagtgtgttaaattagccaggttacagaaaggactagcagttgtcaacactatttcctggaggaagaaatggaacatttttataggataacctcaaccacagatacttcttcaagatacggttttatgaggggagttgtttgagtttaacacaaaggtgttcaggttagagtgacttttaaaggctttgcggagttttctgtgatctctggacttcaaattccacatggttatgttgaaggcttaccacgttccacatttatgtgaggacagtttacatcactgtttcttagtgggaaagggggagaagatggcagtctgttgcccctcatttgagaatccccagtacagggagccactgttactgacagtgtattgtatccttcaggtgtgtgggcagaaaaaaaaaagattaagaagctttgggttaaatgatttcttatttattttaaaatatgataattatggcatgagtcccaacagtgagaggatgtatctgtaagttactccacacttttcaattaacatgaacattttttagtaggcatatatctcaatacttggataatcacttttgttttgcttgtgtttcttaggaacaaaggagaaacaggctagccagagaattaccttcagctgtatcacgagacaaggtaaaaaaatgtttttaatgcatattcccaatacctaaagatagattgatgagctcagaatattactcagtcctaggagtaattttttcttcttttcctccctttaacactccattggaactaactgagtaaaggcatacaagtttaaaatgggttttgagtgatttaaagataatagtattttgaattcactgacataaatgcttaaaagtagatttaagcatttatttaagcatttaagcatcaagctttttaaaaaaattcagtcagtgactttatcaactttgcacatagctgaaatgactcaagattttattataataagagggtttcttggaaaaaacagtatgcacagaacagaggttttaattactagtaataattaaaatagttgtaatactaaagtgtgtataaaaatcttttaccttgaattctttgccagaaaagaatcttattaaataccaaaaataaaaatgaagcttttggatttggatttttcttatgtattcatctgaaggaaacttttaacaaaggtgacaatggtgaaggaaataaggcagaataaacaatctcccatgattattttcatctttcatgttattttacgatttcattacagaagggaaaaattcatttatagaatgttcctgaatgcatttttgcatccttgattttttttcccccctggattttttgcctttagtcttctaaagttccaagtgctttggcacctgcctcccaggagccctcccccgctgcttctgctgaggctgatggcaaggtctgttctgattcttaatctaagcctgcatgccttgttctctggtacaacataatcttctggaaacaatacactgaatagaagaatattaatatgggatactgtgctaaggtcagatcactttagtctaatatatattttaaaattatataacaatgcaatgcatagtttatattgttgacatgcttttgcttgcaatatagaagatgcacacagaaaaagtaatttaaagaggaaattatcctgcactttttgaatttcaacccattggtatttaaattttgcttgttaaattgcatgttttaacatatcttttaacagttaattcaggacagcagaagagaaactaaaaatgtgagtctcttgcttcagaatggaaatgttggtacctttggttctcactgaaacactgtctataccaccattaaagaacctgtttgtgtagtggtatctatctcttgtctgtgttatgttcttaatgttccttttatctaacctgtggaagatggcattaaacgttgttttaattagtaacaataataggctttctcactgttttgttaccttcaagaatagttttaaatttagtattttggtaggaaattcagagatttcctagatttcagagatggaattgtatttttggacatttcctttcctctttaaagatcttgagatctgttcagtactaatagatctaatgcttctttcttatgcttccagttagtttgcacttgttaccctatatatagcttcacatatgcttcagaagcttaagcaaattaaaaaaacaaatggggactgtgagagtttgagactgttttcaattcttgataaccattttagaggaaaattaaataatgtataaattattcagactcatcgctatttcaagattttctgccatttagctcctttccttaattatccagatttaaagttctgaacttcaaataaaggtttataaatgtcttatcttctctcagcccactgtgctcagatattaatcaaaccatctaaatcactgcacaagttttatttcattcatgacgtcacactgaatgtgctctctctccttaagatttcatttggtatgtcattcatgtatagttaacaaacatttaaaaatctaattactcatttttaagttaatgtgtaacataaatatactacttatatttaaatgtagttcaccttaactgacatactaaagacagattttagcaaatattttgattcagaatgatacctcaaactaccatttttctaactgccataatcctctattaaacttatataatccatttttagattgtaagatcttaaagaatacctaaaaaaaaccctcttaaatgttgatgaattgtttttccattataaagtcatttttgacttttagaagtcaagactaatacattttctagaaaacaaggtacaaaagcacttgtgattaatggtagcactagatttctttcagcaaatccttaagagtacagaggttgaggggacttctgttgtttgtcacattccgcatttgaaacaactcacagtgactgtcagcctaagaatagc

SEQ ID NO: 5934 - DNA, 6000 bp, Homo sapiens
atataacagggactacttgttggtattctgggatataagaatgcaaggaaaaaaatttgagaaaaaacattctgttatgtctgtggttctcagcagcttgatgcagtgaaagaggcctgagctatgaagtcataaatcctggatgtgacttccagctcattggttcacggttgtatgacttgaccaaattacttaattttcttttagcctgatttttcattggcaaaatggaaatagatgctacttaactaataagggctttgtgatgatcaaattaaatcagtttagtaaagtactaaacatttttccaggcttactgtatatgtgtaatgcaaattagcaattgtatatgcaattgtatatgtgtaatgcaaatttaccatcaatttattaatatgtcaaatattaacagaagtcttttgtatatgtttacttatccacatttcagggctttattttccatcttcttttcactttacactttcaaaccctgagttatttcatggacttccatagcttaagcagttctggacactaacaaaccaatgtattcaactacagactcattatccaatagattattggaaattttatgtgcctaactcttcatcttcctagtttacctctcctttgttaaatctaaaattattttctcattatctcaccatattcttgtaatacttagtactactactctagtgtttaaatatctctaaaatattttcctcatcaccatatccttacatttgccttgtttagtgcctcatcacttctggtggattagaaatgatattttattaaatgtatcccttgcccctgcttatggcatccagtctatcattcccctacaaaatctggccatattactctcttggtgaaatcttgaaatatttatatttctgcagaatagcatcaaacatcttaacagcgttgaaattgtcctatataatcaatattttaacagtttttaaaaggtctatataaatcagattctatataattttgccgtatcacctgataaattgtccattgcatccaaagttctcatcatagagaaacttgagtttctcaaagcttatcatgtaatgtcctccctccctaaaaatgcatgtgttgttctctttcctggaaatgccttcaagccttttcttccaacactaagccttgagaggaaataaattaatgtttctaaagtccttactgtatcagaaactgtgttaagtaatgtaaagacatggtaatagttgaatttcctaataactctatgaggttgacaatatctcaattttagagatgaagaaattgaggcaggatttaaactctcattggctgactccaaaaactgtattgttaacaattgtgccctaaataatttatttaattcccacaaaaacctaaagaaagatagatatttaagttgatttttacgcgataaaactgatgctcttgtagtacaaatggtgtatcctagtcatatagttaaattcagcaaagcctaaatttaatatcaaatttgacaaacattaaagcccatattgtttccattataaacccctgtgtctttaaatatcaccccttccctcaatgaatcatttcccaatgctcccatgggtaaatgataatgccaatgtttcttctgctgatatgcctcgcatagtggaataaaataagaataattaacatttatctagcagttattttacatatagacacagttctatgtgatttagttaattatctaatttaaatatctcaatgagtatcatagcgaccgtgtgcattactctccaacagtgtggtggcctgttttccttatgcaagtgtgaacaccttggaggcaacaactgactgatacatatttgacttcctagcatctagtgcaattccttgtgtgtagaaggtacacaataaatatttttaattaaatgaatgggctatgttagagagtgtctatgatattggtaggacacagagagaaaagtagaaagcatgccttaaatcttagagaacaaataaaatcttctcccacagtacttatcccttgaactcaggaatgcagaatctttggtaggatgcattcttttcctaacttgtcatggcattttttttttatgttggagacaaattatgcattttccaaatgacagtagtcagttagacatcttaatagagataacagatttatacccaaattggctttgatttatacccaaattttgatttatcttattgaccccattcatattatagagttcactccttattttacatgcactataaaattcaaaatattggaaagcctcttgatctgcaaagacatcacatttgtctaaagtggccatctctgttttccatccatttggaaagatcgtttaagtgtttttctcaggcatagccagacttctgaaaaatggaaattggctctttattacgaccttgtctttgttttatgtgagagtacaattgtctacttttcctccatcatttccattcaatgcttacttgctgcatcttttctttgatttccccaggatttactatctccacagtgtcccttgtgccatatatttctctactttgctgggttctaattttcgtctgttctaggatgatgacaatgatgatgataatgatgaaatgctgatgatgatgtgtgtatgtgtgtctttgtgtgtttctcatctctgtctccatctttagacaattgaatcctgaaacttaaccaagcagatgcaaagttgcagtctttgtttcagagttggctatggagatttgtatgtgagaaacgatattggctttccttccactcactgaagaaagagggactaagctaatgctcttcccagccacctggttatgcactgttgaatcatgccattttaggaaactgaaatttctaattcttacatttgtaattatcgtaggttttgtcaataatttagatttcctaaattattgtactctatataaccttgtacctaataaatttcaaaatattcaaatttctatttataaataaaatgatctttttatatgaaattgattctatatatgattaaattgataaaacttctgtgatttttcaaaaagtctgaggcctttaaatcttctatttaaggaataaataatattactcatagaagagagaaatattataaaacaaagtgtatgtagtttacttgaagtttattagcttggtgacaatacctgcaaatatgaaaatagaagctacccggggcagaacaaaacattgtggcacatggaatacataatagacaaaggaattgtatggccaatttctcagacagccatttggaatgttttagcatctttatcagtcaagtgcaactgtcttctctatggctcagcagggattatacttcacatgcacttcaacatctctgaagtctgcacctattgtcatcagcacccctactaccttcaagggctgatatcaactgctattgatttgttgatgaaaatgaccatgatgacaccaccaagggtgaacacctccctacagcataattatcaattggcaaactttggtttaactctgacagttatcctgtactctaaccctgagtaatgaacttgaaggtttcactttgattttacaaatgatcaggtggaatgacatagaaatatgaattgtgtgtgtgtgtgcatgtatgtgagagagtgtataaaaagaggctttgggaagacatgactttagtcatctcagtgaccttaataacatcatgttcagtccacttttggtggaaaaataaggcttaattgatttttatatctaagacactttgaaaaatagacaagcattttatacatatatgtatttgctggtttacatgaatctcccatcctagtatttttgcaaatactgttacgacattttaaaatgctacctttgttttcccttgatgaatattagcaaaattaaatgtacattttgttttaaagcctgtttttttttttcaggcaatgaaaacaatgctgtgttcttagaagcttaaattctaagagcaagagctctcagaaccactgacacacccagagtaaaggtgcttatgttccaaaataattaatattgatgaacacttgtacccatattgatgatttttaagagaaactccttccacatttttgaaatgaaaaattaattatttgtaaattaaacttttctaaaaaaggttattcaaatgagtcctggtaaaaatctccatattttatagccacatattttctctttctttcatttatttatttattttcttaattttcatttagccttgttgatgttccagaaatgatagcgaaaagccaattccttatatctcacttataatgtaaaatatcagcctaaacttgcagaaagtatatcttttgaataaaagacagcagatgctgtagcatttctgccaaagaaagagtccagtataaacattctgcagtatgcaaatgtcatctcctctatgtgaatattttccccgagtggatgttgcagggttggaggcttctgcctatgatttaggttgtaattttatttgtggaaataaaccaatcgtggagctccaattgtcttggtggtgaggtgatcaatagcccattactggatagaacagcgactacaggaagagcattgaagattttaatgcatgaattatgcatgcagcgctcattctttagtctccgaacagaatgacagggtttgtgaagtcgcctcagatagtttcttgcattaagtgactgcagtgaaatgcttaatattttcaggcatagaagcagcattgactcgggccagccgaatttggaagatgtaaatctcccagctcacagcacggaatgctttatttgaaagtattgctatgtagacagccggcttttctgtcatctaacctgctctccccaggttggctgaaggatgggagcggctgtgcctgcctgtgaggtcacagcatgaagtccttttaacttgctttctgctgcaggagagaggcgtattgtggtataactgttgctgtatttattcaaatggacaatttgcaatagatattatacccaggacgacagataagtcaacacataaggtaagtccaaggttttttttataggttaggtaattgtaaactagaatatgctgagttaggataatggtgatgcgatattaataaggttgactcagaccttagtattgcaatgccagcatcaggactctcaattgttacgttaaacgagaggtgactttctatatttgatagtattggaccatagggtattttatcttgcatgcaaaagctttccaagaatgtactagagctcgaatgtgtagaagactgcaaactggggaggggcagcagtagaatgagctgaatcaataagtggaaattacctccttgtggggaagttttagcacggctgtggcatcgcgttggctcagattatttccttaatgtcaacattttcaaattctagtaaaagatgtgggtagacaccagaaatgctcaatccttctcccagaagcagaggaaagcaccgaggtactcaaactcaaatactgtgttgcatacaaattgagcagatggaattaaaacaatttggactagcatgtccttgagggaagaccttgctgtcaaacaaaccatttgacttctacctgtgctggtttggttttgtttttccctcttgttaagaatgccttactccaaaatgtatggatagatgacgtgttgtgacatttacccaaaaaagagttttatttcttgtttttttaaaaattacccctatacaattataggacccactacataagatccaaataaaatttacaaaaactctgtaaaactgaaaaacacagtactatacgagtatatttgtcagaagtcattgttaattaaagtttcttgcttaaatatcatggcaaatgattaattcctgaacatttctttaggatgagaaaacagaattaataaatataaagcaagagacactagataagta

SEQ ID NO: 5935 - DNA, 6000 bp, Homo sapiens; identical to SEQ ID NO: 620

SEQ ID NO: 5936 - DNA, 6000 bp, Homo sapiens
agtctggattctcctgtgggaggctcccttccccttcctccctctcttcctctccccagggcctgccagttctcaccagctgggaggtggacaaggtgatatggggagagatggaagaggaccgggaggagaggtggagagcggacagaggggctggctgttgagatgggtggacaggaggaaggacatctgggaggaccaggtctctccgctcctcttggcctcatgtgtctccgtcatgtgtggatgaggacatcagacctccctacctttccaggttttgtggggatcactgagatgaggcacgggaagccatcttgaattccctccccatcagtttgtgttctccctccttttctctcccggtaccttcctccttcccctccccttcgccccccttactttccccaatctctaataggacttcagtcagagctgcattgacaggcagccctaggcagccagataaggaacctcggcaaaaggtttttgagcatgaatgagcttaaagcttggcactagagcccagtgctggctgggttcgggcacgtgctggctaggacaggaagccaggcctggagcaagccctggtcaatggctacctggcctcaggaggtgaaggaccttgtcccaggctgggcagaggtcaggagactcagccccgagctagctggggacaagggctgccactgcacttagcactttcaggctccaaggcccagggcaggtgctgaggtgcctgtcttggagccgccatgcagccccgtccccacagctgtctaacggcagggggcagggaagttacaatcctaatcattcacattttctgacttggaggccctctcctaggtatcagcacatttactcctaactacacacagggaggagggaattattagcatcatccccactgcataaatgaggatcttgaggttaagcaactgcttagggtgcaatacacatggcagtgttcacaatcctttcagtggcctcatcagcagctctcaacaggtaagcattgctgccacgtggcgcccatttaacaagggcagaaactgaggctaggtcagatgaaagtgcctgtccaccaagccctctactcgccctgcctgaagtgagggaagcagacaagtgcccttgagctaccctgggacagcccccagccagggaaccccccgtgccagggaggaacagtgcccacgccgcccccacagccatgcccagtcatcccttgagcatttattgaatgacccctctatgccagccagggatggatgtctgtgctggaacagtggaggcattgaggaggcagaggccacaaccagcccctggctttgctcaagccctgcttctctaagaagcttgccctgattctgctggagagggaaatgagggcaggcttcgcagaagaacagcacttgagcaaagtcttgagagacaaaaaggagaggcatccaaactccacagcaaagggctcgttctggggaaatatgtctggcctgtttggagtaaagggtgcagggtgggcagtggaaggggagccttccttgcatgttaaacatgggtattcagacctgattctgaggcaatggggagccattgaaagctttagagcagaggagtaacttgatgagctttgcattttggaaggatctctctgacagtgagtggagaggagagtggtgtggaagggcacaacatagtctgagagcccaggaaggaggttaatgcagtcatcctggagaggtgataagggctgcactgggccagtggcaagtggggatggaaagaggtgtcaaatatgagaaagagctaccaggaacctggtacaaggaacctatttgctatgggctgggggaaggggaagcaccagatgcttcctgtgttctggcctgggcaactgagtgagagtagggtgaggaggagcaagccggagggtccagtgagaggtgagtgggtctggagtttaggagaaagatctgggccagagacagtgttgagagtcgacagtatctgcagggtgtggaagtcacaggtgggaacagggctgcccaggcacactcatcaggagtgaggggccatgggccaggagtagacaagtcctgggcttaaggatcagcagaagaggagccagccatggaggccacgtggcagagttgccctcacagagatgggaggacagccaggagatgtgcctcaaaggcagggaaaaagaggcgtcaggaagatggccggcagcccatgtgccacagtgggctggagaggaaatcatgctggcctttgccagagcggtttcggtagccgggggctgggggctgttgtgcagtggataggtggctggaaccttgactccaaatcatgatctttcactgctccgcgactacgcaggcacgtttatagggaagaagtcaagagaaggggaagcctgaaagccacaggtgagactgggaaaggccaagagagggtcccagtcactcaaagggagccagaagtccaaggagggtcccccgaccccgacttgtacactggagaagggctgcccctacttcaaggccacagggcagctgcaggtgagtttggctgggagggaggatgggaagaagtcttgcctggtagcttggctttctaggtagggtgggaggcaagggtgggtgctctgctgagagaaagccagagtgagtcgaatacttgaagagagtgggggaggtttaaagaatgaggggagagctgtggaaggattgctgagcagagctgcgatccctactggggccagagaccatgaacttgtcatggtagcagtctgcacgactgggtgagtttctccagcagtgctcagcagcgcagatggggggcagaaaggcgtggaagaggatgagaacagagacacgcagcagggacggggtggagaggacagggagccaggaccacggagcgctggcaagagcctgctcagggtgagatgcccaggagttccctggagaggacatggtgaagtcgagacagcagggagaacagaaggaaatgggtgagggatgttactgggactcagacagggactggggaggaacagagcctgtagtccagagttaagatgtttctcttgaagatatcagagggctcagtcccagttgggggaaggtatgagtatgaggctgaaatgcagcagacatagtcatctgccccgggaagtcaagaagtttttattcattcattcaacaaatatttattgggcagttactgtgccaatctctgtgcaagacactacatgcaggggtgaacaaaacttggttcccgccccccaaaggcctccccgccttgcctcactggggagacacattcacaccatgacaacaccctgtggtgactgcagtgtaggagaatgcccaggtgtggtgggagcacgcagaagggtccccacccaggaaaggagcaagcgacgtcaaagctgagcctttggaatgggagttacccaagcaaagggagtgcaagggatctccaagaagaggagagagctttttccaaggagaggccagcaagagtgtgcatttggtgaaaccagagggtaacagagtggggagaggtgagggagagctgcagggtccctgaaggcaggcacagagcttccagagggatgggaggcttggaagggattttagcaggggagcagcatgatcagatttgcattttagcacttgggctgcagtatggaaaattgattgaaacggagcaagggagcagacagagagactggtgaaaggctgcagggcggcaggggtggcaaaaagagggcacagtcaggagatatttaggattgaaaatcagcaggacttgatgcttttcctggatgggggaaggagggagaaaagggtcaaggatgcttcccagatgccaccagctgagctgcagaaaacaagaggagaacatgggggttggggggggtaccaggagacaggaggatcacatctggagacagattgcgtttgaggagcctgagaacaaccaggggacatctgtaggcaggtagatatgccagggatgaggtcaggacacccagctacggtgaagaggggaagactgttatttcaatagcttggcagactcttcttagggaggaacacttttgtttgagaagataccttgctatctgctagggttaaaaggggaaagcctagggcatgggtgaccatagggccagggaaagcctagggcatgggtgaccatagggccagtgcagccacaaaaaatggttaagctgccttgtgtgagaaaggagtgaaatctgtttggcccctgagaggaggagagcagagacggaggagccaagaagggaggggagcgcgggggagggcagggaggcaggaggaagtgagtgaagggccagtggaaatttcccctggtggacagcagaggtgcccatggccttgtgtgatctgacgcggtttgagtcgctgtggaataaaccccttctccacccgcccctctgcaaccccacaggccacagtgtccacagcgtccttggtaaagtcgactgtattcacatctgcattctgtgagtgcgggtataggtgggagtggaggagggaacttactttctgggtttacgggcacggtgtggtgtcagcccatttggaagcaaagcctagatatggagggggccagacgaacaggacctgggaatgcacaggaccccctgaagcaggccggggatctgagtgatcttgctgtatctaagctgacattggaacatgaacagtctgaaatcccatgagccccgctgccctgcacctgcgaccctcaggctagaccttggactgtctacaacacgagtcaggcccaacccgccctggaaatcatcgtaggaggttccagctcagtgcccagagacagcccccacatcccaccccatcaggtcagctcaggctggagcaggcatatgagcaacacccctcattccacccccatacacatgcataagcccatccgcctgcgccctgccagtctgaccagcacagtcctggggacaggagcgtggtggaggagctgcaggtgggggccagagaagcctccacagagagcaaaagccagggtcagccagagacaggacaccagaagagacaggagatcagagaccagaggaacagagaagaggccccagagcaaggcaaggaacggccaaggcaccaggacatggatgcagtggagccagggggacgtggctgggccagcatgttggcgtgcaggctttggaaagccatcagcagggcgctgtttgcagagttcctggccacggggctgtatgtgttctttggcgtgggctcagtcatgcgctggcccacagcacttccctccgtgctacagattgccatcaccttcaacctggtcaccgccatggctgtgcaggtcacctggaaggccagcggggcccacgccaaccccgccgtgacgctggccttcctcgtaggctcccacatctctctgccccgtgctgtggcctatgtggctgcccagctggtgggggccacggtgggggctgctctgctttatggggtcatgccgggagacatccgagagacccttgggatcaacgtggtaggtgcagggaggggcacctggagggccaggaggcgggaatgcgcacaagtggtgaaggtggaggccaggacggaggcgagggagcaaaggaggaaacaagtcagctgcaggctccacatcctcccgggctgggccccaggacccagaggactgagactttgacctcagtctaggcagaatagaaatgggatagtggcgcgaagaacaggtggagaaggaagaggccacataaaggagaaggaatagaaggaccaggcgtttaagggtagatgcggccaagggagtgcggggcctgtgggtagagaaggggaccccacggggacttcatttttctcccaggctccacccacgtcctctgctctccgactgttcccaagttcttccctccacctcgaggcctgcctcact

SEQ ID NO: 5937 - DNA, 6000 bp, Homo sapiens
aaaattttaaagtggccgttaaaaaaaggcttcagtagccgggcatggtggctcatgcttgtgatcccagcactttgggaggttgaggcgagtggatcgcctgaggtcaggagtttgaggccagcctggccgacatgatgaaaccccatctctagtaaaaaatgcaaaaaattagccgggcgtagctgggtgcctgtaatcctggctgcttgggaggctgaggcagaagaattgcttgaacccaggaggcggaggttgcagtgggccaaggtcaggccattgcactccagcctgggcaggaagagtgagactccatctcaaaaaaaaaaaaaaaaaaaaaaaggcttcagtaagtaattaagaacaatcatgaaacaaatgaaaaaaatcaaaaatctcaacaaagaaatagaatgtcccagcaaaataataataaaaatttaggagatacaaagaaccaaatggacattttagaactggaaattgcagtaactgaaataaaaactcattggatgagcgcaataacagggtggaaggacagagaaaataatccttgaactggacaaaaactggttgttttgttttgagatgcagttttgctcttgtcgcccaggctggagtgcaatggcgtgatctcggctcaccgcggcctctgcctcttggattggggtgattctcctgcctcagcctccctagtagctgggcttgccggtgcccgccaccacgcccggctattttttgtgtttttggtagagatggggtttcaccctgttggcctggctggtctcaggctcctgaccttaggtgatctgcccacctcagcctcccaaagtgctgggattacaggcatgagccaccgcgcccggcttctataagtttttttctatgtttaaaacttttaatttcatttttgtacttaattttttttttttattaaacacacacattagcctaggcttacacagggtcaggatcatcattatcactgtcttccacctccacatcctgtcccactggtaggtcttcaggggcagtaatgtgtggaactgctgtctcctgtaataacaatgccttctggaatacttcctgaaggacttgcttgaggctgctttaaagttaacttttttaaaaaatagaagatgcacactctaaaatataataataaaaagtataggatattaaatacataaaccagtagcattgtcatttatcatcaagtattgtttattgaacatagctgtacatgctgtatacgtttctatggctagcagcgcagtgggtttgtttataccagcatcagcacaaacacatgagtaatgcgatgcgttactacgacgtcagtaggcaacaggaattttttggctccatttataatcttatgcgaccatcattgtatgtgtggaatatttttgactgaaacttcattatgcagcaaattactatattagcaaataaaattgagctatatataatgaagaagtacacattataaccaagtgggtttattccagggatgtaaggcctggttcactattagaaaatcagtcaacataggctgggcacggtggctcacgcctctaatcccagcactttgggaggccgaggcgggtggatcacctgaggtcgggagttcaagaccagactgaccaacatggagaaaccccttctctactaaaaatacaaaattagccaggtgtggtgacaggcacctgtaatcctagctactagggaggctgaggcaggagaatcgcttgaacccaggaggcagatattgcagtgagccgagatcacgccattgtactccagcctgggcaacaagagcaaaactctgtttcaaaaaaaaaaaaaaagaaaaagaaagaagagaaaatcagtcaacataatctaccgtattaacagactaacaaagagaaattacacaattcgtatcagtggatgcagaaaaggcatttgacaaaattcaatagccatccatgataagaatacacacacacacacaaaagaggaatgggggaactttctcaatctgatatagagtggctactacaagaaacttacggctaacattatgattaatagattgagtgtgttctcctaagagaaacaaggcaaggatggctgttctgttttgaccactcttattcaacataatgctagaagttttagctagtgcagtcaggtaagaaaaggaaataaaagatatgcatattggaaggtaagaaataatactgtctctatttgcagatgcagatgactgtcgatgtagaaaatcccaaagaatccatgaggggtagaaaacccaaatacctcacccccttgaataagtgagttcagcaaggtcacagtatacaagatcaatatgtaaaaatcgattatatttctatataatttaatgaacaaatggacacaaaaattaaaaatagcatatcctgtttataattgcttttaaaaagtataagtgtaacaaaacacataaaggagttaaatgctgaaaactacaagaacactgataaataaaagagacctaaataaatggaaaaaaaatatatcattaagaattttaagatggcaatgacagcgcattaaaccaagcatggggccctgtgcatctgcacaggtcacactcccatgaagccagccccgcactagtatcaagagtgatgtttgagtctgggtggggtggcttatgcctgtaatctcagcactttgggaggctgagtgggtggatcagctgaggtcaggagttcgagaccagcctgtacaacatggtgaaaccccgtctctactaaaaatacaaacattagccaggcgtggaggcacgcatctgtaatcccagctacttgggagactgagacaggagaatcacttgaacctgggaggcagacctgagatcacgcaactgcactccagcctgggcgacactgtgagactccatctcaaaaaaaaaagaatgatgcttgaacttaatactcatagctggtcctgaaaggtgaaggtgtccattgccctgccttcctgacagactccatgtcacccaccttccacagatgagaatctgcttgaggtttcaccccacacagaatctccaggcctctgcttcctgcagtgttgggaaatccttctgagtatctaaatctaaatctttgtcctttgggcctgtttcctcttgttctgtcctcactgaatatggggaacagctggtccctctgagtaattaattcttgtagacttggacacagtctgtaattccttttcccttttctcattgggatgactctccagggctttctccaactctggatctccaactctgacacctcccccaggttctctgtgtgctttggaaggcatggggttcacaagagccccaaagagcaccagtcaggggccagagggctcagtgctctggggagatggggaagattccagcactgatgaacagactccagccccccctgggtcctctcttccagctcccaaaatgtactctatttttatctgtttcacgaacgctggtccagatagtcttccatcccccactgactgttagaagtgactctcagcttttgtccatctcgaagtttctgtgctcagtgtgcctctcagactaaaggcttcctttgggaagccccgactctcgcttctcaggacagagatccaggggttgggggaggaaaaggttgaccagaagccatagcggagcagggagagagagtgtgaaagacagacccgcggccaggctcccagttctccagctcgtagagggcccaagtggccgctataatctgaaagagcagatatcgtaatcccatagtacttcctattggctgcaggacacagttctgtcctgacactgaaatttgggtgtgtcagggttctgggaattcacaacgctcacaacttgtgaagcagctgtggggtgggggatggggagggtttcagcagaggaagtgaggtcagtcaataattgatgcctgtctgagcttttagccattatctcccccagcctctattcctgtcaaaaggtggggcggggcaggaggaggggtccctggctcatcttgtagaatccccatattagagtaagacaccttagaggtctactcctgcttctaatacccacgtctttccaagtgtctctgaggccaccccctccccagccttttcatttattcatttaattaacgaacgccttcattgagggcctcctctgagtcaggctcagccagccagcatctttgctatgagctgagataagcatcatttccgtctattctcacaaccaccctatgaggctggcacggtttactatgcctatttagcagatgggggactgaagcatggagaggtgtcactagcctacggtaacacaaccagcctgcattcctagtaggtagtttgacttcagagtctctgtggataaccaggaggctaggactaagaccagagtcctgcaggtacttagatggttggagcaaagcagggcagtgaggtcagtgctcccagcctgtgcaggagcatcaggaagagtctgtgtccccctcccctgccggtatgaagccattctgcttccctccccagctgccttgtgtcagcagagttccagggaggctccattccccacctctatctaaagctccatttgctggggtgggggccctgcctggaaggggaaggtccaaggctgctcccagcgtgtccctccatcctgactgtccctggcggggcgggggtgtctttgtcacccagctgcacaacggccaggaagggctcaaaccatcctcagggctaacccaaggccgtcctctgggcctgtatacccctgtgctgagtgcggatcgggagaggctgctgaagacaggaggggacaaatgggggacgaaggggcccgagggaggggactgaaggatttgggccaagtcgggagttcccgagggcggagtcaaaacgcatctggattttgctagccccaaactctgccctcattgctgcaagcctcctagaccgaggacccccgggctgagggtggggtaaggataggtagtgtccctccccgtcccacccccgcctgtcccttcctcggtggccccttcccggcgccccgattccaggcggcccctccgctgctgccagccgatccccctctacccccacccactactccggccgccagacgttgcctacagtctcggctctgtctcccacggctgtgggtccggaccccacgggacccctatgggacccccacaggacccccacggcctgagtccaaggcccgccccctcggggaggcggatgtgggaggcccggcccgggtgcgggccagcgacccgggagctgcgggcggctgggaggggaggccgccctgaggggctgggagcggcgcgggggtgggtcccggtcctgcagccccagcgaggggcgagcggcggccagtcggcgagctgggcaataaggaaacggtttattaggagggagtggtggagctgggccaggcaggaagacgctggaataagaaacatttttgctccagcccccatcccagtcccgggaggctgccgcgccagctgcgccgagcgagcccctccccggctccagcccggtccggggccgcgcccggaccccagcccgccgtccagcgctggcggtgcaactgcggccgcgcggtggaggggaggtggccccggtccgccgaaggctagcgccccgccacccgcagagcgggcccagaggtgagtcgaggtccgcggacgggaccgggtggcgggcggcctgacccccgcttcagtgggcccttccttcgggcggaccccagagtcaccgcagagtggtcgcgggaggctcagtcccagctcattagaaaggcaagctgctcctggctgaccacgcacagctcccatgaccctacctgagacttggaggggaatggacgagactggactggaaatcagaaacttggttctagtcgggtgacctggggtcagtgacttcacttctctg

SEQ ID NO: 5938 - DNA, 6000 bp, Homo sapiens
tggtcttgaactcctgtgttcaagcaatccttccacctcggcctcccaaagtgctagaattagaggtgtgagccattgtgcctggcaaacattaatgtcacttaacatctagtcagtgttgagatttccccagtctcctaaatttttaaagcagtttgttcaaatcggggttccaataagttttatcccctgcagttgatgaatacacctcctacatttcttgtctacatgttccccctcattttttcttcccactctgttttttcggagaatccaggtcatttgtcctgtagaatttcccaggctagattttgcagattgcttaggtagagttcacatattctactcttcctggtatttcctatgaattggtagttagatctggcagctagaatcatttctgggggttcggggacacgtatccttcacaggggttcctctgtccttctgtgacaagttgcgtagcattggttctctatttttgtgtcgttaacgtgccgtggtgatattgtccaaaactaagcgaatgattacttcccctacatatgtatttggttcccatgatatatagttggaataggagaggcagaaaaaatacttgattctttccacttatttaccatttttcaaaataatgaggtggttctgtagcctcccacagaggtaggtgactgaaatttccttttttagactttaaaaatatttgtttccattgaagttatttgtcttattgttacttaaaagttcccatctttgctcagttgggagcttatcaagttggtgccttttgatgtgacccccagtagtctttgatagattccttgctttggctatgaaaaaaaatgttcctggctactcttttgtatttctttttgtttagttgttttgtttgagacagagtcttgcactcttgtccaggctggagtgcagtggcatgatctctgctcactgcaacctctgcctccagggttcaagctattctcctgcctcagcctccctagtagctgggactacaggtgtttgccaccatgcctggttaatttttgtatttttagtagagatggggttttaccgtgttggcggggctggtttcaaactactgatctcaggtgatccgcttgccttggcctcccaaagtgctgggattacaggcatgagccaccatgcccggccccttttgtgtatttcttgttccatacttagaattaactaactttctaaggaaccttagggggtagtggtatttacagagcacagtgtaggttttgtcaccggcttctgagtaatcttttcctgctgttgataactcaggtagatactttcttttctcccaggagtccatgaagaatatcagctgccatattacgacttagtgccctctgacccttccattgaggaaatgcgaaaggttgtatgtgatcagaagctgcgtcccaacatccccaactggtggcagagttatgaggtaagaagctggcctcctgcggctttcccatcagcctgatttctccaccttagaaaagggtttcttgacaatggggtcaggccccagaggagccccctgagagtgtcagttattatttactattacgtgctattttacatatcccaagccctttagggctacagtctcttgtcctggaccctgtagggtgccatttggagttcacagcctagaagaagaaaaggctttgggcctggtgtggtggcataggcctgtaatcgtagcgctttgagaggctgaggcaggaagatagcttgagctcagaagttcgagacaaacctgggcaatgtggggagaccccatctctacaagaaataaaaaattaggcttggtggcacaccacctgtagtcccaggtacttgggaggctgaggtgggaggattgcttgagcctaggaggtcaaggctgcagtgagccatgattgggccactgcgtttcagcctgggcaacagagcaagaccctgtctcataaaagaaaaaggacaaggctttgtctccaagacacagatgagggaggtggtcaacaagtgacaactgaacccagagctgttagacaccaaactaggaaagcagctctggagcccgagctgagctgagctccatggaagagtgaggaggaggtgtccataagagaagccctgagaccagacagaggaggaggacatgcctgtgaggaaagtggtctttccagaaactcagaagggaggaggtgatgtgtatgacagggctgggattgggatggagaatgtgaatttgggagagacggcagatgaaatcaggggtgtgggggaaacaacatttggtggaaagagttgacatgaggacatgtttgtgacatacgtactaataaacatggaattctagggtcttaagagtgttcaggggaacaggcttcgcctagctaagtgctcatgggcctccttttcacttgcggttctgcatttccttttacttatttttttcccaactctatcgaggtgtgattgacaaatgaaattgtaacaaaggtgtacaaagtgctgaattgatacatgtatgtattgtgacatgattaccacacaagttagtgaacacatctgtcacctcaccttgttgcttgtgtgtgtagtgagagcagttgagacctactgttagcacatttcaggtgtacagtattgttgactctagtcaccttgccgtccattagagccccagaacttacctagtcaagtagagaggttggctctgcctttaacgagtctaaccactagagggcatttctgcatttcagaacagaattgcatattagctgatgctttcgtgttgcatcatagagcagcacttctcaccgcactccttggaaccctcagggcagggtttgcttcagagggcaggtgagaccaaaagagctggccgttagctgcagcgtttgcctttcacttgtgtaagctgtcccttaaaaaggaagagccgcctggcgcggtggctcatgcctgtaatcccagcactttgggaggccgaggtgggcagatcacaaggtcgagagagcgagaccatcctggccaaccaatatggtaaaaccccatctctactaaaaatacaaaaatcagctgggcgtagtggtgtgtgcctgtagtcccagctactggggaggctgagacaggagaatcacttgaacccgggaggcggaggttgcggtgagccaagattgcgccactgcactccagcctgggtgacagagtgagactccttctaaaaaaaaaaaaaaaaaaaaaaaaaaaaaaaaaaaaaaaggaagagccagggaacaaagggagccttgcagagcatttccctaaggtcggccgccgggtggatgtggatctgccagactgcactgagcgggaggtggcagggaaatgagtgagagcctagggaccagaaaggcttctccagggcatgaccgagctgatggctcctgggtctctgcacaggcactgcgggtgatggggaagatgatgcgagagtgttggtatgccaacggcgcagcccgcctgacggccctgcgcatcaagaagaccctctcccagctcagcgtgcaggaagacgtgaagatctaactgctccctctctccacacggagctcctggcagcgagaactacgcacagctgccgcgttgagcgtacgatggaggcctacctctcgtttctgcccagccctctgtggccaggagccctggcccgcaagagggacagagcccgggagagactcgctcactcccatgttgggtttgagacagacaccttttctatttacctcctaatggcatggagactctgagagcgaattgtgtggagaactcagtgccacacctcgaactggttgtagtgggaagtcccgcgaaacccggtgcatctggcacgtggccaggagccatgacaggggcgcttgggaggggccggaggaaccgaggtgttgccagtgctaagctgccctgagggtttccttcggggaccagcccacagcacaccaaggtggcccggaagaaccagaagtgcagcccctctcacaggcagctctgagccgcgctttcccctcctccctgggatggacgctgccgggagactgccagtggagacggaatctgccgctttgtctgtccagccgtgtgtgcatgtgccgaggtgcgtcccccgttgtgcctggttcgtgccatgcccttacacgtgcgtgtgagtgtgtgtgtgtgtctgtaggtgcgcacttacctgcttgagctttctgtgcatgtgcaggtcgggggtgtggtcgtcatgctgtccgtgcttgctggtgcctcttttcagtagtgagcagcatctagtttccctggtgcccttccctggaggtctctccctcccccagagcccctcatgccacagtggtactctgtgtctggcaggctactctgcccaccccagcatcagcacagctctcctcctccatctcagactgtggaaccaaagctggcccagttgtccatgacaaaagaggcttttgggccaaaatgtgagggtggtgggtgggatgggcagggaaggaatcctggtggaagtcttgggtgttagtgtcagccatgggaaatgagccagcccaagggcatcatcctcagcagcatcgaggaagggccgaggaatgtgaagccagatctcgggactcagattggaatgttacatctgtctttcatctcccagatcctggaaacagcagtgtatatttttggtggtggtgggtttggggtggggaagggaagggcgggcaaggagtggggagggagtctggggtgggagggaggcatctgcatgggtcttcttttactggactgtctgatcagggtggagggaaggtgagaggtttgcatccacttcaggagccctactgaagggaacagcctgagccgaacatgttatttaacctgagtatagtatttaacgaagcctagaagcacggctgtgggtggtgatttggtcagcatatcttaggtatataataactttgaagccataacttttaactggagtggtttgatttctttttttaattttattgggagggtttggattttaactttttttaatgttgttaaatattaagtttttgtaaaaggaaaaccatctctgtgattacctctcaatctatttgtttttaaagaaatccctaaaaaaaaaaattatccaattgaacgcacatagctcaatcacactggaaatgtttgtccttgcacctgagcctgttcccactcagcagtgagagttcctctttgccctgaggctcagtctctctcgtattttgtccccacccccaattccttgagtggtttttgctctagggccctttcttgcactgtccagctggttgtaccctctccaggcatttattcaacaaatgtgggtgaagtgcctgctgggtgccaggtgctgggaatacatctgtggacaagacatgcttgggtcctactcctggagcactgtaaaaagagctgattcaagtaagtagatgcctgttttgagaccagaaggtttcataattggttctacgacccttttgagcctagaattattgttcttatataagatcactgaagaaagaggaacccccacaaccccctccacaaagagaccaggggcgggtgatgagacctggggtttagaaccccaggtgagacctcaaatcactgcattcattctgagcccccttcctgtccccaggggaggtgtattgtgtatgtagccttagagcatctctgcctccaacccagcagttctctgccaaagcttgtggaggagggagagccctgtccctgccctcaggctccccagtgctcctggcccttctatttatttgactgattattgcttctttccttgcattaaaggagatcttcccctaacctttgggccaatttactggccactaatttcgtttaaataccattgtgtcattggggggaccgtctttacccctgctgacctcccacctatccgccctgcagcagaac

SEQ ID NO: 5939 - DNA, 6000 bp, Homo sapiens
ggcacacagcagggcttaaatgttggacaacatcacagagtggttagattgcaggctctggaaccaggctgcctggctttgaatctcagctctgccgctgagtgacttagggcaaattacttatcttctctgggcctcagtttcctcatctgtaagggaggataatggtgcttatttcgtagggttgttatgaagaccaagtgagttaatgcatgtatgtaaaaggacacacagaacaaacagtgtgcatagcacatgctaagtgctcaataaatgttaactgtgaaggcataacagatttgggaagactgggggaggagggaggggacagacaagggcaccgcattgccgcctctgcttcttggccgatgggtgttgggacatggagtccccagcctgtgctgctgacgccctgtggtggctagccgctctttagacaccagacgctgccttccacttcctcctctcacttcttattcgggcaccactgacgacagagacttcggctgggccattcccgcctctcctaccgcctggcagccatggtaacagcctgggggatggtccctaagatggggtcagagaacggctgagcatggccatccccccagccctgaactcccactcagcctgggctcatcccaacctcctgagtcaagtccacagtaagcgtctgtctcctgggaagggggatctgaccccggcatcaggagctgaggaaaggtgttgccagcagggatcactcaagccccttggaggggacaggccagaactaagcctactgctttcagggtttccacctcttcccttcttcctagacgtgcgaacagggggcagcctctttcagctcttctggggcagctgcgtcaagggaaaatcctgggccctctccctccctgggggcttctgcgcagtgagttcagggagtctcctccctcctccatcgggcctccacccctactcctgcgcagccccgctgccgctctccctgccctggagtctcctgcagccccttggatctccgtgactctccctacctccccgactccccaggcttcttacagtgacctcttaccgtgccccactccatgaatcgccagagctattcgtccctaaatttcaaaccttgcgcaatgtcccttcacagacccctccaggtatcacgcagccccgagccccgagccccgccccgggggcctcatcccgccccttcgcgtccgcggctcgttttcccccactgagcgcccagctcccgcagtttccccggccgtcgagcgccgtgggcggggctccagggcggcggcgcctcgcggggagggtcctccgtgctgggggcgaggccacccgaggcagctccccgcccgcccccaaccccgccccgctctcggagcctataaagggaggcgacccgcggcccgcccggctggcatcccccagccgccgccagccccgccgaggggagccagcgccgtctctgaggggcgtccggcgccggagccatgaccctccgccgactcaggaagctgcagcagaaggaggaggcggcggccaccccggaccccgccgcccggactcccgactcggaagtcgcgcccgccgctccggtcccgaccccgggaccccctgccgcagccgccacccctgggcccccagcggacgagctgtacgcggcgctggaggactatcaccctgccgagctgtaccgcgcgctcgccgtgtccgggggcaccctgccccgccgaaaggtgcgtcccccgcccgccttcaggatctgctcagcccctctccgactccctacagggcctgctgactccgcagtgccctctcctcggcgtccgcggagtcccccaccttcttccccggcccgctgggtgcctcgactccccgcgttccccgctgctgcgaaggccgtggccctcgcctgcacaccgcgcccaggctcggtggctcttaactccgcgccccatgcacgccccctctctccctccttgactcctcccagcaccccccttctcctacccgctccatctggctttctgccccccatgccccgcctccccgtggccaggtgtcctgggtccccaggagcccctcgcccgagggacagagacagccccaggcaagttgaaggtccgagagcccccggtgggagaagcgggccggtggctgcgccgcgtgcgttctcactctgaggaagtgcgtggggagccgctgactccggatagcacacccttccgaggggactccccgattcctgggctgggggcctgccgcctggccccacgtctgacgtacggggcgcgagggccactgctccctggacttctgtcggaaccggacgcagtgggaggggtcgcagggcgcccgcggggcaggaaggatgcgggccgcgcccacctctgagtcccctctgccagcctcttcctctggccccaggagacctgaggctcagaacctacacaacaccaggttaagaagaggggcctggtggcctttcctcacccagccgccctccttcgccccggcccccagctagcccccacacaatgaacagcttgttgagaatttgcattttatgaaaatcatgttgaaagacaaaggggtctctctgtgctgcccagtccttcctccctggccgtttgggaactgtccccacccctgaggccaatctggttctgaaccttctcttccttgccttgggcagctttgggggagggttagcaaaggcacagaacagaaaggccctgggctgtgcaggctccaaagaaaagggctgctctgggactggacctcctcccaggaccaaaaagttagggagggtgagagactactttagtttatcaaggaccctgaagagacaggaaccttcatctctcatccttcctccacaccccccaccaccacccctaaagaactcccagtctcggtcctttagtgagacttgctgacaagtttgacatctaagatgttttgtcccagaaagcacaaaatatatggcaatggagagagagacccaggtatagctgggcacagctggtcacctgcagctgggatccacaactggtccttgaaacggcctgtaccttaggagacctggcacctctgaccccacattctggctgggattgccagcccttcgggacagggtccctgaccccagccctcccaagccactgtctgtagctgagaaattagatggagagacccaactggcagaaggtcctcggagcaccttgataggtgagcccaggggacacctatcctctgaatcccactggggaagagcccctgcctcagctttgggagtctggatggcctgagcctctacagacatgggccctaggggtggagaccattttagaataatgatctccccacctgctgccagtgtggaaaccagcaagggcttagaggttcatggatctggaacccaggaggatggttgtgtccctgcagtcccaggtatgaaggtaaggcctgtagagaaagttgaggagtggtgccagtagtggcacttggcaaatagttccaccagcaccaaaacaggtgtggatgtggagctgggaaggggcagacaggaagtgggtcgctgtgtccagggtaacctctcagtgtctgctcaaggacagtcccgccttacctgctccttctgaccatcttactgcccagggctcaggattccgctggaagaatctcagccagagtcctgaacagcagcggtgagtcaccaacacccagcccctgccatggtccaaaggggtgaggtgctgggttggggggtgccaggacagcatctcagcctagcgagggtagtcattctcctagcctttaaacatggctcccccgctgggagtgagggcaggtgggggtgagggctgtgtgaagggggtggcagagaaaggaggtagggacttttgagtcattaggtgctcttcaacacacccccagtccctgccagttacccctccctggggagatctggatgaacggatgtgggagttgggagggggtgtaggcaaagtctatggggaacgtcctaacccaggcctcctgggctcccctgagccctcctagccttggcaaaccccacgggcccagaccttagccaggctgtgtccagctgcttggggctggctgcccctgcctccagaatgtcagtcctcttctggtcccagcctgtggcagccctcttaggagggatctgagcgtgggcagaagtaggtgctgactccaggccctgggaccccacagtttcccttctctactcatgtcccatccctgatttgggcttgactttctctaaaatggatcagcaaactgacctgctagccagattggcctgtttggcccttgagctaataatttttaaagagttgtaaaaataaaaacaaataacaatatatgacagagatcataaggggcctgcaaagaaagcctaaagtatttaccatttggccctttgcagaaaaagtttgctgacccttccaaaaaaccctagaacattggggtagacgcggaactcccagccaccctgctccctgccccaatagtacagagaggggaaaggcctgctgttcagagtgagaggggctcgagctggagtggggaggtgctgctcagcatttgggggaatctctgggtcaggctggaagcggagaagcctggtctccagggcctttccgaggctgagctacttgaaggggcctttggaggctgctttaactgtgcctctggctgggcgggaaggaagggggtgggagtgggcagaggaaactctgggctcccccagcaggcgaggatctggagcagctccagaccattgtgtccagcgggcaggccttcagtgcgggaaggggcggcctcgaggctcccctcccccagcccccacatctggtgggctggccccagcatagctgggaggagcagctgtggtcttgctgagcctcgtgactggcctctgggggtggggccagtcctctctccaaagctgtggaacagaggaggctccaggctgtggctgaatttcgggccttagctagtcagtaagtggtactgtagggctcactggaaagctgggatggggctaaaaaactcagccggctcatccttcaggggaccggcccttctctgtgcttccctcccaccactagaggctggattggttctctgtggctccatgaggctgatttcaattgggtatgggaaagacattccaataatctgtgatgagactgagctgtcactggagacagagtcctgctggaatgttctagaccagttgccaatatccagggaggcccaagctatgggacttctacaccttttaatcctaattgtcttgacccctgtgtctcttgcaggaaagtgctgacgttggagaaggaggataaccagaccttcggctttgagatccaggtgggagaagctgcacacaggggtcaggggggttggatgaccagcctgagggatgaacggacttgtcccaaccctgggctgagggtccccttgtccattacagacttatggccttcaccaccgggaggagcagcgtgtggaaatggtgacctttgtctgccgagttcatgagtctagccctgcccagctggctgggctcacaccaggtggggcctgagcccaggacacccaggtctgggaaggggatatgaccttactcccaagcaaagggggtgagcaatctctcctgaaatcaattcctcttccttttccttctttgagaaggccagaaagaagaatggatagaatctgggctttggatctaggcaaatttgccatgtactgtgtgatcttgcacagccccatctacaaaatgagggtaataatgcatccaaacatcacagtgcggcaaggggattccctgggcacactgccagggcctaattaatggtggatgatgctgctgctgctctgattcctcccagcaaccctggcagtcagcatgggcaggagccagggaagaagcaacattccattaagtctgtt

SEQ ID NO: 5940 - DNA, 6000 bp, Homo sapiens
cctaggaggtagaggttgcaatgagtcgagatggtgccactgcacctcagcccgggcgacagtgtgagactccgtctcaaaaacaaacaaacaaaaaacaaacaaaaaatacatcgctgggtgcagtggctcacacctgtaatcccagcactttggcaggccaaggcgggcagatcacttgaggtcaggagttcaagaccagcctggccaatatgatgaaaccccgtctctactaaaaatacaaaaaattagctgggtgtggtggcaggcacctgtaatgccagctacttgggagactgaggcaggagaatctcttgaacctaggaggtggaggttgcagtgagccgagatcgcgccactgcacttcagcccaggtgacagtgcgagactccgtctcaaaaacaaacaaaaaacaaacaaaaaatacatggctgggtgcagtggctcacacctgtaatcccagcactttgggagaccaaggcgggcagatcacttgaggtcaagagttcgagaccagcctggccaatatgatgaaaccccgtctctactaaaaatacaaaaattagccaggcgtggtggtgcgcacctgtaatcctggctacttgggaggctgagacaggagaatcgcttgaacccaggaggcggaggttgcagtgagccgaggttgcaccactgcaccccagcctgggcaacagagcaaaaactctttctcaaaaaacaaaacaaaacaaaacaaaacaacccagaatgatatatcagaggcttagagaaaaggagcatactattaagtaggaggtgaggaaagggttcacagagaggttactgagctgcattctgaatgatgaacaggagagttttttgggagataagtagagggacattctagacaaagagaacagtatgtgtagaggcgcagaggttcaggtagaagccaacaaagggcatgaggtagagaacaacagagaagagcttggagagttgagcaggcagggtcaagggggaccttgtgtatcgtgctaaggagctggtttcatgctgaaggagttggtgagatttgcacttagattgctgtgagtaaagaatgaaggcgtgcagcctgggagtgagcgaaatgggtaaagaggcactagttcagacgagagatagaatggccctaagttagggccagaccacctgtacaactgcatagggccttgcagtttgaagggcctggtgcttggttaaatgctcgtcaatcactgtttttaaattcttaatactatactttttgaataaggggctctgctttttcattttgcactgggtcccacaaattatggagccagtcctggttagggcagtggttgtgggaatggaggaatgataaggatccataggttgttaggaggtcaaataggacttatttagtgattcattggatgaagagttaggaagaaggaggaactaggataactttctgttttccagacagatggtggtgctcttaataagataggaaatgtgggaggaggagcaggcttagggaaaggggtaaataatgaattcagttttaaactagcagacttgaagtacttgtggggtctgctaggatcccagactctctaaccccaatttcttccagtccctatctccttccccacatgtgacccagcccctgcttttctctacccactcttctatagggcctctcttgtcccgcatccttctgaatcctcccaccccttttaaagctagatttacctggaaacaaacatgcaaacaaacaccaaaacactccttattgggttccaattctgaacccacagtgaacaccctcctttcagcctcacagttgacaaacccaggagtcccccattcccctctctttcctgtttaacagacatcatcccaacttccctcctcctttcttctgcaagactgggaagtgggtagagtgggggaagtgagcagagatgaaagtcgggaggaactcacatagattctgggttttggtttgggcttttttgtttgaacttcctgcctctcagtagggatagagggggtcaggattactggctgctcttgggagtgtatggttgaaccacattttggagataacggagaaaccattttcctcacataccatgtgagagacagctgaacagtgtttccctgttccacagaccatttaggggccagttgagaaggtattccagtatatctgtaaatggcacagtctcagttcttcagtcttggatacatgagatcttaatgaacctttgaaagactcaagtctccttattttgaagactgtgacactgaggtccagagagggcaaggactgactcaaggtcactatttatgtggggccagagcctagagctcagatccccagtctctgccccccgtttcttcctgtgccttgagtctcgctggcgtgggtttcccaccagacacacaaaagcctggattcttttctttgtctgagactgagtctagacccatctgcgtggaatctcgaaacacattacaggagcggcttagcctcgggcttagactccttttccgggtcgttggcgccgccttgtggagttgtggcaaattctcaacagctgcagctgcagtcccagacttggactagaaatgatcccccaggccaagtttacacgagctggacgagagtgggcgtgggtgggatggggagcctctgctcactctgcacaagcctcatattttgcctcccccacccccgatttccgtttccctcctccttctcgctccctttcctctttctgtgccggtcccatacagatacatttaacgacagaattgctcccaaaacagcgggcaaagacagagtctgagtctaggggcggagggcagaacaaattcagactttattgtcagggagaggaaaaaggggaggaccgtgggtggggggcctgggttgctacattgtcaagcagaaagagttgatgggaaggggaagaccagtgtaggccagacccctcccgggtcggcggctgaagggttgacgatacggaaaccacggagtcgggggtgggggagaggtgtcacacccccgcccgagttgtgcagtggaggtgactggtgggaggggacagccatgaggtctaggaacttggatcggggaggctacagactcggcgaatcctgcgaaggggaagggcgggggcgaggcttctattgctttttgctcacagttttgcggaaggcgaggcgggggtgggcttggactggacaccccttgcccccctcggtaccccttgggcgatgggtgctggtgaaaagaatggaacccggactagggaggaagaaggcgagggaaaggtctatggtggcatctccttggtcccacccaagtgccggagatgcccccaagtgctgccccctgcaatgggcccggctagacctggggctagggcatggtgcggggcgggcacagtgaggttgcaggcggtaaaaccaaagtgcttatgagggacccaggatcccgcctgctcccctccccctacggaggacgggggtgttcacggaagcgcttcagtttggggtagggagccggagtcccagagtccgcttattgccaagaaaatccatttctgtcccccccggaccccgaccatggcttgtgaaccccgttttgtgctaggtttggggggaagggctggatggacatggcttttgggagggggggtgtctccaagggggctcgggggtgagacggcccccccttttctaggggagagggaaaggcagggggcggggttccctgagatctggggtgttcccccccttctgaagcccccctcccccgctacccctcccctttcctggaaccccgtatctcggggtggggggggggaaggagagatcatttagggagtgccgggaggaggggcgggctgggagcccggacgcctgggtcccggctggaggtggggagttgaatgggaggggttcagggttgaggtcagtacggggagaagaggatgggtccgtgcgcagttcggatgggtccgggggccgggtgaagcagagggtgagtgatcggcggtccctggagaagaggtgcggctggagccgggcgcagggacagcggcgagcctgctgccgctgccatcactgcagccaccgccagggggctggggagcaggccgcccgccagggacttgggcagctccttggagaaagtcagcgtgccctgaagcgggcgaaaggcggaggaagagaagtcacccggcggtcctgcaaaccccacctctccctgggcaaagcccgcgtccctctctcctccccgcccgcgccctcccactgctgaattcccagcatccaggcctcaccgccagctccccggcgcccctagacttcttgtgacggctcagtagtgggttgggcttcccggccacgccgtctcggtgccgccggctggagatgtgctgcgggggccagtggatagggggctgtgagctcccggaaaggggcaacagcgagggagtataatcaagctccaagcaccggccccctcccatctggccccctggggaaaactctgaagaagggcctttactcaagctccttgctccccttccccacttagcgggtggagcgtcccagaattcctgggaagggccttagacccacctgtttcagttggacctccgagttgaccttgacattgcagatctcacagtggaaagttcggtcctgggcaggagcctctggttcccccggggtgggaggccccagccgagggtaagctttgatgggcccgagcccacttcgggcctccagaattgtcttgtgcttagtacctggagcccagagagggcaggaggtaaggggtggaagaaaaattatccaggcctactgggcctcagaatgcacattcccaggtacaatatgagggggaagagggtgggcacagtgtgggttctttctaactaagctccttgggaccctcccaaagaggtggatcaggagagagtcataggtaaaggagtaagatggagggaggagctgaggaagtaaagggctaaggaacaggggagatggctggagaaggagacaggcagataggctgataggtcttagatggtctagggatgttggaagccaggggcattaggatgtagaggcaggggtggcctgaggacaggagagtctgggtgggggcaggggagtccatacctttgttatgtgcctcaagctgggacagggagttcacagccaccttgcacagagcacagtagagcagccgcttggctttctcctcctcttccttgctacccccaggcaaggaagccggggctggagtccccccttcacccttggttacaccctgaccagtctccggaatgctgggaggggatggggagccaggctgtttctctggggatcctggggctggccccagtccattctccatggaaactgttgttgggggagaaacatggggatcaccctagatggctcttggagaagactcttcatgtggaagagaccccccccatttcctggagggcaagggaccaggagtccccaccctgttacaacatgcatgctctcatgccctggtccagagccagatgtggtccagctgccgcaggctgggtgtgaaactccaatgcttggctcattctccattagctgggaatggccaaggggtccagcctcaccagcctaccttcagggtgaagctggcagccagcccagccagggggagaggcatgcaacaaggatatacccctcagtggcctgccagccagtctgggcttcctgccaggacagccccttcctggagtcttgcccagcccccaggaagtacacgaaagagccctaggaaggggcagaggcagggtgaggaaaggtctggagagataaacacaggcatggcaaaagggaaatagaaacatcagaaccggagagggaagaaacagggatgtaggctgctctataattcatggcttgattaaagatgcacaggccctaggcctcagt

SEQ ID NO: 5941 - DNA, 6000 bp, Homo sapiens
aatattacctcaattttgtaacacaaataatgaccaaaaaacctgtttctctctctctcttttccttttataatctaatagtattatataaatagggagaaaaataagaaaatattataagaaaaataatatcaggttgctaaagtggtttacctgggcgttctgcaggatggagtgtgggtgctgatgttgggggaaagaagtgtctgcaataaaagtgcatattaatttaggtaaaattatgtgtgaaaaggagaagaatccctatcatactagaatgagagttaaatgaagtatatgcaaattacttggtaagtacctcacacatagtgaattgtcagtaaatagaaactcatggaaaattagacagtattcccgtttgttaataattaactcctgagaacaggagatagaatccaggaacagacttacttcgtggtttgtcaatacgaatcgtttgatttttggcatttttgaagctacctattagataatctacattttacaaccttttttaatttggaggaatggggcatagggatgataagctcaggaaaagtgtgtgtaatgtaatagagacttgtgcctgtggaaatgtaggcatttggcagtgtaggtcataggggcccactggtggcttactgaggaggaacttcctccctctttttcacagtgacttttctctgttacttggtggctttctaggacctctaagggagaggtccctttccctcaagttctggtagtacgtcaccttctctttgattttttattaattcttgtcttcacttccacccccaggatcatgtatatgaacttctcaacaccattgatgcctgccagtgccattttgatatcgtaagaacctttgcaattctcttctatcgtagagtcaaagaaaaggccaggtctaggttgggaggtctaggtctactcacaggatggggtgggaagggactggaaggatggctattttgtttattccttctcaggactactataattgttttgtaaaaagtgctgaagtgaaaatatatttacatgttaagcagatcagcaatgtgatttaattaattaaaaaattacataaaaatcttcttcaccttttccatctcctaaaagctaccttatttcctggcctccttgtatattgagctcacttttagcccctgacttttgttccaattttcttattcttcttttcaatcctgtcagttcctacttctaaatagattcactcggaatatattgagcactgtccagagtggttggggaaagaaggagatccaggttaattggccatgctgtccttgggttcctatgtattttccttgtagaatctcaactttgatttcactcggagttacctggacttgattgtaacttacacctcagtcattttacttctgtcacggattgaagatcggcggatactcattggcatgtacaattgtgcccatgagatgctgcatgggcatgggtgagttaaggcgagagtattatatgaagagtctcatacatggtgctatgatgtagagagtccctcatgcaaaggaaattgatgccatgatttcttatatgagaacctataatctacattgacccaggcaaaataaggtacacttttacatattcagttgactctgaaacaacacgggtttgaactacgcaggtccactttatacatggatttttttcaaccaaacatggattgaaaatgtagtgttcatgggatgtgaaatccacccttaacagagggctgactttttaaatggtgtgggttccgcagcactgactgtgggacttcagtatgcacgggatattggcatacgtgggagtcttggaaccaatctccctgctataatgagagacaactgtggctaactcttgaatatctgctagtggattattcaatttgcatcatctctgaacaatttttaatcctggactggcttctactctgattttcaggttattacaaaaggcaaagaaaattctttttagtgttggtaggaataatattagtaaggtaaatccattagaggtaactaatgcgtgataatacatttgaagccaaatataaatggattttgaattgtctgcagttctgtccccctccattagtgcaaatgtaagtatttaagggctgaaaaaatgaagactagagggatcagagtgggttgtggcacatcattctatgatgatgtgtattcccacatgcctacgtggatacctagacacatgccttacctgttagctttgaatatttatatatccttttgggttgtataacgatttgaatctaggcatattactggattttgaactaattaacagatttatagagtacctatcatgtgtccaaccctatttttgtgcttataaggaagaaaatttcatggacctgcccaaaatgaaatggttctatttagccatagcttagtaacctgatcctggagtggggtatctttatatgtaatttacagtgtagtatgtatatctttggaggtggtggggagtgccagcctatgcacatatctttatcctatatgcaaacataagagttcaagtcatgggtaagggagggctgtaacccctctcctctgctttcttctagtgaccccagttttgcccgtctgggtcagatggtcttggagtatgaccaccctctgaagaagctgacagaagagtttgggcctcacacaaaggcaagttccctgacaatggagaattcctcaggcaaaagtatattgtcctcatgattgccgctaaggtttcatttgcttttccccacaggctgtgagtggagccctcctctctttgcatttcctctttgtccgaagaaaccagggggctgagcagtggcgcagtgcccaacttctaagcctcatcagcaaccccccagccatgattaaccctgctaattcagatacagtgagtgcccttttccttttgttagtggaagcattctctttgccaaggccatcatctctgtagagggtgcttctttcaggaaatatcagtactaaagaatgctttagtcttcttctagggtatgtctctaagttgagcacttcttgtagctaaaaaatcatggttggtttggggcttttgtttggatcagggttagtggtttaacaaaagtgatctataagcagttagcctgtccatagaaggaatttagtaaatattcatagaatgaatgaatggatgaaacagagtcattaggcacctattaagcctagcagcaacttgattttaggaatcaattaacttatttttatttttttgagacagtgtcttactctgtcacccaggctggagtacactggcatgatcactgcttactgcagcctccacctcctgggctcaagtgatcctcccacttcagcctcccgagtagctgggactacaggtgtgtgtgccaccatggttgactaattttgtttattttatttaattttaatttttatttttgagacagagtctcactctgtcgcccaggctggagggcagtggcgtgatcttggctcactgcaacctccccatcttggttcaagcaattcttctgcctcagcctcccaggtagctgcgactacaggcatgtgccgccacacctgggtaatttttttttttttttttgtatctttagtagagacagggtttcaccatgttggccaggctggtcttgaactcctgacctcaagtgatctgtgtgccttggcctcccaaagtgctgggattacaggcgtgagccaccgcgcccagcctgtttatttttttgtagagacgaggtatcactatgttgcccaggctggtcttgaactcctgggctcaagtgatcctcctgtcttggcctcccaaagtgctgggattacatgtgtgagccactgtgcctggccaggaatcaattaattaataaatgtttttgtttgatgactgtgggctcaaagtccttccctcaaagaacttatagtctggtagggaacatatgccatgtagtcacaaaaatacaactgatggtacatgattagtgataagtgccaaatgagtgatttacattttaagcagtaaaataatccaaaggattaaccatcacagggagaaatcatgagaagatttctgagtcttgctctcttcattttattgttattaaaaatatctgaactgttgaagagaagttatgtgaaaccttttgcttgttctgacttctagtccaagttcctctttattttctcaactgtattgtttttcccttactccacttccagtgcctcatcacctccattattggcaggcttccctgctgttggtttatcaatgtgccctaaactagtctggtaaaataaaagttagttttttaaaaaaatttagagacagggttttgctctgttgcctaggctggagtgcagtggtacaatcacagctcactgcagccttgacctcttgggttcaaaagatcctcctatctcctcctcctgagtacctaggactacaggtgcacaccgccatgtctggctaatttttaaattttttgtagagacaaggtcacactgtgttgcccaggctggtcttgaactcctggcctcaagctatcctcctgcccctgcctcctaaagtgttgggattaaaggcgttagccaccaccccttgccaaaagttagttttgatactcagatcctagtttgtcctttctcctttagaggaaggccaagttaaataactgatcatctttgcttctcttctcacagatggcctgtgagtatctgtctgtggaagtaatggagcgctggattatcagtaagtttagtgggattagatgggagtggatgaagcagtatgttatatgaagaacaagttctaaaagtcttcctctgcactgttttcccacctacagttgggtttcttctttgtcatgggtgcctcaactccaatagccagtgccagaagctgtggaagctgtgtctgcagggctccctctacatcacccttatccgtgaggatgtgctgcaggtgcacaaagtcaccgaggacctgtttagcagtttgaaagggtgagagacacgagagccaaactgatcttccttgaatagtttttagcccctccaatatcctttttcagtctccacaagtgttcccagatataggtggtaacgattaattctaactattgaagaaatatacattaaatacctactattagctaagtgcttcactgggttttagggacacaataatgaataagacaacatggaggttaagagcacagactctgaaactagattgcttgggtttgaattcaggctctaccactagttgtgtggccttgggcaagttgctcaaatttcccatgccattacctcaatttcctcatctataaaatgtggataatagtagtacctccctatggcctacctcatagggttgttgtgaagaataaaagtgttattatttgtaaagcaggtagaaaagttcctggtacattgtaagtgctatgtgcttgttaaagaaaaaaaaaagacagttactgctctcgaggaatctatgaactggtagaaaataaacaaattgtttgatagagtaagagattataatgtgtaaacacaaagtactgtggaagcatttagaaggacacttaaactggcctctcaggatctagaaaaacctggagacaggtagatctgaaaggctaaacagttgaagagtgtgtgtatgtgtgtgtgtgtgtgtgtgtgtgtgtatgtgtgagtaattgtgtgtgtgtgtgtgtgcctgtgcattgggtagaaaggtaggggagttgcttgaggcaaagaaagatattctaggcagagaaactatcaagatttttgaggcaacaaagagcatggcaagttctgagaagttcatgtagttcagtgcatgggcatctgggttataaaaatgaagatgttgaggatgaatttggagaggtaaattaggatgttgtatgctttgctatggagtttgaatccatcccaa

SEQ ID NO: 5942 - DNA, 6000 bp, Homo sapiens
gcttcaaacagtgctttgccacataacaaatgctaagtgttggcaattgatgaagcattctgaagaaattaaataaaataaggccacagtagttgaagagttagtaactatgctggagagacgggcagggatataatttaaaggttttaagcaggggaatgactcctataataaatatctaagtggtgaaatcgctccccctacaaatcccatccgccaagagaatacaagctgatcacatcaagctcctcctttcaaacttccaaaggctcccagccctacttcttacatgacaaaggccagaagtccttacataacttagaaagcccttttcaatatcactctgatttacctttatagtttacctattttcctttccaaactatcttcaactaccaatatatttcctcacttcacttttcaatacaaatgtctcactattctcaacactctgacactactatcactttctcctctcctctgcaatagttccttttctaatgtttgactggatatctgatactgttacagttcaagccattttcatccacagttcaatctctctttccaaatgtgttagtatgggccaggagtggtggctcatgcctataatcccagcactttgggaggccaaggcaagaggatcacctgaggtcagtcaagtccagccggaccaataacatggtgaaaccccatctctactaaaaatacaaaaattagccaggcatggtggcacgtgcctgtaatcccagctactcgggaagctgaggcacgggaattgcttgaacctggaaggcggaggttgcagcgagccgagatcttgccactgcactccaacctgggcgacagagcgagactccatctcaatttaaaaaaaaaaaaaaaagaatgactgcatttctacaaaatcctcagaaatttgctgttgatatgacattacatatcaactcagatacatactatgtttccttcctgcttcaaaaggtattcccttcccctgaggttccataccaaagcccaaaattctctttatgacaatggagagatttttttattttcttttttttgagacaaggtctccctttgtcacccaggctgaagtgcagtggagcaattatcacacagctgaccacagccttggcctcccaggctcaagcaatcctcccacttcagcctcctgaggagctgggactacaggtgtgtgccaccatgcccagctaattttttaattttttttgtagagacagggtctcactatgttacctaagctggtctcaaactcctggcctccgcctcccaaagagttgggattacaggtgtgggtcactgcacccagccaagatttttttttaaggcaataaaaccccaagtcaacccagaagtcaggatcattgcatcaagatcaccagtggaaccaaacattaattgtcctaaaaatcagaatcaaaggcatgagttctttttttctttttgagacggagtctcactgtcccccaggctggagtgcagtacaccatctcggctcactgcaacctccaacccgggctcaagcgattcttgtgcctcagcctcctcacagcctcctcaatagctgggactacaggcacttgccaccacacctggctaatttttgcatttttggtagaggcggggtttcgccatgttgcccaggctggtctcgaactcctggcctcaagcaatccgcccgcctaggcctcccaaagtgctaggattacagacgtgagccaccacgcccagctaaaggcatgagttcttaaccagaggtccatggactcctcggggctacaaggtagttttatgaagcccctcaaactgcatgcaaaatatgtgtacatgcctttttctggggagagggtccatacctttcatcagagtttcaaagatatctgtgacctccaaaaggttaagaagtgctctagagaaaaagcaaagacaagcaaatgtgattaaagagcaagtcctttttaggctgtcaggagtgcctaatgttctcttagactgtaacactgaaatcaggtcagaggactttacgtaaaagttacttatccaatcaaatacaaattttatatagacctgacaaatacagatttgatggaaggaggaactccataaaccaacacaatctataaatgcaagtaagtcatcgggcagctggtgacttactccagggatttcaaaaataggacaaataggaagaaaatattagctcttctatatatagttcctttttatctcattcaaaaattccttttctgtgttatattttataacagtccagaagtatacaatttctataagtacagtatatataaacaaagtggagatgattgctcaattttttttaactcatcacaataaagatcaagagaccgctgatatagtctatgcatttcagtatcatcaagttaacaataactccagaataacacaaaaacccactaacagagtttagaatccaagagtaagaaaaacatcagtttcacagaaagactaattggggtcaactaataagtgactaaagaagggtcctctccctacccttactacccttaagctttcttaacagcaacaaaaacaaaaaaaaacttttcgagctttaaaggatcacttttcagtttcagctatatcagcctggtttgtccaaaacatctaatgggaaaactacttgtgaaaccacaaacagacaattactcaagatatcttaatttaccctaaaagaaaatactttttaaaatgttcttctttttaatatatttttttaacttttttatatatctaagtgtgaaaaaactaccaagagtctcataagacaatttaaaatagcttctgtgattcagtgtcagccaatggtaacaccaggagatgcagggcccacccgagatatgaaatggaacagagataatcttaaccttggaattgtttttcccaaatattgcaggtgtgagttctctctggtggttggagatggtgtgtgaggaaggctggcgggccgagagccgcgtgacagaactcgaaaacttttaaatctgaggtgtctgtacttctactattctcaagacctcctcaaccccaggcttctaaggcgagaccgatcttctgagaggcctctccctgtttcaaaattcggcttggggcgtaatcccacctagaaaaggggagtggaagtattttctgagtgtctggtacctatttagacagaaatacacaaaaatgccaccatttgctaacagggaaatctcagcttcggacgacagactggaaacatcatcccagggaagaaaaacggatcctggctccgacatggggcaaaaaggagggaccaactgacgtaatgcagccctgaaaagcaacgaagagtataacaggtagaaggcacttacacaacccagtggggaagggtgacggacgatacaatgatgaaggaagcagaaataacaaataaatatagcagtaaagccgtgaggagaaatgggaaattagggaaggcgtagtgtggaagggtggcacaaaagagctacggcgggagccgagaaacgaagtggaaaaggctgcacggagaagacgtaggagaaggcgcaagctaccctgtagaattcagttcctagaaaagtccaactcagcccttccccgattcacggtacctttagcttatggagctccaccgtctcggtcgccatcttgttacccctcactccactaggcccccacccgcggcctccgcctccaggagctcccgccttaggcgtagagatgcaaggctgaccaatcgttgtcactcttgctcccacgccataccatcagctcttcccattggtcaatagctgacgtcgctctcacttctctaggcagcttgccccacctctttcaaaaggtggaactgggagaggggcgggcactgtatcttgcgaacgacagaaatggcaaccaactgtgcttctgcattacagaccaccaaccaatgggtggtggcagcgctgattctgttcctccaataggaaaggggcagaaggagaggcgttacttcctggagacttcaggtgtggtagccggcgccgcgcccatagccggacggggatctgagctggcaggtaggagctgcaaagactgtaagggttgctgaggaaaaatggtgggaggcgaaaggggcgccgagggagtggtgacctaaatactgagaggggagcgctgaagggagccctgaaaaaaccgatgaacatgaggaggaagctgggaggggcatggggcgggcttaaggaactggcggtggggctggggcgggcaagagccgcttcctaaccagacatcatcagctttagagctaccacaattttaaagatccgagttcagataatcactgctgcccctggagtcagagccaaggctccacctttcgaggtattgagctcaggtcccttcctaacccagtccagaagccgtgggcaagttgttgtcgtgccccacgcttgagagaagtaatggggatgcagactgtttacatgccacggaggtgagagagagggtggacaagccccagagaacaaagtggggaccagagtgagctttactctgtcatcccttcttagtggttctttgatgattccatgactttcgcctggaattctgggtgtacgtgacctcttcatggttattaacttcttcagcaaagtcagatactcctatttcccttgctccctgaagtgagtgccccaagcctacacatacaccttcatgttacagttgacgtgtaaagatcagagcaataatgactatgtctctgaaatgtagtgaggactcttcttgtcttttaaagttttccccaagtcttcagtttttattttctgcgtgatgggtaagttcttcattcccaatagagttcaggggattggggctatctgagagacaactgggagatagctcaagaggggttgagaaaaaactgagctggactcctgcctgatcccccattacggctaggatgaatgtgggggtggcacacagcgaagtaaaccccaacacccgagtgatgaatagccgaggcatctggctggcctacatcatcttggtaggattgctgcatatggttctactcagcatccccttcttcagcattcctgttgtctggaccctgaccaacgtcatccataacctggtgagcactaaaccacgcccttgtacccaccccagggtttcccaaccaaaagcaaaataaaatcaccaattgtttggggatttatgtgttccttttgggatcttaacataattctttgactgaaaaactactttctgcccctcacactgccaccttccctgttcccaggctacgtatgtcttccttcatacggtgaaagggacaccctttgagactcctgaccaaggaaaggctcggctactgacacactgggagcaaatggactatgggctccagtttacctcttcccgcaagttcctcagcatctctcctattgtgctgtgagtctatgggggaaatgagatatgctgggttagaaagagctccaagagccaggtagaaaggcccatagggaagctgttaaaaagcagacttctcatctaaaaccctttgaagatattatggtatactagttctaagcctacagagagcagtaaaatgtagattacagtcaatactgtaatcaagcattccttgctgcctccttggtagtaaggaaatgaagggactgagaaaagataagtgccaaataaaaccaaatgattttacactgccaaaagaagtaaataaaggcagaactgatattaatcttcaaaaacactgtagggagtggaagcaaagaggactgtaacagtcatacagactgaaatagcttgagccgtcatttgccatgtcattaacaattaacagatactgacttacagtctccagttaagggtgctatctcctgaaccccaaagtaaatgctgttgatatagctggaatagttttagataatctagaactatata

SEQ ID NO: 5943 - DNA, 6000 bp, Homo sapiens; identical to SEQ ID NO: 3234

SEQ ID NO: 5944 - DNA, 6000 bp, Homo sapiens
gcagtcaggtatagggtagatagaactcttgccagatctagacctcctgtgcgacgcgggcctctttccactcagggccctctccatggtgctggcccctgaactcccacctccaccctccaccaccccttccacaatcccaaccctttatgccccagggatttgggctttcccctgtttgtacaccttttccctcattccaccaatatccacatctcatccttctgagagataccactccatttatttgaccatcctcccacctcgatttatctgttccgttcaggccgagtgaccaagacaaaggacgggcatgaggttcggacctgcaaagtggcggacaaaacaggcagcatcaatatctctgtctgggacgatgttggcaatctgatccagcctggggacattatccggctcaccaaagggtaagtcagctggtgacttctggccttccaaaggcaacaacaatcaagagtggggttaacagtccctataacacttctgagtactgaattttgctttttttgcctcccataggtacgcttcagttttcaaaggttgtctgacactatatactggccgtgggggtgatctgcagaagattggagagtaagtgctgtcttggggattgggatgaagaagcaccagggcaaaggggtttgcaaggaggcagcatagggtgtgcagtccaagcctcatttctggactttttctgtttgtttgtttgtttgttttgagaaacagtctctgtcgctcaggctggagtacagtggcatgatctgggctcactgtagccttgacctcccggggtcaggtgatcctcccacatcagcctcccaagtagctgagactacaggcgtgcttcaccacacccagctaatttttttgtattttttatagggatggggtttcgccatgttgcccaggctggtcccaaactcctgggctgaagtgatcctcccgcttctgcctcccaaagtgctaggattacaggtgtgagtgaccacaccgaacctatctggacttttctgaggcctccagcagtggcccagaggatgaattcaaggctttagctactttcttcccttgcagattctgtatggtttattctgaggttcctaacttcagtgagccaaacccagagtacagcacccagcaggcacccaacaaggcggtgagtcctgtggccacaatggtgggaaaggagggcagatcaagacaagaagcatgggagggagcaggatctgaatatgtaatctgtgccttcaggtgcagaacgacagcaacccttcagcttcccagcctaccactggaccctctgctgcctctccaggtaaatctgttcccttctatccactggtcctcctagctctcccactctcctcagcctagaaagatgcatttccctcattccttttccaaatctctcttttctcagtgtatcctccttcacccaattctcccagacccctttttttttttttttttttttttttgagacgaagtctcgctcttgtcaaccaggctggagtgcaatggcgtgatctcggctcactgcaacctccgcctcccaggttcaagtgattctcctgcctcagcctcccaagtaactaggattacaggcacctgccaccatgcccggctaatttttttttttttgagatggagtctctgtcacccaggctggagtgcaatggtgtgacctcggctcacttcaacctctgcctcctgggttcaagtgattctcctgtctcggcctcctgagtagctgggatcacaggtgcacgccaccatgccctgctaattttttgtattttagtagagacggggtttcaccatgttgcccaggctggtctcgaactcctgagctcaggcgatctacccacctcagcctcccaaagtgctgggattacaggcgtgagccaccgcgcccagccatgggctgcagatatcttagtccagtggagcagcagggttcagtagagatatggtttaagaactagactggctgggcgcagtggctcatgcctataatctcagcactttgggaggccaaggctggcagatcacctgaggtcaggagttcaagaccagccatggccaacgtggcgaaaccccatctctattaaaaatacaaaaattagccagatgtggtggcaggagcctgtaatcccagctacttgggaggccgaggcaggcgaatggcttgaacctgggaagtggaggttgcagtgagctgagatcatgccactgcactccagcttgcgcgacagtgagactctttctcaaaaaaaaaaaaaaaagaaccactaggctataacttccatgccatttagggttcatagtccctactgtatgcaagaagcaaacctctgccttcatataacaaatgtttctagagcacctactatttgccgtggaataaaacacactacctgcctttaggggcttgtggtttatacaggagagagataatgattataatacgccatggttaagttcaatgacagtggtatgtccagagttgtgagagctcaaacaaatcatcccacacacctggcttcaaacattgaaaatataagccagacgcagcggtgcacacccatcatcctagctacttgggaggctgaggcaggagcattgcttgagcaaggagtttgaggctgcagtgagctatgatcacaccactacactccagcctgagtgacaaagtgagacctcatctctaaaacagtaaaaattaaaaaataaatatttatatacacaaaaatgtgacttgttattagctttggtgggtaagattacgtgtaataatcttttcactagctgggcgcagtggctcgcgcctgtaatcccagcactttgggaggccgaggtgggtggatcacctgaggctgggagttcaagaccagcctgaccaacatggagaaaccccatctctactaaaaatacaaaattagccaggcgtggtggctcatgcctataatcccagctactcaggaggctgaggcagaagaattgcttgaacctgggaggcggaggttgtagtgagctgggatcgctccattgcactccagcctgggcaacaagagcgaaactccaactcaaaaaaataaataaataaaaaataataataatcttttcactgatggttatctatattttctaaaatgaacattatcattatcgtacactcatacacaccttttttttaagtgcctcatattttaacgcagagacttcaggcccttccccttgccatgcttctccagttttataatcacttttggtgaaggggccttttttttttttttaattgagaaggagtctcacactgtcacccgggctggagtgcaatggtgcaatctcggctcactgcaacctctgcctcccaggtttaggcgaccctcctgcctcagcctcctgagtatctgggattacaggcgcctgccaccacacctagctaattttttgtatttttagtagagacggggtttcactatgttggccaggctggtctcgaatgcctgacctcgtgatccacccgcgtcagcctcccaccgtactgagattacaggtgtgagccaccacgcctggcccagtaaaggggcatttttgtcagaggtccctgagcctagaactaaacagctaattctaggtctgattcccaataatagtgagataactacaagagaaaaataccgtaccgaggttcatgtagcaacttcctaaatgatcgtgtaagtcttctctggagctccattcatactcgcagcccacagtcttttgcatttggtccagttggcattaagatgcagttgtgcatggtgaagactgtgccactctttggggcatggagacaggccttgggatggacccctctcctatgttaactaattcctttgtttcttctcctcccacaattagcctctgagaaccagaatgggaatggactgagtgccccaccaggtcccggtggtggcccacatccccctcatactccctcccacccacccagcacccgaatcactcgaagccagcccaaccacacacctgcaggcccgcctggcccttccagcaaccctgttagtaacggcaaagaaacccggaggagcagcaagagatagcatgacattctttcttcctgccaccaaccacatcccaagtgtcccctggagagcaagatagccttccactgattggctggtgtagcagtattttagccactgaacttcagtggagggtggtgagcagtgtccttatccaccctaatctcatactccctcattgtccagctgaactacctgtcccctgggagtcaggaccctctgcctgctctctttcctctttagaaatggcagttactggctgggcgcagtggctcacgcttgtaatcccagcactttgggaagccgaggtgggcggatcacctgaggtcgggagttcaagaccagcctgaccaacatggagaaaccccgtgtctactaaaaatacagaattagccaggcatggtggcgtatgcctgtaatcccagctacttaggaggctgaggcaggagaatctcttgaaaccgggaggcggaggttgaggtgagccgaaattgcaccattgcactccagcctgggcaataagagcgaaactccatctcaaaaaaaaaagaaagaaagaaagaaagaaagaaagaaatggcagttaccatctgtttcttctgtgtgagacatgggagtctaactgaagtctctccttcctaataaatgttaccactctactctgtgttggactcctttgctttctgtgggaaaaggaagaggttagcaactaggcatttgggaaggtggggtgtccctagaaggtggaaggaaaataggttacaggtaaggaggcccaggcaaagcagacctgcccctttaaggtagtgtccctcccctaccccctccctgcaggtgacccttgcccgcctgcctgcctgcccccccagctggaaccaagaaggttgtgtcccccttcctctgggtgtccttgtctcctgctatcaggtaatgccaacctcaaccccctggaccagtcaccccgatcagactttgcttgcctgattttaggccaggtcagacatcagaggagagcccagatccttgtttcctctccccccgcagggcttcccctttcttggtcatcgatccctagagctctggctctttctcttcttggggtgagaaactgctaagaacagtttatttcccatgcatgcatctgggcttgccactgatctgccttttcccccctcctccccaggttagggacacctgggtccaaccttcccaaggaatatggggatgggggttggagatgaagtttagtgctagactgtaaggtaggtggggtggaagtacatgagggaaagggctaaaatggtactaatggtgttaaggatagggtgaattatttaagaggaaaaagactaggcccaggttctccttagccatgtggctttcccagggcagagggtggcccctccctacccaggggcccagcagagactgacttttgatccctaccccagagaccagtgaaccattaactcctctcttatgtgagccttcacacactggccccacccctgaccccgccccaaggcaggtgggctaggagggggtgcatgtccatctcagccttctatgtgacgtggcctccgatccacctggacacctggaggctaagcctggattcccccttccctgactcaggaactgcttaacgtctacagcaaggcctaataggggacctgaggtgacagctcttatgttgccagtaggggtgaggccctggggattgaggggggataaagaggtggggcaaagttgaggggtggggtttaggggacaaggaatggacggtcagctctggatgaagtatgaggagagctctgactcagggaggtgctccaggaaccagcaaacaagaggctgctcccgcaggaggcagtgtgaagggagaaagaag

SEQ ID NO: 5945 - DNA, 6000 bp, Homo sapiens
gactcagagaggttaaggaacccagcaaagatcaactgtacagaaaaaggcactaaagccttagcttcttgataacacattcagtcatcattgattcatttcataaaatatattaatactcattagccaccgtttacaagatttctgcctgaaaagtttacagtctatgatgataacttttaatttaagtttctaatcttatatgcattcaaaataatcagaatatttacgtggtaaagcatctataaaacacccagaatccattaagtttagtttacagataataattgataaaatgtaaatttagaaaaataccccaacaaacaagttttttaatacataatccgttaagagatttttggagccaaaaaacccattttgttttaaaccaaagattcttgtgtgctattatttaaaggcataccatacagcaatgccaatgcaattgattccccttttatatgctttgttgaatcggactagattgtcattccccaaaatcctatgggagtttttcatagaagatatttccaaagtagcctatatagatatacgcaagatttaaatctagaagtagtggagatatatttctatagtttgtataatctgtgaaaccaggtcacagcaatcatattcacagctgctagccagctacaatctcaaccatagtatgttgccacttgaaggcaggtgtacatttgttttcacccaagttgaggggagcattgggacatctggtcttttgtacttagctataacaaatctattgtgtgtagtttataaacacacacacccttaatttaatctcacagtcttactctgaaaaggctattatatgaattttggggtcatgagactatatttttagttttgacttaaggacacattagtgcactttcaaaagttcaatgtttcattggggattttatgcctttatgatttacaatttcttttttcgagacggaattttgctcttgctgcccaggctggagtgcagtgttgcgatcttggctcactgcaacctctgcctcccggattcaagcgattcttctgcctcagcctcccgaagtacctgggattacaggtgcccaccacctcacctggctaattttttttttttttttttgtatttttagttgagatgggttttcaccatgttggctaggctagtcttgaacttctgacctcaggtgatctacctgccttggcctcccaaagtgctgggattacaagcatgagccaccacgcctggctgacttattgtctttttcagtaatatcttatattggtcagaataggctaggttttgttcccatgacaaatagagcctgaaatttccaaggcttaaaacaatggtctcttgctcacacaaagtacagtgcaattcaagcagtctttctttctttttcagagattccattttgtagctagttcatcagaaacatggtactatggcagggaaagggagtgatgaaggaggtacactgggtcttaactccctttaccagaaattacacatgtcacttccattcatactgttttagaactacatagttgcatggtcccaatataactgtaaggaaagccaggaagtgtggagccaggcagatcatagatattgtgagcaccaatagcttctaccacatatctgttgcctacagccacactgtcatctcttttcttcatttggcaaacgttactattttctatctgcaacgatttgtgctgcatgatagatgattctgttacccgaaaggggtactgattcagaccccaagagagggttcttggatttcatgcaagaaataatttgggatgagtctataaatgaaagcaggagtactaggaaagtaaaggaacaaaaaaatggctacaccataggcagagtagcagcatgggctgctccgctgcttatacttattattacctcttgattatatgttaacaagagatggattattcatgagttttctgggaaaggggtgggaaattctgggaactgagggtttctccccattttagaccatatggggtaacttcctgaccttaccatggcatttgtaaactgtcatggcactggtgggaatgtcttttagcatgctaatgcattgtaattagcacataatgaggagtgaggaggaccagaggtcactttcgtctccattttggttttggtgggttttagctggcttctttactgccgcctgttttatcagcatggtctttatgacctgtatcttgtgccaacctcctatcttattctgtgactaagaatgccttaatctcctgggaatgcagcccaataagtctcagcctcattttacccaggccttactcaagatggagtcactctggttcaaatgcctgtgacaatcccagagatgaataaaatgtcatctctactttcaaatagcctaatatattggggctacagaaacaaaaatcatattataatatagtcatatgtgaagctgaaacaaaatgccccagatagaggcctaaatcattttctatgggcaggatcacagagaaagatgaacttaacccttatttgttaacaaagaatccttaaaatgctatagaagtgatgatatatttgctgggcattaaaggaggaaaaaaggtttagacaagtttgatatggaaaagagggcagtgaatgataaaagacagaaaaatgtgagaagattgtgtatgactgaggaatgaagaagggagaaagaacctaaaccacaaggatgtgggtatatagtaaaagacatgtggacttcatgagtatatatgtgatgtacgtattcacagtttgctcatctgtggaatatgagttgctagaatgctaagtgtattgctatttgtttttcccactgttatttcagcttatgaatataaatcaaggcaaacattttaccagagcattccaagttctaatcatatggcttattttttccctaaattgtatttttttctcaatttcttaacaatattaaactgtaagtcataggataaactggctgaatttattcttagctgattctccctcctttcagatacctttctagtccaatcaaattttacataacatacctagctatcacaacaaagcaatttagaaatgagttcccaaatactaactctgtgacagtaggtaaattagatccagagttttaattgttgaaaaaacaagacttaaaaagaaggttacgatatcatgctataagtagtgatgtttggcattcagcaataggttaaacaggtcaagaacatgggactataagaaaaaaacaacaaaaaagaaaaatcaaagagaaggaaaagggagaataggatcaaaattcagaaagcatatggtctttcttcttcctcttctttgacaggaaataaaagtgatgaatgagcaggaaaaatatcaatagcaaacactcaagactatgaccttgaaatgtgcctttatgttgtttcttttaaatgtttaactttttttaattaaatgaagtgtttatagtcactgctagacatttcatcattatcaaaggcctattatgtcttatacaaatgtctatttaagcatttttagcttaaaaatataaaatcctttctgtaattttctgcctttttttcattttcaaatatcattctttcaataaaattatcttccagtaattttgatgttattaatcacgattattttttcatcttgtattatgcctaccagccacttcatgtatattatttcacttaaatcttatgaaatcaacacgattgatattacttttatttcatagctacagaaattgaaattcaaatttcgtccattacaacagactagctgtggcaaagacaatgtgaatttacccaaatgacttaactctttttataaattcgtaaaatgtgaagaatcatagaacacaccttaaaatgattgtgaaatcaaggaggagaaagctagctaaactggtagacaaactgcaataggacttgtcaagccaaaacctacaattattcttttggatagtttctttttctctaaagtggcaatttaacttaaagatattaaagaaacccaatctatggggttacttaaatgttctcttccagcccttcctctttccagttttaccaagaagcacattttagacaggggaagagaccaaaccaatgacagcagaattaccattatctctagcactattcgttgtcaaataactaaatgctggtttgaagaactaagtaatttgagaaattaaaaatgaaaggaattataaatgatttgaaaaaaaatccttcttatttttaatgttttttggtgctgttttctatgtccttcctcctatggtgtcaattatatttttttccgtgaagtgatttggttggtgagtctaatctccaacagtgccctacctctttctcccaaaaaggcctcagttgaaaaatggctcaacactttccctgcaagctcacaatgaggatctcctattctccctgcattcggccagactcttctttttttgcatgctttcctctcccatgcttgggttgcacagagctaccgcacatctgtcttctaggtcaggctacagagtacttcggatacagcaagttacgacccatctggaaagacagatctacctgccttttggctttcttccttggtcaaaactaaaatccgaagtggagtgccccgagcgatagagaaagtgcctatagctttgacagccgcttggagcatgctcagtcggtctccaggcaccgggaggcggctcccccccaccaccccccgggccggcctccaccgcagcctgtccggcccccacccctggcgcgcgctcctccgcacccacaagggcgttcagcagccgcgcctccccttcccgccaccgcctccttctccgctggctgtggcgggcgaggacacgtcaggggccataaataaataaataattccattcacccgttgacagcgaggcgaatcggctgcggtttgctgggaacggagggctgcagcgcccaccctgcgccagagaccagataaagtaagtacagctggggagggaggggagaggaggaggaggaggaggaggtgccggctaagaggagggcgagcctgcgtctgcgacccgagctgcccgcggagccgcacgcgtgtgtgcaaataatggccagcctgtgacaaacgtgccaacgcagagttggccagcgagcccttatatagacaaaaaaatcccgaagcggccgcgggagcagagctcgcgtcagccagtgcgcgccgacagctgcccgggaactgagggggcgcgcggggtcctgggcaaggagcgcctcgcgtgctttcggccaggaggtgctcacgctctcggcttttacaccgagactcagcgtggcgcggtgcaccccagtctccctggctcacgggactccgagggctgcttccagtgcggcgtgtctctagtgcgcgccccgccagcatccggcccccgagccccctagggtggcgtggcttcattgccgcagaaggtggaggcgggggtggagtgtgtggagagaacgtcttctctttgagcagatgatcaggacaggaagaggctgtgaggggaagacgaaataccgggggatgggggggttgtctttcttcatttttggtccccaggaaggatggcaggggtggaagcagatggaaaactatatgcgggcgaggcctgagcccaggcagaaagggacctctgacttggcaagggttcaggagggcctgagccttctggtcttgctgggccactgcaccacattgggggcgccaggcccggtcaggtggcgccacaggctgcgagcccgctcacgtgcgaactgcctgttttctcagcggatgctgcatcgcggcgcccttctccacccccttttctcctctacttccgcgaaaaggattgcagactgccttggaaagggcggtcgtgcccagtgccactttcccggtagggctgaggagggacttctgtagttccaattcca

SEQ ID NO: 5946 - DNA, 6000 bp, Homo sapiens
tctactggacagagttcgagagtcctctaccactgcagacaaagaaaagattgagtctggaggtggcaatattctcattcatcattcaagggacaccgccgagaagcaatgggctgagacgtgggtattaacattggctggagtagcaaggatcttcaacactagaagatatttgctgcagcctttaggtatacgtacatttttttctgattatacaagtaattaatgttaaaagaaatttggaaaatacagacgattcttttagagtctatcttaacttagtctttatgtgtggtgtgtgtgtaagcatctgtgttttcattcgtttgtacctactgtgggctagcctctagaggatacaatgaaaggcaaaatacacgtcattcttgctatcatgggcatgaggaagtacccataattacataaataaaggcgaaatttctacaatgatgtgttacaaggagtggtactttgtgagcttcggtaagtatttgacctggccagtgaattccagatggactttcctgagaaagcaatagttttcctgagatctgtagggtaagtaggagttcatcaggcaagagtaagacgaagtgtggagagccttatagtcaatgagagaatgtaaaagagacaggagaagattgaggaaaagagatggtggatgctagcatgtttaaaggtctagaatgaggagaataagaaagagtttgattatcaaagagattgagaggtagtgaaaggccagatcatccagatcatgtagaatgtgttaggagaaagttaggaggctgggcatggtggctcatgcctataatctcaacacttcggaaggctgaggcaacaggatagcttgagcccaggagtttgaaaccagcctgagaaatataatgagatctcatctctacaaaaatttttttaaaataaaaaatcatccaaatgtggtggtgcacacctgcaatcccagctacttgggaggctgagttgcaaggcttgcttgagcctgggatgtggaggttgctgcagttagccaagatcgtgccactgcactcaagtctgcgtgacagagtgagaccctgtctcgaaaaaaaaaaaaggatttcatcctaagagcaatgaaaaaaactactgatagattttaattcatgatttgacatgatcaaatatgcacttcaaaaagatcacaaagtgcatgtcttagtgtatatgtagaatggaatggcaacaaggaaggatgacaggatgttgttggactggttaggaagctgttggttgtgtatatcagtggttctcaaacagggcctattatactcccataagacatttggcaattttggagacatttttagttgtcataactggggaaggttgagcattactgctatctggggagggtagaggcaagggttgatgctacacatcttacaatgcagcctcctataacaaagaattatacaaccagaaatgtcaatggactaagactgagaaacctggttgccgattatactactttcaattctggtggtaatgctggtggtggtagaaaaaggtgaacagagatacttttgtacatagttatgagcatgttgtacatattatctattttattatttcgtgtttggcattttttaaactaatttatgttaaagcacaagcatatttactcattccataagcatttttgtatattgttctttatgtgcacttttttctccttttttccaaaaactatttatggtgtctgatccatttagcatgttagggcttggtatatgtatttttaaatattgggattttttcatataaaatttacgtacagtgaaatgcacaaattttcactgtacatttgctaagttttgacaaaatgagcatcatttttagtaccttcatgatatttctcttaaaagctgagaacgaatagatttatatatatatatatatatatatatatatatatatttttttttttttttttttttttttttttgagatggagtctcgttcttgttgcccaggctggagtgcaatggcacgatcttggctcaccccaacctctgcctcccaggttcaagcgattctcctgcctcagcctcctgagtagcagggattacagacaggcatgcgccaccatgcccggctaattttgtatttttagtagaaacgggatttcttcatgttggtcaggctagtctcaaactcctgacttcaggtgatctgcctgcctcagcctcccaaagtgctgggattacaggcgtgagccatcacgcccagcctagatttagattttttttaaatgaagacataagacagttaatgtctttgataattttttataactttaagaaatgatatttgttattttagaataagttttatatttttaacataaccacgtgcaatatataattatatctactcttttaaagggaccccttctctgacataaaatatgttaatagagaaattgcaggagtttttctccctaaatggcacgggatattctaaatctgatattaggtcaccattctgattggcaaatatagtgattcatgagacttttaaactttgatggcaacaggtagaagtgttttaattgtttgacattttaaaatgtaatttgtcaaaactcttttaaacagtttacttaaaattctgtgtttttattgtatgtaaattatacctcaatttttttttttttttttgagatggagttttggagtttcactcttgttgcccaggctggagtgcagtggtgtgatctcggctcactgaaacctctgcctcctaggttcaagcgattctcttgcctcggcctctgagtagctgggattacaggtgcccaccaccatgcccagctaattttttgtatttttagtcgagacagggtttcatcatgttggccaggctggtcccgaactcctgacctctggtgatccacccgccttggccttccaaagtgcagggattacagatgtgaggcactgggcccagccctcaatttttaataaaaagaatatggaggggaaagatgcatataactaggcaggtgttacagtttgtccagagtaggcagatagtacctattgttttataccagacctacttcaagcttttctattaaccgactgctttcccaggaatttggggtttatcccttttttaaaaaaatctggtcatttatcagctttccaaaatgaaagtccttaaaccttgattatttattttacatgtttcatagcctacttatgttgtactgctttggaaaatatcaactttcctaattttttacatcattttaatgtaggtatgtggataataatccatgttattaacaaagccagtaggcttgtttgctgtagggaaaagatctggctggacatggtggctcatggctgtaatcccagccctttggaagactgaggcaggaggattgcttgagcccagcatgggcaacatggtgaaaccctatctctacaaaaaatacaaaaattagccaagtgtggtggtgtgcatctgtagtcccagctactcaggaagctgaggtaggaggatcgcttgagcccaggagttcaagaccagactggacaacatagcaagatcccatcactacaaaaaataatttaaaaataaattagccaggcatggtggcatgtgcctgtgatcccagccacacttgggaggctgaggtgggagaatcacttgagctcagtgagccatgatcataccacatgacactctagcctgggtaacagagtgtgataccatctcttaaaaaaaaaaaaagaaaaaaattctgcagctctaaaataatttaaatatgaaaactaaagtataaagttaagatttatgaatgtgacatagtttatcttaaatatttaggccaataaaaaaacatgtattatactgtcctaagttacgacttttccaatgattctctggttaagaacgagaacttcttacttaatcattaataaaggtgggtagactgaagatgttactgaaatgcttttgtttcaacctcgttgatttaattttctgttatcctttggcagaagttctgggaaatggtataaatatgtataagtacatacatattttggggtttttaattttttttatttcagtagcttttggggtacaagtggttattggttacatggatgaattgtatagtggtgaagtctgagattttagtgcactcgtcacctacctgagttttgtttttaagattgaaacattatttgatatatccatcatcctcctcttggtgccctttgttcctatatctgaaaaatttttttactgaatttctaggttgtgataattttaattcccattgttagtaccttagtacctagtcatatattttccagttctgtaggattttaagcagaaaaattaagcaaatatgctttcaagtgtctaatatgaagagaaaatttgatcgcttttatgataatagtttttttttctcttcctaatataggagatttttcaagagcttgggatgttcttcttgaccatatacagtcagcagcactcagcaaaaacaatgaagtatctctggctgctctgaaaagcttccaggaaattttacagattgtgtcccctgtcagagactcagataagcctgagacaccacctgtagttaatgtacctgtgcctgttcttatagggcccatatcaggcatgagcaggccatttgtaagaacagattccattggagaaaaactaggaagatatagtagctctgagccacccattgttactgatgagcttgaagatttgaatctatggtgggctgcgtggaatacctggtatagaattggatctgaaagtactaagcctcctattacttttgataaactaacttttattcctagccagccttttcttacagctttaattcagatatttccagctctctaccaacacataaaaactggtttcaatatggatgacttgcaaaagttgggagtcatattgcacagtgctatttcagtcccaataagttcagatgcatccccttttattcttccatcttataccgaagcagttttgacaagtttacaggaagctgtacttacagctttagatgttctccaaaaggtaatataattttagtggctaagtaatactgcatatagttctctgaaattttttttattttgctatatatttgcggggataaattttagatcatcaagattgttttatatgtatactttgggataaactgaggattgtcaagatctaggtattttgaaaacttgtggatttctgttgcattttgaaaggtaattcatgtatgttttgaatcttaaagaagctgcctgcatcctaatgtttcacttcaccaggatttttggtttgtccacgcaagtcttcacaagaggatataatatttggaataaaagttttagtaaagtacttttataattagaaaattaataagcagtgggattatatttttttaatctgtgcttaaatttagttctgaaattattgaaagcctatattaaaaaaagaaatttataaaaagtatttttcctcatggtttttaaagagatttatttttactgtgtgtattttgttattgcaaaaaaaatactattcagataaacagatctaaaattatggagcaaattcagattagcaagcaaggctagatcaaattcaaagtgttttttagactagcaagaaaaattgatagcacaattcacagtcatcaaaatgctaagctttaaaaaaatgccaactgagtagccagccattccaacaaagtaaaaacattctaataagattggagtagatctagattctgatcacacatgttatcagtaaccatttgtgtagtgtaaattagatttctgattaactgcatcttacccaactggaatgataaaaattttcacagtaagaatttctactgtatgatgatacctcttaattacctctggaagaagtttagctgagcagtagttcttgaactgttgaacc

SEQ ID NO: 5947 - DNA, 6000 bp, Homo sapiens
gttttccatggttgccgtgataaaatgcacgcactgcacaaaaatgagtgtggaacaggaaatgacactgacagtgtccactgattccaaggtttgagaagttctatagtgctcaacaggtgcacacatgctattaaatatttgtgattagttaagaatgaaataggaatatgagtttttctttcagtgtctgtgtatttttttaagtcacttttaagctgttaggacatagatacttattaggttgtttagacctaatgactttaaaaattgaactgttaagcatttcttttagcttgggagacactgaaaaatttacaggaacactaaaggtgctaagaatctctgacctacaccttggcttcgcagtattgaccccatggctttcaccattaccaaaacacagggagttgtggacatccaagaccaagacagtataaatgtgcccttgaatgaatcatacttcattttgttaatttgtgtggatcactaaaattagaaagatattcctttcacatgaaagttacatttgagaatagcttcatatattttattttaatacattgactaaaacctactttgtttttcttttcttttcttttttttttttttttttttttgagacaacgtttcattgttacccaggctgaagtgcagtggcgtgatctcagctcactgcagccttgacttcctgggctcaagtgatcctcctgcctcagcctgctgagtagctgcaccaccatgcccagctaatttttgtattttttgtagagatgggttttcaccatattgtgtaggctggtctcgaactcctggactcaagcgatccgcctacctcagtcaactaaagtgctgggattacaggcatgagccaccacacccagctgtatggcactctgaaattgtttgggcacatgatatatatggacttaatgtcaaataaccaaatttgagtctgatctgtaccatttcctatctagtgtcagctagctttatgcaagtcatagaacctctctcaagatttccttttttttccttcataaaattggcctaacatggggaaggaggactggaagactttctcatgctcttaagaattatacctgcttatatttctaaaagagaaatacaaagtattcgtatgctaccaataataaatattttaaacataccataattatcatcatcattgctagtttttctagcccctcagattctgcatattgtcttaaattactaggttatcactgaatcattagtcattgccagtgctagatactgtccaaggcaaacatagtcctcaaaacatagtcctggtccctgtatgttatataattttagaataatgtcatataaatcatatggtacatgcacacatagtaaaatatatttttacgttttgtgctttaactaatatctgtttagtatttgttaaccatggagttatggaaaaacttaagctctgaagtgagacagaactttgttgagaactcgtcattgccattacaagctgacagctaaagtgcaatttcacaaatgccaatgagagaataatgaactcctcagagttgttgggggggttaatgatgacccatgcaaagtgcttatgtatcatgtatataaaaggcgttgaacaaatgtttttatccccagcagtaagaagcaatgaaagtaggctttgggtatatttgtgctgaaaattagattctatcaggatataaagaaatggtttaagcaagttgtaaagaatctaggataagagtgactaattttaagatgaattaaatggtacttgttctatttaatacatactagtgaaaatatttcaatggtactggttgttctaggcagcacttaatatgaaaaaaatgagttatgatacatgtctattcctttaatgaaaactttttaaaaatacagttaaaaagagagtaggctgagcacagtggctcatacctgtaatcccagcacgttggaaggccaaggcaggtgaatcacttgaggtcaggagttcaagaccagcctggccaacatggcaaaaaccctgtctctactaaaaatacaaaaattagttgggcatggtggcacgcacctgcagtcccagctactcaggagctgaggcacaagaattgcttgaacccaggaggcagaggctgctgtgagctgagatcatgccacagcactccagcctgagcaacagactgagactctgtctcaaaaaaaaaaaaaatggtaatacaacacattcccatttactcaccattcaaaactaacaaatttcagctctctgtcatatttgcttcagatatttaattttcctgttaaaaaaattaaatactttcaataagggtaaagctccctttgtactgttttctagtccctttcatcttccttcctcctcagatacaattgctatcataaatttgatgtggatcctcccattcaaatttttatatttatactgatcctaaatatatatgtgtaaataatttttatgactgtactttcaagtttatgtatattttgtgagtgtcctaatccttgctttttttaacattatatttttgagatataacattcatggaatgtttataatgccattcttcgtttcttaatttgtcagcactttctcatccattgagtcagatgaagagtgtaatagcagctcacaccataaaagggttgagaactactgactttaaatgcctttctggtttgaactaaaccattattttacagagttccatgctattcaattatatttctttgcttaagagtttaaattctagccagcatttattttcagtgtggttaaaacaacaacagaaaaaaaggtcaggcatggtggttcatgcctgtaatcccagtactttgggagactgaggtaggtggattgcttcagccaaggagttcaagaccagcatgggcaacatggtgaaaccccatctctacaaaaaaatacgaaaaattacctgtgtgtagtggtgcacacccgtagtcccagctactcgggaggctgaggtgggaggatcacctgagccagggaagttgaggctgcagtgagccaagattgcaccactgcactccagcctgggccacaagagttgagaccctgcctcaaaaaaaaaacaaaaaaacacaaaactatcacattttgtattatcatatgcaaattgatctgcctacagccaaagcttaccattaatctacagctatgccccatcattcaaacttgttcaaaagattgtattatagaaattttacttctagatagaatgtggattaaatctcattgtagattttgtataaaatgatgaatttctgataccacatacctttgttcaggctttgtttgtctcttgtttttgttgtgttgtttttaacagcttcatcactggtccagctgtaataccagggtacttctccgttgatgtgaataatgtggtactcattttaaatggaagagaaaaagcaaagatcttttatgccacccagtggttactttatgcacaaaatttagtgcaaattcaaaaactccagcatcttgctgttgttttgctcggaaatgaacattgtgataatgagtggataaacccattcctcaaaagaaatggaggcttcgtggagctgcttttcataatatatgacagcccctggattaatgacgtggatgtttttcagtggcctttaggagtagcaacgtaagtacaaaatatgattaaacatttttaggccctaacacctgaatttctgaaccaggaagacttattcaaaattgtaataaatttagttcttctgggattattgaggccaggtacagtctttctcagagataaaaacagggtgtggtcgcatccttcaataacaattatgatgtttttaagagtattttattctttaatgaggagatgagttactttttttcttttaaaaccccaaggcatagaatggatttttcaagcttattaggagtgccataaaaatatatttagcagagaaatggcagatagatttttttaaaaacaatgatagtatctatatatagtaaaaaaaggcaatattattatatcaggaatataccgtaccattgtgtttgagactggctgaatttatacaaatctcttctataaaaggagggattaattaaatgatagctaaggtttctcaagatacagtcttttaggccaggcgcagtggcttactgcctgtaatcccagcactttgggaggccaactaggcagattgctcgagtccaggagttcaagagcatcctgggcaacatggcaaaaccctatctctaaaaaaaaaaaaaatcaaaaattatccgggcatggtgacatggactcctgtatggcgcctctagtcctagctactcatgaggttgaggtgggaggatcacttaagcccaggagattgagctgagattgtaccactgcactctagcctgggcaacagagtgagatgagactgtctcaccaaaaaaaaaaaaaaaaaaaaaaaaaaaaaagatatagtctttctccagctataaaatggaaaacatatatttttatctttctgttaataggatgtttttaattaagagcaagttgactttaagataagttgccactagtatataaacctcctgagagcagggatttttgtctcttttgttcactgttctatccacagagcctaaaacagcacctgcagagtaggtattctgtatttgttgagtggataaattatgaaaaatctcactgacatgatttttgaatcatacattcattattcatcattctgtccctggttgcgggatgtggccttagactgctgcctagttagcgacacagatgtcactggcacatctgtgccagtaatgagatgtattcccaagcctactcctataacaccctaactcagtaggtttggggtaaggccagacaaaaaggttcttgttaagtaaagccaggtttaagaccctcttaaaaatctattttttgagcagagcctgcatttgtaaaatgttttcatatagtataagatggaacctcttggtaatcatgatgttgttgcactaggccagtatatttcttatataggtctgtggttctcaaccaggggcaattttgcccaccgggaggcatttggcagtgtctggagacttttttttttttttttttttgagacgaagtcttgctctgtcaccccagctggagttcagtggcacgatcttggctctctgcaacctctgcctcccaggttctagccattctcctgcctcagcctcccaagtagctgggattacaggtgggcatcaccactcctggctaattttgtattttttatagagagggggtttcgccatgttggccaggctggtctcaaattcctgacctcaagtgatctgcctgccttggactcccacagtgctgagattataggcatgagccactgtgcctggcctggagacgtttttgattgtcacaactggaggaaagaggttgtcacaactggtatctagcagatagagcccagggatacagctgaacaccccacaatgtataggacagcctccacaagaaaaaattaacccaaaatgtcagtaatgctgaggctaagaaaccctgttatatacaaactgttaggtaaaattttgttctcgtgtgaaagttacatttcaggtacacagtttaatccctggtatttccaaatgctcataaaaataggtaacttttcctgtatggcataccatggttttatctgtcagtttgttttaatctacttgaaaagcccttgggattaatttttcagagccctttgcaatagcaaaatatataatctttccttttttttaattgacaaatagtaatggtatatgataatggggtacaaatgatgttttgaaatatatttacaacgtagaatgcttaaatcagactaacaaatccgtaaccttatatacttaacaatttttgtggtaaaaacataacatctgctgttttagcaattttgaaa

SEQ ID NO: 5948 - DNA, 6000 bp, Homo sapiens
cccacacatatactgtcaactggtctttgataaggatgctaagaatacacaaaggggaaaggacattttattcaacagatggtgctgggaaaagtggatatccatatgcaaaaaggatgaaattggacccttatcttgcaccatacaaaaaagtcagctttaaatagattaatgactgaaatgtaaaatatagaactgtaaaactgtaaaacacttagaagaaaacataggtgaaaattgcatgacattgggcttggcaacaatttcttggatattacagaaaaagcacaagcaacagaagcaaaattagacaagcagaattaaattgaactaaaaagcttctgcacagcaaaggaaacagtcagcaaagtgaggaggcaacctacagaatgggagaaaatatttataaatcatatatacgataagggattaatatccaaatgattcaatgaactcctacaactggagagcaaaaacccccagaaaatccaattaaaaaatggacaaaagacttaagtaaaaatttctccaaagaagaaatacagatgaccaggtatatgaaaagatgctcaacatcactaatcatcacggaaatgcaaatcaaaactacagtgagatatcacttcacacctactaggatggctactatgaaaaaaaaaacacaaaacataagtgttagcaagcatgtggaaaaactggaacccttgtacactgtaatgtaaaatggttcagcagctatggaaaatggtatgatgggtcttcaaaaaattaaaaatagacctaccgtatgatccagcaattcacttccgcttatatattcaaaagaattgaaattgggatctcaaagacataaaacacactctcatgttcattgcagcattatcacaatagccaagatatggaaacaacccaaatgtctattgatggatgaatggataaagtgtggtatatacatacaatgggatattattcagcctttaaaaagaaggaaattctgccatatgtgacaacatggatgaacccagaggacattatgctaagtgaaataagccactcactgaaggccaaaggtgaagtatctaaaatagtcaaactgatagaaacagtagaatggtggttgccagggccaaaggtagaaggatatggggaggtgctgttcaatgggtataaagtttcagttatataagacgaataaggtctagaaatctgctgtacaccattgtgcctatggttaacaataccctattgtgcacttaaaaatttaagagagatcggccgggcaccgtggctcacgcctgtaatcccagcactttgggaggccgaggcgggtggatcacgaggtcaggagatcgagaccatcctgggtaacggtgaaaccctgtctctactaaaaatacaaaaaattagccgggtgtggtggcgggcgcctgtagtcccagctactcgggaggctgaggcaggagaatggcgtgaacctgggagacggagctggcagtgagccgaggtcgcaccactgcactttagcctgggcgacagagcaagactccgtctcaaaaaaaaaaaaaaaaagaaatttaagagagatcttgcgtcaggtgttctcaccacaaaaaaaccttttttttttttttttttttttttttaagacagagtcttgctctgtcgcccaggctggaatgcagtggcgtgatctcagctcactgcacatgccgctcccgggttcacgccgttctcctgcctcagcctcccgagtagctgggactacaggcgccagccaccatgcccggctaattttttgtatttttagtagacatggggtttcaccgtgttagctaggatggtctcgatctcctgacctcgtgatccacccgcctcggcctcccaaagtgctgggattacaggcgtgagccaccgtgcccggcccacaataaaaaaaattaaatggaccaagtaataattcattgaggataataacaacagaagaaacgtggtagaggcaaagagtagtagatggggaaaattcaggaggcttccagatgattctgctaccacctagttttgtaactttaagagagtttcttaaattccccatcatttccttttttgtgaaatgactaaatctggataatctctatgctgtctttagctccagtagtgtctgaagttacatatgaaactatatttatacaacaatgccccatgccttccaatctgtttgcttctaaatccatttcacaattattctctaacaaggtctatttttctctttgaattttattcttttttagccactattctgcattcctccataattctatgccattcttttgccagtctatccaatcagtgtactttcttagctgtctccttagtcccctgaatatattttctcaatttgagctatagataagaactctacagttatcaagatggactctgatcatatctaaagggtttgcttcaagattcaacttcaacatgttttcctaagcatgcctgcttctgctcttgatctctttcttcagttcttcatttaataactatttattttagtgctccagcagtaagcaagacagacatggaccctggttatgttgttccaacttttcggctgcttttagtattttccttatatttgaattgtggaattctcaggagtaaaaatatccacagagccaggcaggtaatgagaacgagtaaagcaggccatagacctggtagagactgagcaagaaggtcaagatggcttgtttgccagatgaactagaactctagattttaaagtgaactctgatttactgattttcgcagggaaggctaaacatttcttttatgaatactccacatcatatacctgtaccaatattcctaatacatgggtacctgaaacattttctccagttttccatgcctagtttctttacactctcacttcattcaatgctttattaatatttatgccacttaactttttcagtcggtgtcctttatttactctaatcttctatttctagtcaatgcaagacataaaggtaaggaagggcaagattcaaaattgagatttttggccgggcgcagtggctcacgcctgtaatcccaagattttgggaggccgaggtgggtggatcacgaggtcaggagttcgagaccagcctgaccaacatggtgaaaccccatccctactaaaaatacaaaaattagcagggcatggtggcgcgcccttaatcccagctactcaggaggctgaggcaggagaatcgcttgaatctgggaggcagaggttgcagtgacctgagatctcgccactgcactccagcctgggccgcagagcaagaaagactccgtctcaaaaaaaaaaaaaaaaaaaaaattgagatttttggctgggtgcggtggctcacgcctgtaatcctagcaatttaggaggcagacgcgggtggatcacctgaggccggcagttccagaccatcctgaccaacatggagaaaccctgtctctactaaaaatacaaaattagccgggcatggtggcgcatgtctgtaatcccagctacttgggaggctgaggcaggagaatcgcttgaacctgggaggtggtggttgcagtgagccgagatcgagccattgcactccagcctgggcatgagtgaaactcagtctcaaaaaaaaaaaaaaaattgagatttttgagtgaaaatgacttatgtccatgttaacatatgactgaaaacaattcgatgctccaagggccgaccctgagactatctagctgtaaaagatgactcctagtttgggccaggacgaacagaatgaaaatcagctcggactgaaatgagaaaaagtagttgtgctgggaggacagatacagaaaaagccagcagcaaagttaactgagaaacttctttctcccacagccgtgcagtagctatgacacgccatattcacccctctttgagtaactgctgctcttactagtgttgctactttattactggaggtacctaattactaaattgctgtatcctcaagacagcatccaatccctcgtaaatcccagcttttcttcatgccgccacggaaacggcgtcccatgcagaactgattctggctctccttagaccctcctcagactcctttggcgggaaactaatcttacaaaggaggcttcctctttccttttccagtggcattccaagcttcctttggagtgccctccctcctgatttacaaattggcctgacgttatcggagtacaggctttttcctggtggtttctggcctaacaggagacagattagtaagtaccaggatctctaataggtcaactttcatgatctctgctaaattctcagctgtttagacttacaatttttaacagctaaaaggaaagacaaatgctatctaaaactgtcccatcagcccatttacagggagcacctcccccataccgccctaaaatcctttaaaaaatggctttagtcattttatctgccttgcatttaagcgaattcagtttaagtggcttcagttctgaattcctggattatatcgaaatgttgcagatggcggtgtgtgggctttgagctcgtaaattttttgtgtggtactaattcaagacgattgagagcaggttgggatcattttaaaaagagttctcggcagggtgtggtgactcaagcctgtaatcccagcactttgggaggccgaggcgggcggatcgcttaaggtcaggagttcgagactagcctggccaacatggtgaaaacccgtctctactaaaaatacaaaaattagccgggcgtggtggcgtgcacctgtaattccagctactcgggaggctgaggcaggagaatcgcttgaaccgggaggcagaggttgcagtgagctgagatcgcgccattgcactcccgcctgggcggcaagagcaaaactctgtctcattaaaaaaaaaaaaaaaaaaaaaaaaaaaaaaaaaagggttctctagtaggaagtcccgagttgtatccatgtttttccgggcgtcccccggagggacaggttgcgggtgaccttttcaagtgtggaggaaagggaagctgcttttgtcttcaggaatgatgcaggtctcgactcaagcctgacgggcccaaacctccctggagctggctgacgactctgcccgagttcctgaagaggggtcccgggggtcccggagcggaagtgggagcgcgtgggcgtgggctcctcggctgcctggggctccagacttgtgctgcgtgcggctccggagctctgttctcgctcctgagcagctgctaggtttcccaagcgactgtctcaaccgcccggccgcctcccccgggcagccagagcttcacatctacctccagccgggacccgcccccgagccgcggggcccacgcccagagccctccgccgtccccagcgcagtgcagcagagcgcgatccagtctggggccgggccgcgcttccgcgcacgcgcggagaaacccgcgccctccgaggggggaggggacagagggggcgtcacgggggcaggagaagaaggaggaggaggcccgcgtcgcctccggcggggctcgcgctcgccccgcgctcgccctccgcctcgcccgagccccgggagggtgaaacgctttctcccagcatgcagcgggaggagggatttaacaccaagatggcggacggcccggatgagtacgataccgaagcgggctgtgtgccccttctccacccagaggtgaggaaccgtgctgagtggattccttgccctgcggccctccagcctttcttccccggactcgccgagggcggcggccgacgtgtgtggggtagtgggacgtgccgaagttggggagggtggggaggcgaatccaggcctgagcgcggctgcgagcggataacgggggaggagatagcggggcgggcccgaccggggcgggctctgggacgcagtccctggctgtgcctggaggacagaggtggaggtgttgatggt

SEQ ID NO: 5949 - DNA, 6000 bp, Homo sapiens
aattaggctaagttgtgttttcaattatttaaatccagcttcctgtgtctgagttggaatggatggctattttattaaaaatggagccttaatatgccagacaataattatgaagggaaatattctattaaatatccttgtagttaatatgttcatattaagttgctatatgtagccacaatgataacatgcaatcttatcatttaggggtttttgaaaatatttacattttctcaccccatctccatagttagcctataagaatctaaagataatatccaataattttgggccatttcttgcaaatctttaatgggcatcagagagtcaaactgcataaagcaacactatttttacattttattaaataattggcgcaggtgtatattttcagtgatacacaagtttgcccataacttgaaggaaaaacaaagagcagacatcaaacctacaacaaagaaccttctaaaggtccagaataacaaatactctttatttattttattttatttattttaattgccaaatagtagttgtacatattcatggggcacatagtaatgttttcatatatataatgtattgtaatcaaatcagagtagttagcatatttatcatctcaaacatttatcatttgtttgtcttgggaacagtcaatatcctacttgtagctatttgaaattatatcatatgttattgttaactatagccatcctgtagtggtacagaacactagaattcattcctcctatgtagctgtgattttatatccttaaacaaatctctccctaccttccccttcccagtctttagtatcctttgttctaccttttatttctatgatatcaacttttctttagcttccacatgagtaagaacatacagtgtttactttctgttcctggcttatttcacttaacataatgtctgccagttccatccattgccacaaatgacaggattcattcttttttatggccgaatagtattccattgtgtatatgtaccacattttatttatccattcatctgttgttggacacctaggttaattctgtatgttggctgttgtgaatagtgccataccactcttaatatgccaaattgtgtcttcatttacctttaatctattcttagaagacagtatcttatgaattaatcacagctttattccaagaagaaagctaatataatagctacacttattttatatatataaaatatatattttatatatataataagtatagctatataatatatacatatataaaataagtatagctattatgttagctttcttcatggaaacattaatccaaagacatatatatatatatatatatatatatatatatatatatatatattatgcctaggtccaagttaaccactttatgtatgtaatctcatttcatacttagaagaactttatgagaaaagtactattgttattatcctaattttatatgtgaaaaaactgaggcttagaatttctttacatgtaaaataagaatgataacagtccttgtcaaagtgacattatgcatataaaagcacttggaacagcgcccaatacataggaacacacagtaaatggtcctgtcatcatcatcattattattcacatgctaatgtcctctctttttcaagttaacattttattagaaaatagatctaacaataagattaaatcagtatataaatcagtgctgtctaatagaactttgtgatgattgaaatattctatcatccatgctgtccaataatatgatagccacagctggccaatgagcacctcagtcactaatttgaccaaggaacgttatttaacttccatgtatttaaatttaaattgatatagctagatgtggctggtagctactctgtagtatagggcagtcttaaatgaccaaaaataaccaataactctaccatctttgtattggttgatagttttaaatacaacctttatcatataaattttcacatggtgtcaaattatacatacttatttactttcaacatctgttacataagtaaatgcagaggacactggttccctgttcccaataactttttcactagcctgaaccagcgggccccctgctttggacccactcacaaaccctcaagacatcaattttttccaacgatttattttgcaatatttattcagtgaacttttttgagttctaagaccttattcctatggaaactaacacctcctggcatttaatttttttaattccacaaaataaatataaagcaaggcattgagatgaaaactcccattgagctacaattctatgcctttaaaataaatatccttttcaactacaaactgcagaaaatgcaggtatattgaaagtgaagcacattaaaaataagacacatgctaggtttctggggcagcatttcagaggcaatagcgttttgtcaggacagacagaaactatgcccaatatagaatacattagacatggaaataatgagcattcctttgactgtatccctctttctctgctccttgagtcactttgttcttttttttttcctttttttataggaggcaacttttctagtcttcacctttttctagaaaaaaataattgagtatttcacatgctaaaatagggtcttaagtttgccttatcctgaggttataagacaatctgcctgtccttctgtctttctctatccctatgaaatgtattatgaaagaagcaaaatatgctaatttccaaatgcatgtgagaatgtaagcccttctcccccaaatgtagaaataaactacatatgcagctggaaacattaatccaaaggcttcacaaggatattttgtcttgaatgctactaatcaatgcattcctaagtggaataatcaaactctaaaaacttctgttacctttgtgtgtcatgtcccccaccccattcattacaatatgattgcttcctgataaatttgcttagaacaagctctaagaatcagtatagccctcttctttgttccagaaactatccagtggatagttaattcctttcacaatggaatcactccaagggaagattgtccgttttattgacaatgtgttgcatttcacattctaaattccacttgcagaagtgattgttttctctgctctgaagctgtatatcaatgacatttctcatttcattaatataataaaccagtctccagcatataaagtccactaaagggccctaactcagctggttcttaatctggccctagcttttataattacattttctgctactttcaactctggcaataaatgttacatattccatttattttaaactcttacctttacactcagctgctagattgaaaccatcacatattctgctaagtaaattcattacttaggaagtagaactgaaatttgcttttaaaaagtatatattttataccataatggtataggtttgctttcatcagttcaatcattcagaaaaggaagtcatcaaataaactttcaaaatctgatggaatcattgaataaatcccgtgtagcctaaactgatatttccatttgatatcaatgccagatacattgtagttactcagtaaatgtttactaagagaacgtatggatgagaaaaaaatatctttattactactttttaaccatacttttcactatactatcatgttttatgctcacaatcatatgattagttgaaattctatattaattctatattaatttttttgtaacatgctgtccccccacccttaaaatcagattattgcacatggttgccttgggaattgtaatcaaatagagtgggctgaacaccaatgccagaactttcactgataagacaactgaagcaaatgaatttagaggttagcacaagttgacacagactccatggcatggaggttcacagcataggctctgaaaaccaaacaactcattccttaaacaacctcagacaggttatataacttctcagagcttcaagcatccttacctgtataatggcaatattaataggatctattatgagaagtaactgagttcattcatgtaaaagacttagtgcaaagtatataataaaaattaacgtttgagtattaagattcaagtcattttcatcctcatcctagtgcttggagattgattcttctatttccaattctttagcgctcaaggacgctttatagtcgggccttatctctagagctagatgattcatattcatttcatggcttctttcagaaagtgcaggtggtggtaactgttttggactatgacaagattggcaagaacgatgccatcggcaaagtctttgtgggctacaacagcaccggcgcggagctgcgacactggtcagacatgctggccaaccccaggcgacctattgcccagtggcacaccctgcaggtagaggaggaagttgatgccatgctggccgtcaagaagtaaaggaaagaagaagcctttctgcatttgcccatatagtgctctttagccagtatctgtaaatacctcagtaatatgggtcctttcatttttccagccatgcattcctaacacaattcagtggtacttggaatcctgttttaatttgcacaaatttaaatgtagagagcccctaagtccttcatcataccactgccctccaaatctactcttcttttaagcaatatgatgtgtagatagagcatgaatgaaattatttattgtatcacactgttgtatataccagtatgctaaagatttatttctagtttgtgtatttgtatgttgtaagcgtttcctaatctgtgtatatctagatgtttttaataagatgttctattttaaactatgtaaattgactgagatataggagagctgataatatattatacggtaaatatagtatcgtctgcattccagcaaaaatatcaactcgtaaggcactagtacagttaaactgacatcttaaaggacaacttaaacctgagctttctattgaatcatttgagtaccaagataaacttacaccacatacttggtgggtgaatccaattttgtagaattcctacacaggcaaaatagcatgatctgagcagcagcatccaggctgacctcaaggaagcatagccacaaaacagaatagcacctgtctgtacatatttacaaagctaaaataatggcttcactcttatatttgaggaagcaactgaacaggagtcaatgatttcatattactgcatatagaataacaacaaggtgttccgtgtgtgtgtgtgtgtgtgtgtgtgtgtgtgtgtgcacatttgtttggggatgggggagaagaagctaaggggagaagtcaacatttatgaaatattgcctgactatttaaaaagaaaaaagtagctctccattatcacctttatacaaaatgtacatcctgtgaattctgttccagatttcacacctacaataattccaaaaggtttgcacattagagtttgtaacaaaatattttattatataaaaccaggttagaaggaatgcaggatatttttaacacaacaatctgtgcttattacacaaaattactttgtggtaaacagacagtattgtaatcccatcaaaagatgaaagaaaaacaaaaacaaaaaccaacaacaattagccatagttctgaatgcacttcaattaagccaaaacagacagctagtgatctttttatatgctctttttacttaagttttaatttgtcctttaaaaaaaggtgaaacaaaccaagaacaagttctagaaaactgaagcaacctcttatgtatactagatgcttgatttaggaggagtttttaaacgttttcaatgttattatgtagtaaatgacactattatgaagctactagtcattccataagagtcttaaaggactgctctgtgtaacactgtgactgccgtgtgtgcttagacccgtagtttcctcagtggatagcactcaatttattccgtagtgatattgtaacaatac

SEQ ID NO: 5950 - DNA, 6000 bp, Homo sapiens
tggtaccacagccgcgcgccaccacgcccagctaatttttgtatttttagtagagacagggtttcaccgtcttggccaggctggtcttgaactcctgaccttgtgatcgtccaccttggcctcccaaagtgctgagattacaggcatgagccaccgcacctggtcgccttgactgctttgctgtatctgcaagactgtactttctaaaaatcaaactcaaaatctaattctgaattacaatgcaaattgaattcccaatctcatagtgtttaaagttagggcaatgttttgagacccaaaattttggaatagtgacacctgggcagattatgattccactaggaccatgaacccccatattctttttttttttcttttttgagacaagatctctaactgttgcttaggctggagtacaatggcgcgatctcggctcactgctacctctgcttcccaggctcaagtgatcctccctcctcagcctcttgcgtagctgggactgcaggggcatgccactatgcctggcttttttttttttttttttttaagagacagggtttcaccatgttgtccaggctggtttttaactcctggactcaagagatccacctacctcggcttcccaaagttctgggattataggcgtgagccaccatgcccagccagaacccctaaattctgttgagcctccttgtcagtcaaagaagcccttcctctcctgtctgaggaggttatgttcctcgtccctgtgaaatctgtaatggcctcacctgaggtggttgcctggcgggatctgctgattcttcttaaaacctactgtccactttgggaggccgaggcaggtggatcacctgaggttgggagttcgagaccagactgaccaacatggagaaaccccatctctactaaaaatacaaaattagccgggcatggtggcgcgtgcctgtaatcccagctactccggaggctgaggcaggagaattgcttgaacccgggaggcagatttgaatctccacagtggagagttatggtccttcaggcaatttccctacttgtgtcaggttggaggccgagagcctcttgaatgttaaggaggccaacccccttgtcttagtccatacctgctgcaataacatcacctaaagacggataaaaggattttgtatcctcttttgggtagaattagcttgttcacaattgtccaagggacagctgcttcatgttaggtagaagtctgattttgctctttagtttttgtctggaagttaaatatgattacaagaggtgttcattgatgccatgttgacaaccgatagactctggtactttttttgttgctgttgttaattagtttttatttcataatcataaacttaactctgcaatctagctaggcatggaaaggaacaaggaaaacatagaacccaaagggaactgcagtgagagcacaaagattctaggatactgcgagcaaatggggtggagggtgctctcctgagctacagaaggaatggtctggtggttaagataaaacacaagtcaaacttattagagttgcccacagtcagcaatggtgatcttcttactggtcttgccattcctggacccaaagcactccatggtctccacaatattcatgccttctttcaccttgctgaagaccacatgcttgccatccaaccactcagtcttggcagcacagatgaaaaactgggaactgtttgcgttgggtccagcatttgccatggacaagatgccagaaactgtatgcttccggatgaagttcttgtcatcaaatttctccctgtagatggacttgccaccagtgccatcatggcatgtgaagtctccaccctgacacataaaccctggaacaattctgtgaaagcaggaacccttatagccaaatcctttctctccagtgctcagagcatgaaagtttcctgctgtctttggaaacttgtctgcaaacagctcaaaggagatgcggcccaagggctccgtgtcaaagaacacggtggggttgaccatggctgatagcacagggctcctggcagcagcggtgcctgcaaagcccagtggtgttttttttaccatgtcaacttagctaggctagaaccacatttcctagattcctttccctgcatagttttgggttagggctagctataagagaaatgtgtgcagtttggaaggcagaagtggagcaacagtcattacattctgaaggtcaccagctcccacatggggtaggagctgggcctgcagctccttcagttaccactgtatcttctagatcaacttctgtgagttctgggccacgagcatgtgcagccccatggtgaagggtaccagctgttccagctgaaaaaatgtgcagcaaagggtcacggtattacccggtgctgggggaagggaataggaagattcactacagtcatatatttttacataatatttgactttttcatgacaaaggatttttaaattagaaaagcaccataaagttgaattaaccaaaaaagagagagagaaagtccagacccttcagtgactacctctgtctacataagatcagactcctcagtctggtatgtgaggccctggacaatcaggtgctagtgtacttttttaactttatctgtcactacttcccttcctgtgccctccactctggaattcttcctgggactgtaggactttagttgggccagaagggctgggtctgggatagggttgcttagagagtgccgtgatgccgcagcctcaatgctaacttttgtttttttgtttttttttttttttgagacggagtcttgctctgtcgcccaggctggagtgcagtggcatgatctcggctcactgcaagctctgcctcctgggttcacgccattctcctgcctcagtctcctcagtagctgggactacaggcgcccgccacctcgcccggctaattttttgtatttttagtagagacggggtttcaccgtgttagccaggatggtctcgatctcctgaccccgtgatctgcccgcctcggcctcccaaagtgctgggattacaggcgtgagccacctcgcccggccaatgctaactttttttaggtaacatcttctgtagacttttagacattatctcattgagttctcatagactctgcaaggtaagtattactcccatccagaaccagacacctgatttgcagggtccagtgcaaactaaaaaaagcgtggccccttgttcatacatgtattaagaatttcaagccgggcatggtggctcaggcctgtaatcccagcacattgggaggccgaggtgggcggatcacctgagctcaggagttcgagaccagactggccaacgtgacgaaactctgtctctactaaaaatagaaaacttagccgggcgtggttgtgcacgcctgtagtcccagctactccgggggctgagacaggagaatcgcttgaacccgggaggcggaggttgcggtgagctgagatcgccccactgcactccagcctgggcgacagagcaagactccatctcaaaagaaaaaaaaaaaaaatcaaaatgacagcagagcattaaatgaagtgtaaggccatgtgtgactgtaccagtgtgaacctatgaggccagtcccacccctatcttacatctagggaacaggtacacagagatgaagtaaattcccaaggttactttgtcaagagcttggaaaatataagagtcagaagtctaacaggttgaatccctattaaactctccccaactaaactacgcccctccctgttgagctgaatctaatgaaagcttcctaaatgtattaaccacacacacgcacaatctgctatcagtcactttcagtagttcatcgctgtaacatctcaggagttcaatgtttcaacgtgttctgtagattactgtgataacgcggcaagctgtcgtaagacttcttgctgcacatttctttttaaaatattctccaggagtctgatgaaaaatacagacatacctatgtttaatgtcaatggatggaacttattttaaaaagtactgtaatggcagaagttgtgacacaaagtactgcagtgatgttgtaactccaacacctaaatatattatcaagcattcgcgttttgttttgttttttaagtgactactagatactgtgattcacttaagtgaagcgaactgaagcccgtggtcaaggagagacacctgaaggtgaagggacaaagcgagcagggtaagagctcgagcccgacccctctcaaaaaatatagacccggaacgcgcgcctgcgcagaacgaatcctcccgcgcacaagccgggcggaagagctggggcgggcaggggcgggaataaggttgctaggagaacgcgatgacgctacgggctcggcgctcttctccaccaatgggcgacgcgtacttgcagtggcgcgctgtgtgcgtcacgccgacgacgcgcgaagggcacacatcttaggacccggaggacgtccggcctctgtgagccgcaacctttccaagggagtggttgtgtgatcgccatcttagggagtgagtgtggccgggccttctcctgtggcgggtgtggggagcggagcccagagctcctgtggggccgctgctttggcggtgggcccagccgggagcagcctctttcgaaggccgccgtgacctcttcaagggcgtggagacgggaaggaaaaggccccggttggggttccagggcgccggtaacgttaaccggcgccttgcctgtcctctaaccgtcgctccctcctcccctagaaagatgttctcgtccgtggcgcacctggcgcgggcgaaccccttcaacacgccacatctgcagctggtgcacgatggtctcggggacctccgcagcagctccccagggcccacgggccagccccgccgccctcgcaacctggcagccgccgccgtggaaggtgagatcagaccctgcccaatacagtcgtgtggtctacttgtgggccgcccagcctttgaggcctggacccggcttggaggacagggaaggacgagtccagcccgctgcaccgtaggacggcgcccagttgcttgccctggggtatcggccttttccaccataggcgggtgtcagatccttggccttccctcaagggcgtggaagcgctgaggccctgtgtcccttcgtgacctccgtgtgcccgagggaagagaggccgtgactagctctttctccgccgtgagctcgcttggtcagcaaactaagtactgggtaaactctcctcccgaaactactgaccacccacagttctactaactatattacctgtcctttgatttgcccttagttttcttaaaaatagtcctttcctaagttttatatttgtcgacgccaggtcagtcatttttgcacttaattgtatatgagataactagatgtcctgttttcgtgcgactggaggaggcagcttgcagccctacataggcaatagaaaggagataattggtgggcgtccctttggtgtgattatctcttgggattcttggtggttgggcccagctttaacttagttgtgtgtgttttaaatcctagtgaagtatgtacatacagagaaacctgaaaaccgaattgtaggagtcctaagaatgttatctaccttgtgcctgtaaaatcgaaagatttttttctttaaatcattcatgtgcttctgttgtctttagtatggatagagtccttatttacactatctgtcgttcagtttaaaagttaaagctaacattatttgtgtattaaatgtatttgactgcaggaatttgtgcgtatccgtttttatgttacaggagttcttaagtggggatagtattggttagtggctgggataaactttgaagttgtttgcaagccttttacatgtcgagtgatctttctgagtttcgtttgtactctgaagtgtgctcttaccagtggttaataatttgaagtttgactttaattgt

SEQ ID NO: 5951 - DNA, 6000 bp, Homo sapiens
gcagtggtgctttggccctcgggagggttgtctgcagctgccccaatgtgcaaagaatcctctttaacgtgagactgagctaacattaaccaggtagtcacatgaaattcttgccctccaaaagttggctttatctcagtcagcttaataatttttttatttttatttatttttttgagacagtctcgctgtcgcccaggcttcgggcagtggcacgatctcagctcactgtcccctccacctcctgggttcaagcctcccgaacagctgggattacaggcatgcgccaccactccctgccatttttttgtgttttagtagaaatgaggtttcaccatgttgcccaggctggtctcttaactgctgagctcagccagtctgcccaccttggcttcccaaagtgctgggattacaggcataagccaccgcacctggcctcagtcatctgaatttaagtaataaactaagtaaaattgagctttaattcaaaattgggtataagtattttacagattacctgaagttgttgtcatttatttttctggaggagggcgggttgatgatgctctttaaatagtggccagaagtcatttgggctctctttgtcttcttttcttgattggaaacagtattttcctgacagcagcccttggatttcccgaggctttgattcctgttcagctgctctgggtcaatctggtgacagatggcctgcctgccactgcactggggttcaaccctcctgatctggacatcatgaataaacctccccggaacccaaaggaaccattgatcagcgggtggctctttttccgttacttggctattggctgtgagtacaatttttttatattactgatttttaaacaaaatgtttgtgagctgaaattttgtaaattcatcccttaaaagcgtgttttttcttctatccccgtatagggtagcaaaagacagagatgccctcttacagttcgatgaactatacatccaatttaccagagtcctttcacagttagttccagttttagcatcctgcccttacttgggcttttctgaatgagcaattaaacatcagggttttcagattgagccctctgtgcaaagggataagaatgattcacgctaggttctgccttccaagagttcataggtgggatttaaatagataattgtcaccaagttataaaatttagtccctgtttccataagagaagggttgcgcagtggctggtcccttttatatataaatcatctctttagccctcatcttcctcaccccgggttcttccccatttcatagattgggaaagtgaggtgaaatcacttccctgggatcccataggaaggcattgtgttttcataatatattcacatgacttcaaattcaaaaagcacacaatggcatagaatggaaagggtttgggccagtcacttccctctggcgttgaggtgctcatgtaccctgtgcccttccggagagattccagcatgctgtgcacacctgcatgttgacccttgtcttgccttcttcctgcttgtcagatccttccatatccggacatgcgtagtgcctcatccttgcagccagcggccttcatgctccactgtaattcgtgggttagtgggtatatgcacttgttgtttttgatgctaccacatggggatatttgcctcgtctgaactctgtgtattctctgctgcaccttgttgcttctttgcaataaacttcctgaactcaaagctaatactggggggaatcccagaagctgctgagggcagggccatgctgctcagtgttccaccctagctcctgacagcatttccctagaaaactgctgctgggcctctaatggagcaaataaatctgtgtacaactaggcagcaatagtttgtccaaaagtcctggtgtaatctagtccctcaaactgtgcagccttacatggagtacacacacacttgcagccttgaagtactacccactgaggggagaaggcacggcaaggggaaaggttggcacaggatggagcaagtgctttttctcacacattctggaggaaaagttatccagttcttctgttctagaaacacccctgtccttcagaaaccagggtctagttgctctggctaccaggcgtgagcaggtggtggtagcaccacaggccccggttaccatcactgtcccatgtctttgatcttcgtccttgtggggactggcctgcatggcctcggtggcagcgagccctgcagaggcaagtgcatcagcatcactgtgtttgttcccaggttacgtcggcgctgctaccgtgggtgctgctgcatggtggttcattgctgctgacggtggtccaagagtgtccttctaccagctggtactcagtcacctttctttctgtaccttacatgagaagtgttgtgaggccttgacctttctgtggtttcggtatctatcaaatcatcttaagactcagacaataaacagttacatctaagatgattctgaaggaccagggcttctccgagaaattggggtaaacctcttggctggctctgcattcaggctggtctgtgctaggcttggtatggggttggagcctggacttgggaaatatactgggctgataggaatttgattggattttcttgcagagtcatttcctacagtgtaaagaggacaacccggactttgaaggcgtggattgtgcaatctttgaatccccatacccgatgacaatggcgctctctgttctagtaactatagaaatgtgtaacgccctcaacaggttagtgcaccttcacggcaggctgaggcgagcatggtgactgccagggcaccggggaattgtgtgtagtcacggttgattgaggatcacaggacagttcttcccttcccaaaagaaaggagaacaggcaataccagttttaaaagcatgagctgtcgtcacctccaggaagtagtgggagtgcttagccctgtgtttcttaggagctcttccttaaaagaaaccgtgggggccaaaaataggaactttggtacccctgtatgccagcacccacagggaaggaacctcaccctttcacacagacaaatggtaccatccagttaagcccgtgacaaaaatggaaatttctaaatagcccaagtctccagggcaattgggaacagctttgaacccactaagatggggtctgctatgccaaaacatagatacagaattcacagtttgtcctgcattaggacattctcttcaactttgccactgtagaaagtggaggtaggtcagcggatggtgccacattaacagccgccttactgaagtgtagtccaacagggtcttactgccactgtgacacgtgccttgccttgggggtgcgtttccccacctctccttgctctgcagcttgtccgaaaaccagtccttgctgaggatgcccccctgggagaacatctggctcgtgggctccatctgcctgtccatgtcactccacttcctgatcctctatgtcgaacccttgccagtaagtggttgggtggggcttgggaccagccacctccttccaggggaggctggaggcgtgacacgtcttccctgtgtgtcagctcatcttccagatcacaccgctgaacgtgacccagtggctgatggtgctgaaaatctccttgcccgtgattctcatggatgagacgctcaagtttgtggcccgcaactacctggaacctggtaaagagtgtgtgcagcctgccaccaaatcctgctcgttctcggcatgcaccgatgggatttcctggccgtttgtgctgctcataatgcccctggtgatctgggtctatagcacagacactaactttagcgatatgttctggtcttgactgacagttttccataaagaagatgtttaacttaatcaattaatttttttattgtttaaagcaactgtctatttctgctgaattttcacatgaacatactggctggtgatggaggtttcatactctagattttgttttgctttttctgactccagtggggcaagattttccttttttatacacataattaaagtgtccattgacatgtacagagaactaacactattttatgcaaatatttttttgtagatgaaaaagcatgtacagtgttctgtttaatactcatccttgtataaaaaaaatagttgagccagcagacattgtcagcaaattaattggcagcagattttaggaaatgaatgtgtgtggttttttttctaaaactaaatagcatgtattgtgtcttttgcatgatgatccggatttaatttgatatcacagtctaatttttattcataagccaatttttctgcactgagcagagtcttgctacctcagtcagtattgttttggtttgctacttccctcacccactttggcctccgttcaccccaccccaccccacctctccccaccttacccccgccccgcttggcttcttctttaggattgtgatggttcgttctgtttacatcagttttaacgagaggtatgcctgtactcgcttgtgcagaaaacattgttccagattcaatcgactgggtttatgtcccttcacatagtttttaaggttatttatttaaatgtctaatgtattttattgtaacagacattgttttgccaacattgcctatttcagtggcacgtcatctagttttaaaaaaataaaacattttaaatggacagagaaaaataactgtcttgtctttaactcgtaagtggcttacctgggactaacagacatgtccaactttctctccagttcttagctcagaactttagttgtactctgcttgaggggaagaaggctcctgctctgctgtgtaggtagtcataggaattgtattcttaatgtacaggcactaattgtcatctgtgatgtacattttatgcaagtttctgctggcctggtatagagaacataagggcaagtgtgtatgtgtgtgtatgtgtgtgttttgtaaaatctgtaaatagcacatgaccaaatgaacatattgtatagaactatttttatttgaatgtggcactaaccaccaccaccgttactacgatcaatgtttgcgcatgttcgagatgagtctcaccaacagtgtgtaagtcattaacagtcctaactgtggtgttttcctccaatgccttccaacatccatcaactaacgtgagtattttcttcctgggatttggatgctttagcctaaaggtgactgccaccaagtgagataactgtatgtcactaacttataagccgcctccatggcagatgctgctgtgctccctgatgccctgtgagcaccggggttgcctgtggcgcctgccatgtgactcgggcgcagcatcagctggctggaggtgtggctttcatagacctccacaggctgcctaggacaagatgaccaggagggcccaagccagacaaaagccggagtggggagagaggcatttcagccagaccaacaggctgaaggagctgtgcagactattgctaaaatgagggttcgcagctgccaggagtcatcccagaacattgctacttatttattaaaaagctaaaaactagtgaaagcaagtaactgaaccagtgaactctgggtatcgataggttcgtcttaaataggccacttccccactcccccacccccccttgcttggtcttgtccttggtggctaagacttagctctgcaggggatgttaaagcacagttagtaggacgtggctctgcacagcccaaaaaccagcttactccttagccagggtgtgaggcctcgactatattcttcaaaatgtacttaggctctggttactgggatggccagtagatgtaatgcagatggttggagtttggggagggttaggaggcatcaagcaggacaaggtgctgctgagttcagagggcccacgttcaagggatggaggtggaacctggagaccgactcttaaaagcacagtccgtggttgggtgtggtggctc

SEQ ID NO: 5952 - DNA, 6000 bp, Homo sapiens
gtggatggtaggttgtgttctgacctgcttttttgacttgagtggagggatatggttgaggaagcccttgggaggtaattgagctgatgactattttggaaacacttaaagctaaattgtaggggattcagaatcagttggataaggatgaagcataacatggtactagccacaagctttggagtcaggtctatgtatatcttgttgctgccatttaatcagatgtttgtcttggatggatgcttttaatttccctataaattgggattaataatggtacctattggtgtaccctgacctttgtagtcatttgggatcacctaaaacttgtccttattctgtttgtttgacatctctttcctaggggaaaaaaaggtaaaaggaggagtcctgtaggcttttggtatgctctgaaagattccagcattgctggactgcactgggacaaaacttcacttatttatgtctccttatccttgggatcaagtcttagagtatatttctttctcagggtttagattctcctggctgccagcatctcaggctgatttttgcagagaaagctgcgtctttgtgacatttctcccccattccacctctgtacctttccccaactcaatcttgaatgcactgaggatttcatcctgttgtcttgatgtcccccaaatgctgatattatgacatctaggaggatgaatgtcttaccaccaaacagacctgtgttcaagtccctgaggaggaggcaggacagagggatagtgtgtgctgggaacccagaactctctgggtcaacgtttcttcagttgttgtgtgaatcaaaagggaatgtgggcttgtgggaggaggagggatttgaaaaggctaaagtttaggcattggatcattgtccctgtccagtctggttatcttggggctctgtaaaagtagaacaggaaggtaagatagtgaacctccctatgagcacggctttttctactttctagttaaatctaaagcttttgcagcactctgctgttctgtagaccagaggctatttctgctacttctggtcttttctctggacccgggttcaatcacagcaatctctttattgtggcttatttgctgcttttaagggtctctcttacttaaatgctgtgggtcttaacagtgttttcttccttgtgttagatgtaccaaagcttcagcctcatccgggattggagaagaaagaagaggaagaagaagaagaagaatatgatgaagggtctaatctcaaaaaacagaccaataagaaccgggtgcagtcaggcccccgcacacccaacccctatgcctcggacaacagcagcctcatgtttcccatcctggtggccttcggagtcttcattccaaccctcttctgcctctgccggttgtgagaacaaatgactatcctgaacagggtggaggggtgtgggaaagaaaccagccatattggttttggtttctgtatttttcacaatgattaatgaacaaaaacaaagagaaaaaaacacacatcaattaaaggagacaaaaagaggcagagcgagtagagagcagccctcattcaccacctggtcccagacgtgcttcagtcctcgtcctctctttgtggctggctcccagccttctctttcctcttgaggatacttagggtaaactggatccttcctgctcaaggatcctcatttgtatacctagtggaaaggactctgaactcagaggagtcactgttcctttttttaggttagaaattaacagcagggaaatgccatcttattacctgagacgaccagcactgggagttaggtacggtctgaagttatgtctagataagacttcagacgtcctgggattgaaagaatgtgtgtgaaggggtagaatttgtgcggtaaagacttaaaaaaaaaagtagggagattaaaaaaaaagaaagaaaatgcttccttatctggaagcctttctggattaatccagtgatggtcccacctttagtgtttgagctttgtcattgcttgtctccctggcatgtgccagttatagactgtccagcatccaagacgtttcggttatgtcgggtcctcagatcgcctctgacttgttaccacaacaaatcattttgatttcagtgcctgttggggacttgatttcttctcagttttgtttgtttgtttgtttccttaatctggctcatttgaaatttcttctccctctcaaccatcccactaagttatagccaagaagggaaggagacacggggatttggggttctctgcttgaatgtcttctcctttaccacctcaccttgttggtacctccctccctggatctctgagccagcagccaggaggacctgacccagcagttctttactggcccctttgtagggccttgctgccagggggcagggatgctttccagcctgcagcaacagaacacttgaccttaaaagtctcttctggtctttggattagaaaaggcttatgttagcatagcttaagagcaacctcagagatttgagccctactaagtgactgaccactgtttagagtgtctggtatctgatgttcatttattcccatgttcttgtgtgtcacagttcagccagttttggtttatgcctagagctacttcaaggaactagactaattagctatataggcccagcgatgcttcttattgatcttaatagtatgcccctccttcccctgtcctttcatttctctatccaagtagcagtcaggttcttggtgtgatgggactgaaagaattccagtcagccagagccttggcagctctgaagctaaccttagcatctaagtgtcgatcttgaattccctgaaaaaatttctataggaaatgaagcttccctggtcccctcctttctggccattgtcatccatttcccagttagggcaacaatgaaggaggacccagccaagctagaaggaattttgtggatgggagacagcaggattagcttcagcttgggctggagcagtcaatataggatctcaggccaggcccgcttttctagaatgtgtttaattttgagtttgctttattagatatgttttttaagagctctgtatatttgaactgctccttatgtgacaaaataggtagctcttgggctcatgtcctgggttttggctctttaatgattactccaggccagcatttagtcgtttgagaattgtagcctgttgttttcgctgtgacttgggtctcagtgctagggtattgagtcaggcagctggagggttgtggcccgaggctgcagtcagaggtatacttcccatagtgcttcacacagctcccctgcttctaaaggataaggtactgtagccttggtcctggggaccacctgcctggggcagtggacatcctaactaaacaggcttctggcagtagctttggttcctatcccatcgaaattccccaaagccctgggccactgccattgggttagtcaagatgaaggaggaggactggctgcctccattttgccttgtttgttagtttgcctgggtctgtctgaggaaggagggggtcccgccttccacctcaacacatcccttcagtgactcagagtctcagaaggaaaccctgactcctggggccatttcctaatggtactgtaagccaagcagctttgcttctgcctctgtttccaagcccacccttttcccctgagctcagggttagggatgggcgctttcctctctggttgtgaacgaaaggaaggaacatctttctatggctaacaaaaactaaaggggaagtgaggaaacaggaagaagtatggtgggggctggggtagactcccctggagccaagcctatccagctaacaagagctccctggggctggtcacagctggctcatgatgctgaacttgaaagtttttttgtttttgtttttgttttgtggctcctccaagatataggtacatgaagtttaggttaaaggggtgggattctttatttttatttttgtattgtatgtgtcaagaattactctgttgttcaccttttgctttttgcactgtttgttctcttatctgtattttgagcttagtgctaggactgagaggctgcaccatagggaatgtatgggagatggtgaggggtgccagtgaggggtgcgtggaggagaggcctgggctcctctactggatctacactctgtcccaggtttttagatcccactgagcccagctgactgaaaacaaggacagtcagggtgaaacttcttttgccagaagtgtggcctgagttgaatttctgggaggatgacgcagatgtctgctgcagagctgggctgagagttctgcagtctagctctgacttaggtcaggggcctgttggtctctcattggacgtttttgggtctcactcatgcttactgaaacattgtgccaagaaactctgtgggatttgtgtcccttaaaccagactcacttttctgaaaaatctccattgttgaggagaggctgctcaatcgacaccccgagttctcatgactgggaagatagttttcttcaggtgtcaatggcgttagactcccaggaagactagccctgcccacagggccacctgttggtttgagagcgtgttcgtgttctcttgccctccctgcctaagagctactgggatcacgttagcgggcatttaggctttgatgagagggcacagtttgagttaggtttacctccccctttctgtgcctgggaactgtttggtccagctttagaactgtggttttgacttccttatctcttgggagaagcttctgttttaaggaatttctcttccttcttctcctgcctctagcctctcctggaaaggcctggatatggtttctaaaatctcagctgagaacttcagaaaacagcagcagtattttccttttcctagtgctaaaatccctttccctagaaattggctcaccttgggaaacccagggaaagaatcagcaggttctctgccctccctaggggttggggaaggacccaccccggtcagcacagtgccttttcctctcctgctctgagccagggtggggcattccctctagattcaggtttgggcaggggtcctatagtccctgccatggggctgcttccctgtcccttccctcccctttgctggcctactctggcataattcaagtgtcttcttgccttggggatccttagtggcatcaaatggcaacatggaatattgtcctccatgcccctccagaaggacctaggagagtaggtgagctttccaaagtgagagacgaatctttctttctttttttttttaaagggcaggatgggtatgctttgggctttctccttctgtggccccggaggaaggagagactgaggcaaggcaaagtgatagtacacggaagcagaaccggaaacacccaggaactgttcagaaatctcagaagaaatctgcttctcttcgatggaaagatataattaacgatcaaagagctctaagaaaattgcaaagaagccttaatgttcaagctttagaaagatcagagcaatttttctctttcagtccaaactaagactctctgtatttaaatctctctggggcaagagggctagatttcctcattttgttatgagactagattggtaccagtagatcagctgcctagcgagggcaggtttcttctttgcatctgtgtggcttgcttccagtctggcctgtcctttccagctgccttttgtctagcctgctatggggggccagattatcttgataagagcaggtgatttggggactagctgggttggcaggaaaagagcaggatggatctcttgggacaggttcccccaggagtataaacacaaggagccaggattgtgctggcagccaaggaaacagtagtgcctgtttgagttggcagagagggccttggcacctcttgcatccaggcagtcttgtgagatgggggcacatagcactggggaaagcagaactccattct

SEQ ID NO: 5953 - DNA, 6000 bp, Homo sapiens
gccaggcgcagtggctcatgcctgtaatcacagcactttgggaggccgaggcgggtggatcacctgaggtcaggagttcgtgaccagcttggccaacctggtgaaaccccgtctctactaaaaatacaaaaattagccgggcatggtggcgggcgcccgtaatctcagctacttgggcggctgaggcaggagaattgcttcaacccgggaggcagaggttgcaatgagctgagatcgcgccactgcactccagccttggcgacagagggagactccatgtcaaattaaaaaaaagaccccaggattttggactgtgcaggggtcggtgccccaaacccccacgttgttcaaggtcaactgtacactgtcatagtcgggaaaacttcatcactgcagctgctcctgtttcttgaaacctgaagcgggaaactggatcctgggacactactgccccctatcgcctgttggtcttcaaagaaataatcccttcaattttgcaaggcctgtggtgtcattcccttttaacagataaggaaaccgaggccaggacgtggtggaaaataatcaaggtcacacatctatgtgcaaaagtggagtaacaacccaggctcctcattcccaggtcagtccagtgacctcaattgacatgaaatgtgtgaggtccttctgtggccctgtggcagggcctgaagaggacagcgtatgtaaatcaagtcttgtgccttcatgagtgaggcagagtagaaaataacagtaattcactaggaccgaatctgcattgtaaacagagaggaaggggctagtatttggcagaaggatgtcaaggaacattttagagataagaggtgacatttgggttctgagggatgagtaggagtgtgccagggtgcaaaggatgaaaagacagctctagcagctggtaagggctaaggggcatggagaaacagcaagactttggggaactggtagaattctaattctggaaaatttgaacaaggtaattttttgtgtgtggttaaggtattacatacatacagtaaaataaaatgcaatagttgctgggtgtggaggctcacgcctgttaatcccagtactttggaaggcagaggcgggtggatcatctgaaggtcaggagttcgagaccagcctgaccaacatggtgaaaacccgtctctactaaaaatacaaaaattacctgggtgtggtggcaggcgcccgtaatcccagctacttgggaggctaagggagaagaatagcttgaaacccggaggtggaggttgcagtgagctgagattgcactattgcgctccagcctgggtgacaagagtgaaaagctgtctcaaaataaaataaaaatgtaatagtctaattgatttttttaaaaaatgtagacatccacgtatctaccacctaggtaaagatactagagattccagcaacctgggaggatccctcgtgcccctttcaggtctatatgagcctccaccgttccccagtcccctggaaggagagggggtgggagaggcaacatgaaacctaaaaaccagtgggcttcgcgcctgtaatcccagctattgggttggctgaggcaggaggatcacttgcccaggagttggaggctgcagtgagctatgatcgcgccaccgcactccagcctgggcgacagatcaagaccccatctctaagcaaacaaacaaataaacacccctcaaaacccatggcttcaggcctggcgcggtagcttacttctgtaatctcagcactttgggaggccgaggagggcggatcacttgaggtcaggagttccagaccagactggccaacatggcgaaaccccgtctctactaaaaaataaaaaaaaaaaaaaattggccgggcgcggtggctcacacctgtaattccagcagcactttgggacgccgaggagggcggatcacgcggtcaagaattcaagaccagcctgaccaacatagtgaaaccccgtctctactaaaaatacaaaaaattatccgggcgtggtggcgggcgcctgtaatcccagctactcaggaggctgaggcaggagaatcgcttgagcccaggaggcggaggttgcagtgagccgagatcgcgccactgcactcctgggcgacagaaagagactccgtctcaaaaaacaaacaaacaaaaaacacaaaaattaaccaagcgtggtggctcacgcctgtaatcccagctactcgcgaggctgaggcacgagaatctctggaacccgggagacggaggttgcagtgagccgagatcgcgccactggactccagcctgggcgacagagcaagactccgtctcaaaaacgaaacaaaacaaaagaaaaaaaccttagtttcagcccgcacattccctcaactcctatcgctgcctgcaaatgtttcgccatcttcttggacaatcctaagagggcattgcagaggcttccggacactgtcgttttcctgggaagtccacaggaactttagcttggacgagaaaggactagggaaaaatttttggtccttcggagccgccgtccaggctcgggccgcgcagagtcgcttgtccctcggcggctgccgtgcctccctttacgtggcagctgcgggagcccgccaatccactgcgcccgcatcagcccccactggtggcgcaggcggaaggggcggagcttaggcggcggtggctgagaaggcagcggggcggcggcggcggcggcggcggcggctgtggaggccgcagtccgggtcctggcttcggcctcagccccaccatggtgacgcttgctgaactgctggtgcttctggccgctctcctggccacggtctcgggctatttcgttagcatcgacgcccatgctgaagagtgcttctttgagcgggtcacctcgggcaccaagatgggcctcatcttcgaggtggcggagggcggcttcctggacatcgacgtggaggtgcgggctagctgcccgcagctgaggcttggtcgcgtggccactcggggattggtggcacctgggaccggcgcggggcctgtgtggggagtgggcttggaagtcgctgtccgagtcctggagaagcccaggccgccaccccccgccccgccccggccacggcgacctcctaacggccccttttcccgcgacttgcctgggttccgggatcccttgggggctccttcggcatgcttggttgctttgggttttctccttgaacgacgggttcctgttggaacctctcgctgagctttgtgaatcaggcgccgcgtgtcagtccgggccccaaaggcgcttctcagtcacagttagctggtggcgggtctctatccagttagcacctgccttctttcgtgttacggattaatgctggaacgtggcacggaaacttttccaaaaaattgattaaaatcgattgaggattaaaaacctattgagtgctaggcatactttcgcgttgtgtttatttttcatagaagcaaccttaaggttctactctttacgcctccagctacctcgtttagtctcttctgccaaggagagatggggagttgggtcatgcgttttaggagtaagcagtgcagtgaagtatcaggagaagacaggagtttaagaaaccagcagtccctaaatctccactcatgttttgtaaaccaaaagaatgatgtgttgctagtttttattttaattcacctgctagcatgattaattgggtctaaggagtttccatttgacagtgtactcagtagggctgggcacaagttacacaatacaagtgaaatccaaaaataaggggataacggaagggagagactcttacacttagctaagaatttagcgatcaactattacagtctcgaagttatgcaagtgacatgcactttgaaagagcgactgacttgatcacagcctaacagctgatttgtagcagactgggatgagagtttgggtcttctcatttccaggctagtcctttcccctaagccttcaggcatctcagataaagcagaattccttcactgtttggcagtaatctggaaaaccttgaaatgtgataaaaattcatcttgtttatattttaaaaaaccacaaacgtttattacctcatggtttctgtggccaggaattatggagaggcttagctgggtggttctggcttggagtatctcatgaggttgcaatcaagatgtcaaccagggatgcagaaattctttattttaaagagatttcttttttcttgagttttgctatcagtcacagttccatgtttgttggtgatattaggccagttagagaccacatttaaggtgagctttctgtttctgaggggtttaataaggataaataagacataaatgtcaggacctaaaggtgttttagaaagccatgaagtcaactcttattttataaagtgggagaattgcagcccaaaatggttattatcacttaccgaagtgaagctaagtgaaagttacatattcttggtgaatttcttttttttttttttttttggaccaagtctcgctctgtcgcccaggctggagtgcagtggcacgatctcgactcactgcaacctctgcctcccgggttcaagcgattttcctgcctcagcctcctgagtagctgggaatacaggcgtgcgccaccatgcccggctaatttcgtgtttttagtagagacggagttttaccatgttggccaggctggtcttgaactcctgacctcaagtgatctgcctgccttggcctcccaaagtgctgtgattacaggcgtgagccaccatgcccagccatattcttggtgaatttcttactgccattagacattacttataaagtctatgacttaatcttttgtgacattttatgcatttctctcttgcctccagattacaggaccagataacaaaggaatttacaaaggagacagagaatccagtgggaaatacacatttgctgctcacatggatggaacatacaaattttgttttagtaaccggatgtccaccatgactccaaaaatagtgatgttcaccattgatattggggaggctccaaaaggacaagatatggaaacagaaggtgagatgaacattcagaagatttacatcacattccaagagctaattttagttctatacatttttacctgtctgagtggagtacttattttttttaaatttcttaaccaaaacctttttgtgaaatacgctttttattttttgcaagtctcctaattaataaaaaagtttcttgaggctagtgtttgtttttttgttgttcttttttcttttatttatttattttaagattgtgtctcgctctttcgcccaggctggagttcagtagcgtgatcttggcttactgcaatctccgcctcctgggttcaagcgattctcccaagtagcgtcaggcgtatgccaccatgcccggctaatttttgtatttttggtagagacggggtttcaccatgttggccagggtggtctcaaactcctgacttcaggtgatccacctgcctcggccttctgaagtgctgggatttttttgttctttacatttgtcccttctaacagattttcttagtcattttgtgctcttgtgagcatgtaggttccatgtgtcttcagttattttttctgtttatttgctaatcctggcatatactttatttgctcatttgtatacatgactagtttagctaaactttttgttggttctttttgtgttaagatatcttaacttttctttaggtggtggagatacctgggatggtatgtggattgctttttgacagcatcctttttgcatctttttgtttgctaatgtctaatttctgctttcttttttctaacctcagtttgttggcatgagagtgtttttttctcttaaaaaacccctacaactaattggattgatattttttttggtggttttttatttcgttgacaggaggtataggttaggttattttaaactaatagcactgaaaacaca

SEQ ID NO: 5954 - DNA, 6000 bp, Homo sapiens
agagacgccacagccagctgagcattctcctgtagaggggcttgcaggcctggcttggatcctggccctttgacttactaactgtgtgaccttaggcaagctaacctctctgatccttagttttctcttccataaaacaggaatactgctacttacatcagtgttgttagagtccagcagatgctatagggacagctgccctggggacacattcagtcaaacccatcctatttcccatagctgcagccccaccacatcggactgtcagcatcacagaaaagttcaggaagagtttagagatatccttgctgtccccagtctcagactaggttgcactgggctccaggaaggaggctacacatttattgagctaagcattttttttttttttgagacggagtctcgctctgtcgcccgggctggagtgcagcggcaccatctcagctcactgcaagctccgcctcccgggttcacgccattctcctgcctcagcctcccgagtagctgggactacaggtgcccaccaacacgcccagctgattttttctattttttagtagagatggggtttcaccgtgttagccaggatggtctcgatctcctgaccttgtgatctgcccgcctcggcctcccaaagtgctgggattacaggcgtgagccaccgcgtccggccgagctaagcattttcactagaaggcaaggaagacgtagtcctaaaataatcctggtcctgtggcctgagggtgctactccacactcttcaccaagtgacaacacagagcagtactgtccaagataagcaggacctgagtcatctgagccctctgattctggggaaacaatgtcctcccagaaaagggaaaactgtaatcatttttcccccttcaagttccattcatccactcgttcatccatccatccgtccatcctccatccatccatccatccatccgtctgtccatccatccatccgtctgtccatccatccatccatccatccatccatccatccatccatccgtccatccatctgtccatccatccgtctgtccatccatccatccatccatccatccatccatccatctgtccatccatccatccatccatccatcctccatccaatgaacactgagtgcctattctgaggcagaattgtattaaatgctagaggcagaaataaagaattatgaaatgagacccctgacatatagatattcatggtcaggggaacagtatgcttcagtggaacaagcatagatttttggagccaagaggcccaggttcaaatcccagcaccatcacttacttgtgtgtggccttaggacaaatcacttagcttctatttattcaccccagtttcccgtctgtaaaatggggctaataatttttacatttcaaagttcttaaggggatgaaatgaagtaacatgtaaaactcctcgtccgagttagatgctcaggaaataagtcctattccaggccctctgaaagtatggatgagattagaagatgagggtggtgagaacattctgtggtggccagtggttcctactgcagcaaaggtgatagattcattcagctacctgtcgtcttcaccctgcacactcctcagtgtggaaacagcccagtctcagctaggctttccaggatgcctaccttttgcaaagatgagagtctctggcctccaggagtttactaaccagtctgaataccaagtgggtcttggaggctaggagaacttgagtgaggaagggctcaacattagagagtctctggcctccaggggtttactaaccagtctgaacaccaagtgggtcttggaggctaggagaacttgagtgaggaagggctcaacattagagagtctctggcctccagaagtttactaactggtctgaataccaagtgggtcttggaggctaggagaacttgagtgaggaagggctcaacattagagagtctctggcctccaggggtttactaaccggtctgaacaccaagtgggtcttggaggctaggagaacttgagtgaggaagggctcaacattagagagtctctggcctccagaagtttactaaccagtctgaataccaagtgggtcttggaggctaggagaacttgagtgaggaagggctcaacattagagagtctctggcctccagaagtttactaactggtctgaataccaagtgggtcttggaggctaggagaacttgagtgaggaagggctcaacattagagagtctctggcctccagaagtttactaactggtctgaataccaagtgggtcttggaggctaggaaaacttgagtgaggaagggctcaacattaagatggtgggactaaggccagaggcagtcagataaaaacagggagggaccaggtagctcttttgggggaaagtcaaactgtaccccctgggccaggtcaaccaggcagctgttctctgacaaggtgaaggagaggtgacaggactgctgggctgttgctgttcatcctcacagaaagcatgtcacactgtatgtgctaaatataatttttgagggaaccaacaaggaaattcaccatcttggcttgtctgatcctctcccctctttctcctttttatggagaggctggtgttttgttctggagtagctgtagctaggtgatcacatggactttgatgtcccctctgcaataactctgtggtcaatccatggtggacctgacatgcagggacaggccacacctgagcaccggggtagctcaagtatggattctggctgggccatgtcctactgtgccacagctgacccccagcccggcttctgctttcatagaggcaatgggtctgagagctgagacctgctctgccttcctcttcatgtggaaccccacaggagaggctgagaggggcccgagagacatatcgtgggggtgcttgatggaaaactacagactgagagtctcacttcacaccccacccctgctgggaagttctaaaatacacagaggaagcacatgtaaaaggaaatttccctttctccctgcaacttcctctcccttcataccacctagagctgaagaagcacctcctttgtcttgaaggaggcaccagctattctgaatgaagggcggtgggacagtgctgtaccccacaccaggtgggcgtgctcagggacagtgaccaggacgctgttctggaggagctcactgggcacacggcatagggcacatgtattcaaaaaatacccttccccattgatagctggcaggccactccagacaaattctagctaggtgcctggtgctatgcagtgaccagaggtgcctgggaccagacaccccaccatcccagcctctgcttccagaggacacacaacaaacacccacacctccccttaagcacctatgatatccctgcaccctcacagcaaccccgcaaagtagatattgtgttgttacctacctttgacagactgggaaaccaaggctgacccttgcctagctgtcgtgactgatacatgatagaggaggagaagaaactcaggtctgtctggtcccaatcctgggtcctctctacattgcttcttgaggtacgctctgggtgctttctctaggaaaatcccaaggagaagggttgtgaaggtccagggccttgcctagaagccacagagggcaggtacttggtggaaaactccagcgtgtgattcaccctcctcccttgccctcgtcagtgaggtcacctcccctcccaaggttctcagtttatagcctggagtctctggtaagagagggctgtcccctgtgctgcacatacccgtctcctcatccctgggaaggagatggttctggagggggataggggaaaagggggaagggggaagggcaaggaggaggaggaggggagatgaggtcagggtgtgagtctctgagccccttcccctgcccaagggagcagcagctcagcccagctctggaggggccatcatgggactgtgcccacggggagggcaccggtctggagacagtgggttcacagtgggagtgggatgggggtgggagcgctggggacagaggacttgacttcctgaggttggatgttgtaatctcggttcacaaacttttggcctcagtccctcctgctgctcctggtatttctctgtcctttcactccccaacacacacagcccccgccccaacacatacacacacggcttctttctgtctgggagtccctggacaagtcacatgggattctgcgctgggaggaacagggtaaggcgtgaacgtggagggcagtttccctttcaggtcccggctctcttggctttcccataagcagctgccttgggactctcctggagacctgatgcccacagccaagctgaccacaggagccggtgctggggactgaggtgagcgggaagtggaggggctggctctgtctttgcagtctccaactgctgctcagaggggctggagggatagagccctgggaagcgagactctgtggaactgcgtgtctgcagcggggggcaggacctgcaataacctcaggccaaagggcaagtctgatgcccacgactctcaggacaaggggtgccccctagctccgccccatccagcgtgggagcagctcagtgattagcctgtggagcaggaaagtccagcgatgggcagctggtcacggcagtgggtgaaagcaggggtggtcatctgacgaggggaggggaagcaggtggtgcccagcaaggtggaaggagaagtggacaggagaaacctcggggcattcccgagggcccaggaactgcaataaatgatcacaggtgaggggttcctgcccgctgcctgccggctgagcgtgacgagctgggtgccaggcgcctcccaggaggaagctgtcttggctttgggcggtggatgctatgggtgtgcttgtacccgaggggggcactcaggggagttgcaggcagccaccagctgagaccggcactcacggggtgtgaaggactacagagagagccaggttttggtgccatgcacacaggtatgtgtgtgcgaagggacgtgacgggaaatggcaccagtgtgtgtatgggaatgggtgttggtatgtgggtgtggactgaagcaggggctgggtgtcccatccccccgtgtgcagggtctgagctattcctatgctggactggggagcaaaggggacagagctgggatcccagcagcacatgggcagcagcatttctggtctcgtctgcacctctgctagccccagctgggcctctggcgacatgcccagctcctgaaaacagacttaactttggactttctagtctcttgaagatttgctctctgggcagcaccaagcccggtgtggaaattggtgtgtttgcttctggagggcactgaagtatgatgaggcccatcccccacccctcacccccctgtcccggcttagcaaagcaggtgggcggccttggaggagactcgaggggctggagaggcggccagccgaagctggaggtggaagggcacagcgggggtggggtgtgtagtcctttgccttttaaaagtagcccagaaaggagaactcagtacagcttgttttggtgtctaacatcctctgggccatttcttccctgagtctaacttaaatccctcttgctgcagtttaagcgtgttccctcttgagttaccacggctcggggccagctgtccttttcacttgctcttgctttcattctgccgttctggattttcattctgaaccacaagttacgctcctcccgattacttttttattttcatttttatttttaaaaaatcatgttgcgtcagtgtcggttcaccagctcatgttctctttttgcacttcccctatttctgatgaaacccaaatcctgggcccaaactggattctgtgattcgcttccctgcccctgcgcccctccggctttcccttcatttactccttcccccagcaagcctccactctcccagcccttgagac

SEQ ID NO: 5955 - DNA, 6000 bp, Homo sapiens
aggccatgagaggtggcagagtggagggcctgaggccattctcagccagctagggggccgctgcttggcacagggcacagaagccacaaagtgctggctgatggacaacaaaaggggagccgggggcaggagggagggtcctgttttattttttggaaatgaaggcaagagtgacccatccatgttgcatttgagtaagatgactctggcagtgccacagggacaagaggagaggtcagttaggagggcaggtgggcaatggagacagggcaagggatccggttaggtcattgtcatggaggggacaaatgaccgatccacagggcacactgattgtgggaggtgatggagggacagcaaaagccacagcagccctctcacactgggaagatgaggacaccagcgtgcatgagacaggcgctgcttctgaccttgacctgcagaaacgtgttttatatctgacccaacacacacacacacacacacacacacacacacacacacacacacagcatataaaacaaatccagtttcataaaacattctttaaccttgctgcaagtgattcacacagaattgttccaaggaattctgtaccattaaaaaaatcacattgcagcctctacgttggtctcatagtcagctagcgggtgactccttccagttgaggaagcaccaggctggacggtgaggagggagccaggaccggacaggggcgtgggtggaagggttcagctggattatgctgagaggcagtcagagggaaagcccaactggcaccaaaagcctcgacctgagctgaataaatagtgctggactcggaaggctccatcctgctccatctctctccctccctctctctctgctgtccctctctcacagacgggaagatttctgggggaggtggatggtgctgtcctgacccagctgctcagcatgggggtgttcagccagtaagtggggcacactcctccccagtccaaatagacacagcaaaccgagagctgacgctaagtggtcctggcggatctcaggatcctgacctccaaaacccacagtgggtgcccccaaagagctgcaaaagcaacctttatggagccagggcgtcagcatgatgtggggagggcgtaagggcatgtgggcatccctgggaggggctccgcagctcagaccctagagggaaaaccgtccaactccgagggcaaaagccatttgctcttcattgtctttaaaccattccaagtgcagaaatgtaattttcagcatgagctgtattctgatctgctgtcctagctcaggcgcccttgggaattgcggtaaacggatgctctgctagtaaagcctcctgaggcaggggcagggggtgggggtggctttggactcatcacagcccgcttctgattttcagagtgactatgtatgactatcaggccatgtgcaaaccctcgagtcaccaccacagtgcagcccagcccctggtcagcgtgagtgtcacccagcccttccctctgccagccagccagccagtcctctgccctgtcctggaatgaggtcactggtccctgttctcacccaccttgggtgtctggccccagggccctaccttgaccatctccatcttctgctcagagccactgctctcagtcccactcccaggcaggcctctgggtctggctttggggcttcagagggactgctctggtagttgtgacacaacagtgcctctggcggagacagagagagcagcctgccccagcctcagcccctgacactgccgcttgatcaccagggatcctcagcagtgcagcaccaggatgagggcttgactcgtctcctggaggggcatgtccaaccccacccgagatgtctgacctgcaataggcatttcccagctagctcagctctgcagggcaggtgggaggtggggggatggggggtgctgggctgctggcctgtgctctgctgcccctgctcccagtggcagggcagcccactctctggtctctctgagggtggtgctggtggtggggggggggcaccctcacccttggacctaggtgcgagcggtgtgcactctctccttcccagccaatttctgccttcttgacggcgaccaggtggctgctgcaggagctggtgctgtgagtgggggtagacacggggctggtggagggctgcatgcgagggtggcttaggagggtgtccttgagcaggaggctgcaaggtctccaggacaacccacttgctaccagaccccggggaaggagggcacaatccctgggcatggacgccacctcttccctgcatgctgcccctgggagggacctcattgctcaaccagagccctcaagcagggaagagggtgtcctggaggagaggggatgggccgggggctgtcagggatactccagctccttgggaacccaagtcgggagggctcagaggtctccgagattcagtcctgtgtctgacaggttcctgctggagtggagtgtctggggctcctggtacgacagaggggccgagggtgagtgcacggagctgcagggccatgtgctgaagagcagtggcattttggtccactaacgtgagaccattccctgtggggtgggtgacagtggggataggtgaccctgaagcatcgttgttcacatctcaccctgcgtggccttctctcatcacatccctcactcctggctctgtgtgtgacatcatcttgggacaccgccactccatgtgccatcatcaccaccccatgacatcctgccctcatgtgccaccatgttttcctgtgccgtgtccaccctgtgctgggcttatgttccggccagccaaaagtgtcttccatcactgtaagtagcccagctgaggccatccctgctggcggtgggttggggacgcagcaggagctacaaagaacccaccctccatgacctgtcccaggaatgaccccaagcagggctgagctctcctggtttaaagtaccattcctgggggttgggggactggggagtctagcccagttctcatcccacatgaggacggtcaggccccagggaaaatgagaaactccagcctccccttgggtgagaacacgtaagattccaagaggaagccggtggtgtggccgggtggccatgagccagtatgagtgagcaacctccagcccaccccttggagaagcaaacagcggcaccccagccctcagcgggactccgggttccaggggccccaggaagctctcaggatgattcccctgcgggaccctgtgtctgaggacagagtcccccagaggcagcaaccatgagaggccccaacacaaagcccggtggctgtggccacacgtgcagggcggcaatgagcctggcctttcaaagcactcactgcccgggcgcctgggccctccatgactgcaggaggccatcttgcctcagcgggctctgctcagttcctccgtgttcctagaacctttgccatggggttccagaacttcccaccacctgggctgtccccagcttatcccatctcttcatctccactgtggtcctctctctggcttgctcttcgttctcttctgctggccttggcttggggcttcctctgcccctgggctcagggcagttcgggctgtgtctccagactccttctggactcacatccgcgatcgggtggggctgctctggggtgttcacagtcactaggtgtcagtgacaggacactgtcccctctgtctctgtcagcagctgcatcttgcaaaagttgaagatgatccccctcaatctgcctgctcagaatttctcttctctggggtacctgtcccctggagctcctccccctggtctggcctacacagatgtcagtgtccccagtgaaggcgcactggacttggagtcccaggccggggcgtaggtgctgcagccccttccactgcgtgaccctggggacgccactcaaccctgccattgtcaggcaggcttctgtgcccagccctggggacaaaactcacagccctggccgctgtgggcttgctcctctcggtgagagttttctgcacgccagctagtgtcccctctgggtttccagctctggctgggagcttctggatttggaagctggggagacccatgctctcctgtaggactctgcatgagcctgggaaggtagctcacacctgtgctccctgcctctaggtctatccctgggggccacagccaggccctgagaacagaagggccatgcagacagcctgtgtggcagggccctgctctgccatgtgcccacctcaggaggctccgggagggaacggactcgggtcctgcagagcggggctgaggcactcgcctccacctttggttgagtccactgtccttgtcccagggagctaaggcaaatcgcgcagcccccgaggagtcccgcaccgggtggctgtggcttctgggcttccgcagccccaggcctggagcccacctgcccggctgcccccaccgcaggcgctcaggctcaatgggtggagtgtgggcctggctgtgcgggagagcagggcaggattgcccaggaactgcactgcgtctgtccacagtgaagggaggggtggtgggcctaagtacccccaagccaccccttggtgcccctactgcctctgctccccgctcagaccctcccccgggatctgagtgctggaaggggccctggagatggtgcactgcccccagctcagtgagggccaggctccccagaggaagcgctttccctccaccgaggctcagggcccctgcggcgctccccgtgccaagccaccctctccagagactccgggtgtcttccctcccctcaccccccgcccggctcctcccacgcgtgtcctgagaactgcctgaggagggaccctctgcaaatgcactggggtgaactctggccctgggagtgccgaggcgaggtcaccgcaggccagaggccccttcggtggcgtgatgtcctttctccgcccgcagcccacaaacacaagaagcaggacccgctgcagccctgcgacacggagtaccccgtgttcgtgtaccagccggccatccgggaggccaacgggatcgtggagtgcgggccctgccagaagtaagaccgcagggcggcgccgcccgtcccgccacactcctcccgccctcggcaaggcggaagtgcgggcagggccccggaacccccgggaaacggctccacagccgggaggaggggatgcgtctaagtgcagagcccacgctcccggggtcttcccccgccgtcctcagtggaggagacacgcaggaggcggacggtctgaggcgggcaggacggctggggaccgggacagccgggatggggagaggtggtcccgaggcctgaccctgtgtgtcgagcccaccccgccgaggccgcagccgtgaccccacggcgtctctgggcgagtgggcccttcggcgggtctcccccagccctgctcaggcggtgcccagggcggtgccagtgcccgcgcctgagctgcgtggggagaacttggaaggcagagggagtgtgagaagagaaggccggaagtgtgcgatgtcctcgggtcgctgggagccccgcgggcagcctctgtcaggcttcctgctgtgtggaagccgctagttataacccgccctggccccggggaggcagggaggccgcgcggaagggtctctcctgctgaccccccgcacccaagcccgggaggacccccacgctgggaatgcggcggcctcctcgagggtcgcctcagccagacgtgccgctcgccaggcggtccctagacccccgggcccgtggcacaccatttaacagtgcggcacctgcggcgctggcatcggggctcccttctcccccactccctgcgcgtcgtgctgcgcgggtttcaccccgggttctgtgcagcgttgagggctggggttagcgttccctgtgcacttgtcgcaaaggctcggtgcgaggatagagccagcgggctccggagtg

SEQ ID NO: 5956 - DNA, 6000 bp, Homo sapiens
ctctctatcatattatgtattttgggggtttgaatcatacagaaatgcagatattttacattcatgcttttgtaaatagcattctgattttaatattccctttaataacttttgttactgtaaatagaaatacaactgatgtctgcattttcacttattttacatatttaaatctatcatttcaaacagatttttctggattttctatataaacagcaattttattttcttttctttttctttttttttctttttttattattattatactttaagttttagggtacatgtgcacaatgtgcaggtttgttacatatgtatacatgtgccatgttggtgtgctgcacccattaactcgtcatttagcattaggtatatctcctaatgctatccctcccccctccccccaccccacaacagtcccctgtgtgtgatgttcccctgcctgtgtcctgcaaataatcacacttttattttttctatccatgtgccacaacttattttttcttcatttattttctctggctagtactttatatccagagttgaatagaaggtacaatcaaattttacatgtatcatatgtatcattttctggttttggcaaaaaataattcaacatattattcatatttacaaagtttggtgtttttttcatcatatctttcttatattgaagtggttttataatattccttttttcaatagatgttatcaattgtaacatttttattttttattacttagaatgatatatgttttctttatacaacattttataaaataattttatttttgtcaaatgttaaactaggctttgtttccgaaacaaatccatgctgatcattgtatattgccccttataaaatatcagtgcacatactactatatctagggtaagatatgtttcttcatctatgttcacaaggatatttgaccacgtttttatttgtagctatgtacttgaaaaagttttggtctcaaggctatcttgggaagattttctgtttctctataacctggaagcatttgttaagagtactgctttagccataaaaaaggatgagttcatgtcctctgcagggacatggatgaagctggaaaccatcattctcagcaaactatcacaaggacagaaaaccaaacaccgcatgttctcactcataggtgggaattgaacaatgagaacacatggacacagggaggagaacatcacacaccggggcctgtcggggggtggggggttgggggagggatagcattaggagaaatacctaatgtaaatgatgagttgatgggtgcagcacaccaacatggcacatctatgcctatgtaacaaacctgcacgttgtgcacatataccctagaacttaaaatataataataataataaagagtaccgctttatttttaaatgttatcattcactagttatgccatctgagtttgcaggctatttttgtagaaaagtttatggctaaactgaatttcttcaatacatgtagggtttactcagatttctatttgaggtactatattttggtaatgagcatttcccaggaattttctatttcatatggacattaaaatgcattgataatatagttttattgcctgtttaataactgtaaagaccataatggtattgccatgtttaaactgggaataaaatatctgtgccttttcaaaatcttcccttagtagtcctttgtgaccattcatcttgataatttctttggcccatatgttattttgacatatattactgaattaaaaaccatataaggttctcagatttttgtttattgacttctgttgtaggtaaaatatagttagaacattttctattaaactggaaatgttcttcatccctttataaatgtggctcatgtggtgaggtactggttttaaatgttatttatttttattaattaatgttaaatttgaatagctacatttcaactgtctcctagccaagcttggctagcggtactacattgaaattgagtatccgtgtgagtatatgtgtgtgaatgcattcatatgagtgatggttacttgtctagtttaaatctttctataggctcactggcctgtcttgtattaagcatcaagagaagagtctttaaaaatcccatttatgattgtttacttgttcactttattcaactatatgttgaacttgtatcattaggtatatgcaatgataaaaaatatattactaatggtttggaaaattaatttatcattatgaagtatatttccccaatttcagtaaatttcatctcggctcactgcagcctcgacctcacctccaaggctcaagcgatcctcccacctcagcaaccagagtagctggctacaggccaataccatcatgctggctaattttcgtatttttttgtagagacggggtttcatcatgttgaccaggctggtcttgaactcctgagctcaagaaatcaacacatcttggcctcccaagttgctgggattactgacacaagccaccgcccctgagtgctcatgtaccatttagcttgtgttttaaaaatctactttttctgccctccctatttttaactagatgatgttttaaaaattacttttccctctctatatagtttgatttaagcattagtcatttacaacaaatattaatattaaaatgcagaccgttatgattggaaaataaatcaatgaacaatataatgagtggtttttatatatttcaatctctggcgtggtgatatagtacaatattttttaattatttattcttcccagagacatatatttcaatgagagttatctgattaatttatttttaaaaaactgaatgagagaattttaagaactatcaagaaagtaagttgggaatttaactttgagaattgatgtcaattacaatgaagtggaaatgtattttctcagaataattagtgacaaatacattaaattcctattggtaagattattattttaaaaatttatcgtcatattagcagtgatattataggggtatatgataaagaagtacgtaatcccaagttttagccaccctgtgtaaatgtagaagttaaacatgtaagagactctgaaaaaggtataagattttagtgtttgtgattgagatggaaacaactgcatgggtagtagtctttgttctccccaaatcttgtttactataaaaataatttctaaaagtcacttgaaaatggacaaactaaatgacaccctagcagctcagtctcttatattctgaggtgtatgatgagataaactgattcaaaatggccctagtgtgaaaacttcctgttcaaatccgaagtgatacattgatgaggaatctgctttttgcactcttgcctcactctgagctttcacagggcagtctgtgaagatcagagatatctgttttttgttttttgtttttttctgagacagagtctcgctctgtcgcccaggctggagtgcagtggctcccgatctcagctcactgcaagctacgcctcccgggttcaaccgttctcctgcctcagcctcccaagcagctacaggcgcccgccaccacacccggctaagtttttgtatttttagtagagacggggtttcaccggatcacagatgtcttttgtgtcgttaagaggtaacctgacctctccactaaggggcgtgtgactttctgatgacagaaggtatgtgttgctagtctcctgtttctctactagctcatctcctttagtagaaaattgtaaatattaaatgtgatgcaacaaggtaaagttaatacagaataaaatcaaagtagaactgtctgtacatgaataattcagggtgaaaagcaacccaaaatataatatatgtttgaggatttcttaaagtatttacattattgcctgtggagaattagtcaagcacatgcatacatcataataggtttgttaatcaatataatttagagtgaaaccgataaatatcacgacaatgaagaattaatttgaaattttataatcattatagatgtaataatactttatatttagcccagactttaaaaatgcatttttaatggatacatcaaattgtgaatgtcaaacataatttctcatacacatacttatatttaattgaagcagattttatttttttaagaatgtaataatgaagtagtttccataaaatgcaaatctaaacttaattataaataataggacgacctaaaaaaaattgagccaaacaaacattgcaaaaaagatgtactacactgacatgagactcctacctcattagttattttacacactcagtatgaattagaaataataaaatggcaattgtgttaaaaataattaaaatatctaatatgtattgaggactaatgtgtgccaggttgtatgttaagggttttatatacattatacttcataaattattttccccaatctagattagtaaactggtgttgtagacaccaagtaactttgtaaaggtcatgcattatgagtttcaaagctgtaattaattttaggtctcactggctacagagctcattgactagattattaaattatattttctgatttattacaattacttacacaaccaaagtgaccctcgctgccttttaaaacaaccacagggtctttctgaaagtttgaacttaaagtgttctttcatagatggtccaaacttatatttatcattttcagttttcctattttagtcattaaatcaattaccaatcaattctgtaaaataaagagttaaatctttttcagtagtatttagtttatgcataagttaatgtaatgttttacaaggtataaaatatttctttaaaattttaacaatttttctgttttcctcaatcattcagaataaaaaacatttgccaagacctcatgcccttttagtaaacgaatgtaagtcactaacttaatgtattttagtattaaaagttgttctatatgccaacaaattattcctccatctttagcgctcaatccttacattaatgaattttaaaattgtcatacaattagtgcattttattttcaaatttcaattttagttttttacacaggtattctattggtgataaaatatttctgtagaatctgattttaaattaataaagatatttatattcagttacttcttagttttcacaaatgtattgttttttattgttcccattaataatattatgtcaaatatagaaggccttttaaaaagtgacctattgtttaaagagatttcagtttaaaactttaggaaattagtaccagacttttatattggtcaacagcaaaatgaacattactactcagcctccaacacatgcagtttgcctataccagggatcctgtcaaaatatacaccacttatagcttcttaagtgcagttatcatagagcacagtccctgacatcacacagctgcagagatgaataaacaaagaggaacctactcagaagtgagtctggcccaggacccaaagaggcagcaaaggaaacttaagggcaataaaatctccatttcaggaaccaaacaggaaatattccaagtagaattaaaccttcaaaatgcttcttcggatcatcaagggaatgacaagacatatcactgcaaaggtaaaacattaaatagatcttcaatattattgttctaggatgtgcagttgaatgcagaaaggtggggaaagattagggaatattttgcacttgtgagaatcagaggtcaaagtcaggatctaatattctaatatgaaatctgaagcctgattttattcaggcattgttcaattgtaatttgtgattaacaactcatggagcattatatttactgataatgaaatggtatattctgagagaaagattactagagtagatgtagatttagaggacagagtttatcattatgttttcctgtgcacgtgagttctcttgtacgtaaaccttctcatcaactctctatctcccctctctcagtgcctctt

SEQ ID NO: 5957 - DNA, 6000 bp, Homo sapiens
gtaaaaaaaaaaaaaaaaaaaaaaaagatgctggcaaggttgtggagaaaagggaacacttatacaccatttatgagagtgcaaattagttcgacccttgtggaaagcagtatggtgattcctcaaaaagctaaaagaggaactaccattcaacccagccatcccattactgggtatatacccagaggaatataaatgattttacgttaatgacacatgtatgcaaatgttcactgcagcactatttatgatagcaaagacaaggaatcaacctaaatgcccatcaatgacagattggataaagaaaatgtggtacataaacatcatggaataatatgcagccataaaaaagaacaagattatatatttagtgggaatgttggtggagatcaaggctattatcctcagaaaactaacaggagcagaaaaccaaacactgcatgttctcacttataagtacaagttaaatgatgagaacatatgaacacaaggaaagaaacaacagacactggggcctacttgagagtggagagtggtgggaggagggagaggagcagaaaagataactattgggtactgggcttcatacttgggtgatgaaataatttgtaaataaacccccacgacatgagtttacctatgtaataaaccctcacatgtattctaaacctaaaactaaaagatgagaaaaagactgccaaaaggctaccagaactgataaatgatcttagtaaggtctcaggatatcaaatcaatgtatcaaaagcagtagcattcccatacactaataatctccaggctgagagtaaaatataaaacacaatcccatttatgatacacacaaagaaaatgaaatacataggaataaatacagcctaccagggaggtgaaagatctctacaaggagaactacaaaattctactgaaaaaaatcaaagataacacaaattaatggaaaaactttccaagctcatgtattggaaggatcaatattgttaaaatggccttactgcttaaggcaatttacagattcagtgcaattcctatcaaactaccaatgccattcttcacagaattagaaaaaaactattctaaaattcatatggaaccaaaaaagagcctgaatagctaaagcaattttaagcaaaaagaagaaagctggaggcattacactgtccaacttccaattttacaataagactacggtaatcagaacagcatggtatggtacaaagtagacatctatcctaatggaacagaatagaaaactcagaaataaagctgcacacttacagccatctgattttcaaaaagacagacaagaaaaaaaggaatataaatggactgcttatacaataaatgatgctatgaaatcgccttgttgtctagggtaatatctgaggtttgttgtcccatgaccacagaaaactaggacgtgaacacaccagagtgaggttaagacaggaagtttaatgggcaaaagaaagagaagagatctctgcccagggatgggtactggagaaatgggttgctgcttctgcagtgaaatgtagaaggttttatagatgagcttgagggggcagtgtctgatttacatagggcacgaaagattggtcggactaggcatgccatttgcatagcgcttaaagaagctggccactcaaccctagtcttttattatgcagatggttgtctacctggcctgtgccatgttgcctggttctttattagtgacaaagaaaagggaagatggagcctccaggttgaaaatgcctggcttccagtcagccccttttctattggcacagctgccagcatgcacacatgcaagtctccagcctgcttatctatgtctgctgcttcatttttcaggctgctctttgttagaaaagaagttatttggggctgctttttgttaaaagggaagccttgctgagaattcctttaccctcactatctgcctaaataatttctttctcgttcctgtatcactagtgtaactgtctagccatgtgcagaagagttaaaatggacccttacctttcaccatatagaagaattaactcaagataattaaaattttaaatgtgatacctcaatctgtaaaaattttagaagaacacctaggaaatacctttctcaacatcagccttggcaaacaattttttggctatgtccttaaaagcaagggcaataaaaacaaaaattgacaaatgagacctaaactaaaaagcttctgcacagcaaaataaactattaatgaaatatacagacaacctacagagtgggaaaaattatttgcaaactatgcatctgacaaaggtctaatatccagaatctataaggaatttaaacagaacaacaaggaaaaacaataacctcatttaaaaatgggcacaggacataaacagacactccttaaaagaagacatacaagtatccagcaagcatattaaaaaacacttatcatcactaatcaacagagaaatgcaaatcaaaaccacagtaagataccatcttacactagtcagaatgaccactatttaaaagtccaaaaacaacagatgctgatgaggctgcagaaaaaagaaaatgctaatacactattggtgggaatgtaaactagcctaaccgctgtggaaagtagtttggagatttctcataatacttcaaacagagctaccatttgaccctcaattgcactactgggaatataaccaaatgaaaatagatcattatatcaaaaagacgcatgcactcacatttttatcacagcactattcacaacagcaaagatatggaatcaacttatgtgctcatcagtggtggactggataaagaaaatgtggcatatatacaccatggactagtactcagccataaaaaagataaaaccatgtcctctacagcaacatggacagagctggaggccataatcctaagcaaattaatgcaggaacagaaaaccaactactgaaggttctcacttataagtgggagctaaacactgagcacccttagacgtaaatatgggaacaaaagacactgcagactactagaggggagaggagagcagggaagaatggttcagaaaactacctactttggattatactcactattctggtataatatacccatgtaacaaaccagcacatgtactccctgtatctaaaaataaaagttgaaagaaaaaaaattggaaaaattctcaaggacagttgactggccaaagattttttgagtaataccccacaatcacaggaaaccaaagcaaaaatggacaaacgagatcacattaagctaaaaaataaacaaaacccccccacgagattctcttatcttagacttttgacaatttgattatattatgcctcataatagtcttttctgggctgatcttgctcatgattcattgagcttcatgaatctggatttccatatccttcccaagtgaggaaggttttcagacagtatgtctttaaagaaaaaatatttttgactttttatgtctctcttctccttctgaagtttctatactttctataccatattcttggtggtgtctcaaaggtctcatgctttctttgccactttttattctttttttactctaatttgttaattttaaaagactctttttttgagttcactaattcctctgcatgattgagtcgggcattaaaactctctattgacttatttatttctttcattgtgttcttcagctccagaatttttgtttggttctttttaatagtttatatttctttattaaatttttattttgttcatgtattttttgttttagttgtattttttgtttactcttttcttttgcatctcactgagattttttaagatgattgttttgaattactttaaaggaaacttatagatctccatttatttggatcagttgctaaagctttattagtttcctttggtggtgtcatatttgtctgatgctttgttatttgtttatccttgtactgatgtctgtgcatttgaaagagcagactctctttcagtctttacagactggtttcggtaggttaaaagcttctcctgttagtgtcctgggctgatgagattgccttcagtatcatggttgaatggggttacagccagatcacatggttgcttacgggtccagagtgggatctttggttcatgatccttttactagggcttctagcaggcttgtatcctatttagtgcctcagagggccaaactggctctagaatcatactgtatagggctggggaggggatgagggtccacttcaaggtctgtaaatggtgggtctattattaggtgtgtagttggggaagagtttatctagtttgctgggaaggctgctcatgggtctctgagtgggttcctcaacctgtggcacagaggagttagtgctaagtcacaaggtttcctcggggtctatagctgaaaccagtgtcttcatgtctgtctctggggtcatggttgagtgtgttttctggcaggtctgtgggcaggcagatttgcctcagactgtagttgagttgggctggagctggatccagaattgtttcaagatctgaaataaaactaaggtctgtgcctgcaggggcactaatgatgtctctctccaggtccctgtatgggcaaactgctctctagcatagctgagaagtgtcgaagccccttttctgtccaattaaaggatctgctgtgaaacctaggtcaatggtctcctagttgggacatggatgcacatgtcctccctctgtatccctgagctggcaagactgctcacagtccacagctgagaagggtgaaggtcaagattcaaggctgtttcagaaactaccgtggaactgaagtcagcaagcctgtactgctgacaaagatgattgagtctcacagcaatttcctgtgattaactcaggtcacagttgagaggagtttgagtggagattcagggccattttagtatcttctgtaggacagaggtcagcaagcatgccccagaggtacagatgtatatgtctcccaggaagtctctgtgggtgaaggactgatctcaagttgtggctgacactagttaaagccaagttagagggctgtttcagggtctacattgagactacagttgatatgcctacctcctgagacactagtgtgtgagtctcctcctgggcccctgggcaaatggttttggcagcatgaccaaggcctaaatggggctgaaggcaagcacaggaggatgggtcccttttcaggtctggagatggaatcactgttggtaagtctgccacttggatgcaaatctattccctaaaacaaccttcctaggtcttgggttccactggcattttacaaactcctacttgaattccaaactccctcaaaggaacttttgtctgtggatggctgaaaaattattgttgctgtgggggcatatgtgtgggggaccacctattctgccaatttactgactttcctcctagtaagattttaaaattactttttccccatacatagtttgacttcagtttttgtcatttacaactaaatatttctatgaaagtcgacataatttgttatggcggaggatgaataaatgaagaatgtaatgaatagctatttaatatttcaatttctggtatgctaatatatttcaaaattgattaatattttacctatccaagatatttttatcaagggtaatctgaagattaaataatctatttttaaaaattaagtgcaaaaatttaagaactaagagaagttaataatataactttggcaatgatgctttttgtgccagctacaatcaattgagtaattactgcagtaatttttcagaataattaaggaaaaaatcagtagatatcagttgataatattactatgagttttagaatgttttctattataatggaagtgacataataaaataatataaagaaaagaagtatgcaatgttaagatttagcaacctagtctaaaaggcactc

SEQ ID NO: 5958 - DNA, 6000 bp, Homo sapiens
atgtatgtcagtgggaagtactggtgtgagactggggttgtggagaaggggaaagcaaggtatttctgcctctcacagcttcctgcatgtcagcccttcccttttctgatatagcctttggagtgggagtgactttccactgctgtaaatctctgagttgcccacaatcccacaattttttttagctcttcttatatcattataactagttttccatataatatccctctattaaattatctattatgagttctattttcctatcaggaccttgacaaagatagagactgtcttcattttgtagaaatattaagtaacttgtacaaaaacacacggctagtttaaaaacaggctttcaaaccagttgtacctaatttcaaagcccaagtatttgaactactatgctgcaatcaagtgatcgttcaaatgaatacccaaatgaatagttttcattaatcacctctttctattacttagctcaaattgtctgcattatggcactaactagctatcatcatcacttaactatctatctctcccaattgtttataaggtcacttgagagcaggcacattttattcatctttgtatccccagtacctactactgtgcttggaatgtagtggattcttaataaatatttgtagaataaatgagtagtaatcactgtcattgacagagtgactattttatttcagcagccctgcaaggagtcttatgtaaattttataactcaatcttcatgacaatcttgcaaagtagtcataaatatttcaatatcagagatgaggaataggctcaaagagtttaaacagctcacaattaatctgctattaatgctaggctaagtggattacaaggtctgctattttgactatgtctagctgcctccctacataaatttatgtgaaaaatacataaataaatgtgttggaaaaaactcaaatcattttattgaattttcaggtttttttttgagccttataaacagataaagtcttgtctctatgagaaaaaggagcagctcagtgtttacatgccatatattggcacgtaatggaaatacatatgtttgtacttacctagtctacgcagataaaaggaaaataagaattgggataataatctgaagaaatgacatagttgatattgctgccaaactaaaatcagagctggacagtaaagtggtaaaagatttcattaagggactactgcgataggagaaaagagacctcagtgtagtactgggctcaattccgaatatagcttggacagatggagatttttagccaagcagcagggtgggggccaggggatggaaaattactaagaggaaacatcgggagtaaggagggattgtggctaaaccaatgtgacaggatttttactgactgaaggccaggatgatcagatatcgcctggggggttccgggggatgtagaatttgatcaactatcaagatgatcagatatcaagagtgagggattctctccaaacagacttagcaagattctcactacaattaggcagtagagggttggacaccaagactgaggcctagagcacatagaggagtcagaactagacttaggtaaaggagttcatcctgttatcaagtgtggaaaatgctggttagccacatgattatctactcattctctagaattacttggtatggtgtgtgacattgatgatatttacaaccaattcccctaaacacagaattcaggtttcaactttacttttctgttgcttggtctattatctagagttagtacattatctaaagtgatagggtaggtatttttactgatggattgttgatgaaagtgtttacttgtgtttttgtgagttccagtctttgctttgcatggtgaaatcacatgtatggataacattttatggctcagttaagtttctgccatagtttttccaagcaatacattcttagtacctcctctgaatctagaaagtaaaataatacttatatttataagactgaattgcagaatttattattttattctttagtttctggtgaaaatgaaccaatagaagtaaaataatttggtagacaaaatacaaaaagccattgttgattctacatgtaattcattggcacatacttgcttggattagtattggttgaaattgtttcagctggataccacccaagaggctgttcttgtctcacagagctaggagccatttcaagatcctggaaataagtgattttcataagatttttgctagtgtaaattttttttttccctagggaaaggatgatctcctaagtcttcttcatgtatgtactactagctttgctgtaaagtaaggcctttatttcattaatttgagagtagagaataatgtaaaattaaacacaagcattttttcccagttgatttctaacaatcacaaactatattaatttgtttaatactgcaagagcacaaacaagatttgttttatatttgtttcataaaactttgtattattgttttataaaactttgtattatcttgtgattgagacacatcattaggggctggaagccaacaggtgtcaaaagccccagtgttgctgttcaatggatatagaattacagtcatgcaagatgaacaagttccagagatctactacataacaatgtgtatatagttaacaattctgtactgtgcacttaaaaatgtaagagagtagagttcctcttatttgtgtgttttttaaaatcccaatcaaacagaaaaacaacacaacacagagctatgaccagcaggcatggaagaaatccaacgtttgtgtgagaaagcatactgaagcattacctgttcccatttgaatgctgagaaagagttagggaaataacatgattctccacttaataaaacttcagcatgtctttttcattagaagtgatgattgacagggatttgttggtgacactgtgtggtcctgggagcagaagtcactgtgtaaacaacactgtgctaacaaaagaggactgttcacatggctggcactagcacagcctcgagaagatgaaaagacggcacacggaatttcctgatttggggccaagatggacaacaatgactatgatattaaccgttggattttatggatttttattgaataaatggaatagattttgttaatttgtttattttcctccatgaagatgtttgaaatgtatctgaaaatataaaatattttcatcatataagttggaaaactagggaaagtttagggttaatttaatcccatgtaattcttttcaagtgcttagccttaaatattacctcttacttcagttaagataatagttttttaaccccttttttcaatatgttaaaacattttgaagcaaatcttccagacatagtgaaaaaacctgctctagatggttacttagtgtcacaattcatggagggaactatatagaattcccctatatggtgattttctgtggcactacctccagcttttatgccctctggctatatatgaaaaaatagacatttaatatagtaatgtttttagccacaaagaagagtgaaggcaattttgacgtgggagaagaataagttctctcccttagtgtttgatacggtgactatattgggctaagataatggttaggagagagagaagagaaaaggggagagagattgggttctaaatgcacgagaagaaagaaatgagggcagttcagaacaataacctgtgaattttttcaccacttacataccaagcaaattgcatttccttctacactgtctggttctattccaatgtgttttatttaaaagttttatctttcccaatgaaagtttaagttccttggaatctgggtccaagtatcttccacagaaacatacttctctcgctagtttatactctctgtaggcacgtacttggctttcttgctcactgctgaatgctggtgcgtagcaccatgactggcacagagtagatgttcaataagtatttgttgtatctgtgagagaatgtgttaaaataacaaaactcaaacataatagtgcagcgactatgccttgatgtgtgtgtgtttgggattcagcacatttgtagaggtaaagcagttggttttttaaaaaattagtgccattcaggatcacttgttaaatggatattgtttaaaggacttaattaattaatgctggggatactgttaagaaatcattctagaaactagaataaatattgccaaagtgaaacactttggttttgatacaaattattgccttagtttcaagatgtaaaacaaacaaaatctttgatgggattagtagaatttatttgagtttaattcaactttttgttttacatataaaaatgtgtgcctgtatgttatacatctgtacatatatttccacatatatctatacctattacgtatagctacatatagatacccatttatatgtttaatctcctaagtcttacatcttagtttgcaatcgtgggattattttccagatcatagaattgtttgttatttttactaggttgttttcatgattaaaattccgtgtctccccaggtttccatgtatcagcagtgccccagaaagtgtttcccttcctgagactctagggaagccttggaatgcaaataacttgaaaagagagcctggccaaaaaaagatttttgagccttggtagggttagtgaagcaggtttttagtacaaacacaactcaaagtatgtgtgttattaaaagtagctattttcatggaagtcttttggtactatttgttttggctagagaagtgaaaagctttcttttaaccatgtgaccattattttgcaagatcataacaaacaattctaatatctttaatctcactaaagagtcactaaagttatttgatgtaccttttgaaatagaaaaccaacaactaaatcttctctaacaccatgattttctaatctgtattaaagcgttccaggtatttttgtaatgcaatggatttcaattatgttgttcattttcagcacttacttcaaaagaatgatgctttacaattttgtagttaatttaacatatttttttgtttgcttgaaagggtagaagtaagacatatcaagatttaaaacataaatagcttggaacaccctgaagagcaacatgggagaaactgagaaaagaattgaaacccatagaataagatgtctttccaagttgaaggtatggaatttttgtatgtggatatatgtgcatgtacactagtttttaaaatacgacagtcctggtaaaattgctcctatctgcatgaagtgatctaatattaatgccatattgcctgttctattgataatttcttgctttaaagaagttggttttataactgagggtgtgtctacacaggattattgattcaggcaagttagtcctaaatggctttgagagacttaaatggaagacaggatcctaaaaatttccaggcacacatactgtggcaggatttatttttctggatcaaaggccatgctcactcttgcagggtttctaacccagagaaatgtgggagtcactctccgaaaatggctcattgcacagaaatgctttgttgatttgtatgcaattacccagcaaaacaaatgttttctttaagctttggcaacataacaataatttcctgtaagaaaaatggccattttgtcagctgttctgatttttttttctatttcagagaaaattctgttttctagcttcaaagtcatttatattcaaacaaatttgaatttatgataaaccaagggatctggacatttgtcctgattctatagctagtgcctgcaagtggtttcaaaactaagacactgtcactcattttctccctatcagaagtttgttttccatttatatgtgtgttggggaaatttaaacatgtatacaaaattggagaattatgatataaatctaaaaaaaatagacttgcctgaaatggtatgttaattaagaaaaactttt

SEQ ID NO: 5959 - DNA, 6000 bp, Homo sapiens
agcttttcagtagtgaaatttaagagtgtatcaaaccacagatggacaggtgttgagagggttgcagagcctaaggtcagaacctaaagttttttattcaattaagctgaatgctagtttaattatctgttcatgaaaagtaacaaacatttcctgggttgggggaaggagtatttcagaatagttgggagtaagggttagggtgggcaaagatggcagtgtgtcttcagtagtagataacaaccctgaacaaggtcaatgaacggacctggtcctatattctcccacacaacttgggctgtggactccagacagcacagctgtaaacacctatctggtattagtgtcataatcagctattgagtctttagagacccaggaaatactagaactggtggagcttctgggagcatctagttagagagggaggtgcctgggggctgccttggaacaacaggggtgaggagagttgtgggagagtgtcaggaggaagccagtccagaacttcaacaaagcagtgacacttctgtttctatatcgagatgtttatttcattttatttatttatgttttggagacagggtatcactctgtcacctaggctggagtgtagtggcatgatctcactacaacatctgcctcctgggttcaagcaattctcttgcctcagcctcccaagtagctgggactacaggcgcccgccaccatgcccagctaatttttgtatttttagtagagatggggtttcatcatgctggccaggctggtcttgaactcctgacctcaagtgatccacccgccttggcctcccaaagtgccgggattataggtgtgggccactacgcttggccgagattttttgttttagttggaaagtggattgtgttctctcctcaaaagttctaaacattgacctaatccaaactccagcatttttagagatgaaaaacacaacaccttagagaagtgattcctcccattgtcacatagtaattgacagataatagacatttaagtctcctaacttcaaacccagtgcatcagggtactgtgaagggagagtttacctccctcacaaaggaaggagggtcagggaggggatgggtgcctaggattattggagtagtaaatctaaagagggattgggtgtagaaaacgttaaagaaccagtgctctctaatcacattgctttaaatataatcaaaggggaaagagtaattggagaccttgggaaactgcaacctattataaaactttataatgcctgttagccctaagaagagcttggtatctgccttggggcccttccctggggatgccacagacccaggtaatggtaactagaatttgcaaatgttcaatgacccaccagggtataatgaccaatcggggatacaacagaaatgtttaaaattgacaagaaagtaacacatttggcataaactttcagcagtaacaaatttggaaagaaacaaaatatcattacagtgattcctttggatattagtttcttcatctgggtaagatgtaggatcccaagggttttgtgaactctacatttgtatgattgattttgtgattcttttagatacctatctacatagtcagaacaaccaaactgctgttctggaatatgctcgcattgaaaactagaactgccaccctatttaatactacatctgccaactgcccctcaaatttaggttagatgtcatttgtgattatcagagcctttgatctctcatttctattaagaaacctgaaagacatctaatcatttaaatacattcttcctagattgctggaacttacagtagttataaatcctttcaaatgtctgataccaagagcaactaactcttacccttaaaactaaaaaggaggtctttttagaagggaaaaaatgaaggcaaggagcagaaaagacctcagggtcactatatacacaacatggaagaaccagggattagcgccaaagttggctttgtactgtgtcctttatctctttctaccagacccaacgcagctggctgacatttgacaaacaaaatgctgcctctttatttctctgcctttggcatatttctgattttctattatcctctcctccattaggacattgtagttcagcttgactttagattagaaacagacttgtacaggtatagtatacttatgagggcctgagaagaataatgtctgagaatcattcattcacttaactcatgtttattaaatttgtctgctatgtgccaggcatcattctaggtgctgagaatacagtagtgagtccccaaagtccccagcttctaggaaaggagaaagacaacgaacgataaacaaatagacatgtaaatacctggcaatgctaagtgctttgcagacaaatattgcaaatggagggagggtgatattttagttagggagttgaagccttctctgtagagatgaccttagagcaaagaccaggatggagcgagggaaccaagccctgtgaatttttgggcttcctttctcaactggcccctaaagtgtgatctgcaagcatgaatattccacctggctgaaacaaaaggatgctggttgggggccttgctctccattctgcataagttcacccttgacaataacaacccctttcagaccagactaaagtctgtttcattgagattgaacctttgtaggaagcttgcaactgtctccacactgcttcatcactaaaaacgcttacaatgggtaataaaccatgacagtacctgttgaaaatataacaaaacgtatttacaagtaactgcgttagaggaagcacatttacaatggctgacatttaatagtgataagtgctgctatagtttgtagttggaagtattttgttgcctaatgtagctgtcctttaaaagctattccaaaaagggtctgcctggcttaatgtattcacctgctgatactccctttatcataatcatatgatatttcagagtttgatttaaatcaataattgattgcgcatttctcctataggtaggtagctgaaatcttccctgaggaagcccaaacagagtgaagtaggaaaaaggaaatctgacctaggtattcatggttaattttacagatccacagaggaaaatggtaacctttgaagtcttcccacaaatccctaaactaggcctaaggccagaagagttctatatcagaacgttttgggaatcgtcttcaaaaccggaatccatttggccaataaagagtctatttgaattacaaattgtgttgtccgaatcagtgtttccaaactagtctaccagcagagccacaacttttctgtttctgccactttaagagagtaacaaaaaaaaaaaaaaaaaaaaaaaaaaaaaacttctcagctgccttactttgtagctgagataacagaatttggccacagagtgatttacttgactgatctatttatggcaacttgtttatgtatttttaaatcacagttacaatgagctattgttcacgtgtatactgtagaaccacataggttgcaaatcaatcccaaggaatcctgatggtacaggattattttttagcttaaaaaaaaaaagataccaaaggaactggtgaccactttaaattgcttttatttactgatattttacaaattgatgaagctcttaaatattgcattttccccttcattctcttggtatttctatcaccttgtgataaggaggctatagtggaaactaaaatttgtagttcagaagagattagacctctactgatgagtactaatctatcattttttttctgggcttgctttgaggatatgttttgcttctcttgaccctttctgtagacaactgaagccaaactccactttctctcagtgtacctacaaatagctcagaaacaagattagcttcagtatgggacacttccttgtgtttgaataatgatattcacttaacctatttgtaaaaactctcagtagtgtacttgagttagtacatcgcgtgacctggctccttttctttgctgttatttactgataaaaataaatctcctgcgctaagcagtaggaatcactccgaaatgcagggaaagtcctaagagaattcatatgctaatgagcccttctaagtgagaacttgcttaaatgtgccatttgctgacatcattgttatgggcagagtggagatgatttctttaagaggtggcctttcatattctcccagcgtttcgtggcccgcgcgtgcacctgcgggagggggaagtttacataagcgtcctagggtatttgcatcttagcggcttcactcactgggctcgggagaatggagcgggcgggcggcggtaggtgctcgagccgctaggctggccaagggggtgggtaacttttcgaggaattgtgcgcgcgggacctcgtggagatcggccaggggcacggtcagcagtgacagttcctggaaagcgggcggcggcgggagcaggctgggcaggcgccgcccgcgggcgggagcggggagctgggtccggctgggatcgaagggcgggatcggcaggaaacgaaatggttactttttttttttttttttttttttttttttttttttttactgcgggctctgattacttttgaagatcgccggccccaggcgggctcccggcgctgagcggagacgagtttttctccccgcagaggaggatcctggaaggacgcggagctggggcttgggggatgcagtggcctggacgaggtgactccaacccgggggagcagagtccgtcacgccggcagggaccgagggtctctgcggagctggaggaccttttgtgggatgcctcacggctgctgaggggctgcagcgggtgaggatcgccgcgctgcgccgccagggagctcggcggggaccggccgggggggaaagtgcgtcacggcggggcgggggcgacccctcgcccgccaggcggggccagcaccgggacgcgacccgggggcgcggtccgctgcaatgtagtggggacccggtgcttgctgccccaccctgctggggtctcctccggaaatgagtgggtgcgggtgactcgtagggcacccagccctctgttccttcgggagtcctccgctcccgctccgggccgccagcctccttcagacgcagagcgggcgggcggctagtgcgcgccgagggctcaggggccggcgccgcgaggggctgcaggccgcgctcggccgctgtccgggccgcaggtgggagccgctgtctgggtcccagggctggatggcagccggcggcggggactgaacgcgggagggctgcagggtgcgcgccggcgaggggcttctcgttggaagctgagggacagacgtggggacccgtggctgctcggccccaccgtccagccgcagggcgagtgctgctccgtggaggtgacacggcgccaagagcggcgcgaggctttctgctggaggagggtaacggggaattcgaaggcgactgttctatgctggaggacaaggggcactgttctctcggggcttcgcgtcggcgccgaggaggggttcgctcgctgcctctgcgtcctgagctcggcctctggctcctggggccggggacgcagagaggggctggagccggtcgacccacggcccagggcgccccctcgcggcctaagcagcggccgccgcctggagcgcagagtttgcggggcccagggggcgccgacgcccgctctgaggcgtctctgctgctgcggcggcggggatggggacgacccaggggaccccctgcagccatcactggcagccccatcaagaattggccggctgagttttcccaaagtacggtgacatcctttccttctcgcttcctccagccccatttttaaaagctcggcctttcccgttagtctgtgtccttataagccaggctatgtgtggaatttgtttttacaactcgagtcttgtgacttctcaaacactttcttgaagtgttttctctggaaacttgt

SEQ ID NO: 5960 - DNA, 6000 bp, Homo sapiens
ataaaaccaccagatctcatgagatttattcactatcacaagcacagcatgggaaagacccgcccccaggattcaattacctcctaccaggtaactcccatgacacgtgggaattatgggagctaaaattcaagatgagatttgggtagggacacagccaaaccatatcatcatctgtccacctatggccttcatcagcccttcaggtaacttagtttttgacacctgtttcctatttcacttaatcaaatctattttgcttttgtatgttttttttccactttttcaaacagaaatgtttgcttgccagtgataagctaagttggtaggtaatgaataacaaaatgacctggatattttctaaggcctttattcccccttggttgtaatcttagtttgagagaagccataaggatacccagttatttgtagaatggatacatacacttgaggtgaccatgaagtcaaagaatgggacatagaggactactctgcttagctagttttttttttttcctattttcccatccttgcagaatcagattcataaaattttagaaagattctcacagttcagccatggttgtgacaaactctgaataccagaggacacaaagggagaggaaaaactgttctattttttttccccaggtacatgtggaaaaattttgctgcactgaaaataacccttgcctttctcttgctccaggctgcccttttcttgggcctgggggtgttgttctccttggtcagcattcccttggtcatctatgactgggcctgctcatcgagtagtgacgaaggccactgaaacccgccgagaaaaagaaacatccctgttgtctgctcagtcaagtccccacacatcagcaatctctcaccacttcttttgcaagtttacagaagcaaacagaaatgtacaggatacttaaaatggaataactttttggttgcaaaacagagacatggttctataatgcttcatgtccctccaagatttgagatcaatttagggattgtgaaatttttttttcaaatttcatacaatcatatttcccagtacttttcacaatcattttttacccatctaactctatgttttgtggcttcccggtctcttagaactttgaaaacatgatatacaataatgtttatttattatacatccagattctgaaataattttcctactgatgttcagctcacactatctgtacctttttagaagagaaaagaatcttgaattgtatatatttattttgctttacagaaaaaaatggtttcgtaaataatttgcctattttggttaacatagcacatggagataatcatctgaaagttatagggcactgccactgctgaatcagagcatgcccaatatttgaggtggctctgatttcctggcagctgaactcgggtagtccagtggcctagctggtaccacatctattcccatccagagacattctctggcaagtgttctcagctgaaaagtggttggggatgattcttaccttggtaattaaatgaagctacacatttgggtaatctagcaaatgaagtattttttccctcttggcaacttgtgtcagagttactctggtctgagtcaactttcgctggggaaaacctatggaacctactgcaaaaagattgtccaaaatgcctaagaaaatactcctctgatgcatttagccttcaaccctacctgtcttgctgaagggagaaaaatgttttagtacattataggcccagcagcttttattcatgtccaccagctagttgcacagagaatcatgtgtacctaactaaggatgatctaggataagtaactcctgttttatattgagtattttagggaagtctttaaaagacttgttttatatctataaatctaggttattacaaatacaagaattttgtaccttaaataagcctcatttctatttcttcttcattaattctccatctagtcttgtgaaaaaaaaaaaaaaaaaaccctcagagatagtctttgtgaagagcttctgacagaatcactgagtaccttccttcccccagatgaggaagacaagggggtctcagtgtctgtgctgtctcctcttctcttccccaaccaaggactgtgccattactgcccgtctcaactgtccatgcaggaggacagagttgcctggtactcttacccttgtccctctcctaaagggagcacaaggaaactgaagagactgaaaaagaagagagtttgtagctgaaaaagaatagggatagcaaggaaacccagaactgcattcccctaagtggggccatcccatgtgattgaattgtccatagcttgcctatggtgagaaatgtgcatgctccgtgagctggtctcttgaaacaggacttatgcttcctctatattctggttaaattttccaaacacataagttcactgagcacagatttcttatccagagacaagtagaatctaaccgcagactgttggcagagtttccaggcacttagccatgttcccttcctgactcaaatccccaaaggccttcactctcactgagaatcacactactgtcccatagataaggcaggcattgaagcacctgtcgtgatcctctaggggggagaatgaaaggttatttcctgcattgcatcatcatagcttttaatataatgctacagaatcatatccacattaggttagagttcagatatttggatatgaatacctaacctagccatatccatggccatctctgttcttttcagcaatgttttccatattatattagcaatgacagaaacagaacaagccaagatccagtcagttcttgggagcttgtctagagcaccaagtaatgaaatagccaggtagtgggatgactgtacctttaaaaatacataatttagtttgcaagctatattatgctactttctattttccttgttactttatagcaattcattttaccctcacaaagtcaatttagaaccttatcattaactgggatgtgtagtgatatttttgggcctctgggtttcatgtgtcaatacaaggaatatttatttaaaatagatttatttagaggaggcacagtgttgttgatctgtgtgacaccacccatatttttaaaaacctttgtatgtttctctaaatttgttgttgactgaatataatagaccctaccataattcgtcaaatatcactgattagttacatcctttgtgtgagattagctgtaaagtatactgctcttattcttattcagaatagttaattggtagccaaaaatacatgtatcacagatgttaggtcgaatttaaacagcacagtcaagtgctatggaagtttttctgctaaattagtagattaaagaatactataccctaggcatggggagcagcacgttttcctttggtaggtaggatctctatactagtgaacagtgccagttccacactttggacttagaactgttctctagttattgtaacacagaatactgtcaatccctaatttacttaatgttacttattggaagtggggctgatgaaatacgcacaggagggaaatctactgtgtttaggcacaggcagccccagtgtataaggagatcatattccaaaaggttgtcagttggttgtttgcaacctggaatgtattttcctttagagaccaggttatccatggtggttaggcccctagagcagctggaaaagatgatcaaaccaataggttagctgacatcgaataatgtaataggtttgctaaagaatctaaccatcaaatataatattgtttccagggagggtgtttgttcagagttgcctgttagtagaatctggactgtccatcccagccacatcccacctactggacagtaggggtagagatgccaccagactacaggtgaccagattggcctgaaacatggtgtccagtaaaaacggggaggaataagtccatgactgctggagagcttggtggtaggaggagggtgaaggagggtgagggggcctctcatgggtcagaaacctccagggacatccctcagctggtaactctgctgttgtccggagggttcaggcttggtgtgccttcttctgtttgtctgacttttggctcctatggttcatctcctgccctgcccaccacagaaaaggatgctgctgcatagcttctccaatgtaccagtcattgaggccagcgcgcagcacttttaatgtttttagtgctagtaactgtgttttaactctccaggaataagctgggaggttagaaaacaagaaaaaagggggaaaaaaaaacctctccacccactttccttttttacagttacagaccctgttgagaaaaagaagcacccagatgggtgatggtgatagggcttgtggtggacacagggttgtggtaagattcctcagtgcttcggcgagcacctaagactattaccctggaactgactgctttctagagcttgattcatgcctctaagccagtggttctcaaagtgtggcccctagaccagtagcatcagcatcatcggggacctcattagaatgcagattctcagccccctcccagacatggtgaagtcagaagctctcagggagggactcagcaaatgattctaaagcgcatcaagtttgagaaccaccctaagccaatgagtctcccttttacttcccattagtcctccctcaccagatgattcctaggactcatggtgcaacatacaggagccaggctttagggaggggaggaaaggagcctggcggcaggggtctctgcaatggcaagaaagtgagtgaatccagcgctgccacctggttatccccttctcgttgaaaatagcagcgcaggtgcaaattcctaaacacaggctgcctgcactcggtgttacctcgggctgaggcatgataatattttattttttaaagctgtgaggaaatgaaagtgaggctttggttggggcgaggcagttgtgaaagaaattaaaataaaagaccctttgtaaatgcagacttagaagaaatactgaatttgtgtcagaagttctccagtgtttgtgttaatcgtgtggtgataatcctgtcctccttttaaagcgaattctctactgaaaggtctgctctgcttaaggagctacaaactgctctcaaaagaatgaaatactgagttccaattcagtgaggcacagtgttggactatggcacatttagttggagtcggggggaggtcaggaatatgatcagataatggattttataccttagagcaaaatctattagtctctctcagtttatcaatttaaatggctttaggcttatagggggtgtaaactttaagaatataattctcccattcaagtttacagcaaacatctagccaccttcaaaacaaagaatatacagaccatcatttagcaatactaatacatgattttccttggggatggcaggtttgagaatcctttagcaacaggacatacttcccctaaattacagtgaattatttataacgagataaagctttcaggtacaagctgaaggtggggtgtctaacaactaaaaactatcactaaatctcaaagagaaagttcttgcaaaatatgtaaagttcacaaggtgcagacattttccttctttaggcttttatctaaggaagggctatgaaactgggcccatctgtatacaggctcaaatttacgtttttaaaggaagaatctatgcagctgaggcttattgcaggaaatacttcatttgtatgtaaatattattgtaaataaataggaggctgtatatttttgaagttgttgatctgcactgaaatagaagtctctaggatctgcatataaacaataaatgtttcctagaaattagtggttttgtttgggaattagaaaaatttacattctctcccaggtaacatagttctctcaatgtaaacttggaacctgaaaccctacttaatttagagaaagaaatgtctgagaaata

SEQ ID NO: 5961 - DNA, 6000 bp, Homo sapiens
gtccgggagccagcggggaggggacttctggatccggggtagagggcggctgcgctggacagctcgggagggggcgagggccgggcggacggcggacggcggacggcgggcgggacggccaggacgcgcgggctcggaggaccgcgggacggccggccggccggccggagcccgcgggggcggcggggcgggggcccagggcaggcgcggagccgggccggcaggtgagcgcgctgagggctaggggaagtggccgctcgggctcccggtgcgccaggattggaacgcacccgagcggctctcgacaagagtttgtgggtgggggcgccgaagccttggacgggtcgtctcggcagtgttgcccgagggagttggggttggcaaagggaagtcatggaggcagtgggatcgaggactcctaggtccggcgctcgccacccccgtcgcccgccgcctgcctccctccacggggcgagttccaggctggcccggaggccaggaggatctggcacgtactgggggaggggctggcctgagttttttgctgcggggctgtggggtgtctccgagtttgggggagattccatttaggggagaggaaccggcctgggcagagggagggatgccctctgtctgcgggagtccctctccttcccctcacccaaaaccttgggaatgaaaggggtggggtcggctccccacatcccccaaggcctgccgcagggtgggcaggggagctgactttattcaaagcagactctggggctcgactgaaaggctagaggtggaatcaggcgtgggagcctctttgcccatatcctctccttaccagattacccctgtgagctggagggacctggtgggggttgcatagtaaagggtgatgtgggagccctctgtaatctttagggagagtgaggactggggatgggagaaggcggcagcgggcactggaccgacagatacaggccctgggtaggctcctctacatctggaaaggcccagaattgaagaattgaggcccatgtccgagtatggtgggtggtgctggcactgctgggccccgcctgggcagtgcctcttaccatgaactttctgaagtcgtttttaatcccctggagcctccttttgccaaggagggcaggggcagatgggccctggggatgggatagacaggaggtggccaggaaggcttggcaaggcagtgggcagagccatccttagggctgggccttggccttggctggttccaaactctggtctcagcctgatcagggtttgggagggacttgaggtctgggaggcactgagcctgggcctgccaggctgaatgggacatggctgtggctgtgggagccggtggtatgaagaacagcagatctgtgagagtgcaaatggaccaacactcaggggaggagaaggtagaggcacaaggcttaggagcctgactctggggaggagggaggtggtctgtgctcccagggctcatagtgatgggttgctggacaaagtgggttgggggaccatatagagaaattttgtggcttggaacagtgctctaccctgtttcctgccataccagtctggcatggggtgccagaaatgttgggaggccggcaagttctgcgggatgggcagtgcctggagtggagcccagggtgggatggttgcagttggttggacaattacatagctctgaagctatccccttggggggggtcagagtgttcctgggagggtcatgcattctcctggatagcatttgcccctttctctgtgagtatgagccagatgctaggatgtgtttccagggggcttggaacatggccagaaactagtcctttgggaacaggtccgggccagtgctggtgggggtggtgtgttgggggagataagaacagggaaggggactggtgaatggaggaggctgaagcaaaatgttgtgggtggtggatggtggtgggaaacctgctcactctgggctctgtctccagcagctctggggactgacagccaaggacacagggactgatagaaccaggcatctgactggctagaaagacgtgtgttcttgctcatgatttcctcatctttccatctcttgacgatgacagaggtttgggtttaaagtgttgtagagtgaggagaagaactaatatttttcaagtgtgtacttcttgacaggcattattagattctttcctgaggaccattatcatttccattttgcagatgaaggtactgacacagagaggttaaataacttgcccaaggcagtgtggctagcaaataatcacgctaaggtttggaaccctggtctcatgccaaagatcatgcttctaatgaagtattttgaagagcaaggctttctttggtgaccttttccaaatgccagcctgaccaaaagtcttgtattcctgatctgtccttccagatggtgctgttggtgatgttaagaggttgaaggggccaggcatggtggctcatgcctatactcccagcactttgggaggccgagacaggcagatcacctgaggttaggagttcgagaccagcctggccaacatggttaaaccctgtctgtactaaaaatacaaaatttagccgggtgtggtggtaggtgcttgtaatctcagctatggggaagccgaggcagaattgcttgaacccaggaggcagaggttgcagtgagctgagattgtgccactgcactccagcctaggtggggcagagtgagactccgtcttaaaccaaaaaacaaaaggaggttgaaggacgtgctgctctgtgggatataggagaaggggtgctgacagatcttggctgagggtgactcagggatgggaggtttggggtatgcagagaattccccagcctgccttctgcgtgtgggtccctgggtgtctgcttcaagcgctgcccatctggcttgagctctcattctatggccacctggggcaagtgctgagtattcctccatcctgtccccgagtgagtacaaatgtcagtgctgctagctcagcaggtttaattacaagggacccctcagggtactctgtgagcatagaggagtgtggccctggtggggacacaggcatgcatggatgacagtgctgtcagcctcatcttattctgacctgggctcagccaggagtcacattaaaggtatcatcatggagtcctcccacctcagttcatgacatttcctccaggaaatgtgggatctgggactgatttggttaccatgatctctataacttgggccagccatataaaactgccatggacctcagtttttgtttatatatatttttcctttcaaatttgtcttgtgccccagggggcaacaggaccagtttctcagggttttggtgaagatcagatggaattagggatgtgaaaagatcttgaacagtttaaagcatagagaaagtgcatggagtatcattcgtccatccatccagtcatccatctactcaatgaacatttattattattattttattttttgagatggagtttcgctcttattgcccaagctggagcgcaatggtgtgatctcagctcactgcaacctctgcctcctggatttaagtgattctctcacctcagcctcccgaatagctgggattacaggcatgcgccaccatgcctggctaattttgtgtttttagtagaaatggggtttcaccatgttggtccggctggtctcgaactcctgacctcaggtgatccactcacctcggcttcccaaagtgctgggattacaagtgtgggccaccatacctggcctcaatgaacacttgtttaggtccttctaagggttgtggatacagcagtgagcacagcaggtcaaaatccttgccttcataaggctgacattccagtcaggagagacagaaaatgaacacataagaaaaatatatagaatggcagttgctgattagagctatggagaaaaagcataaagctgggaaaaagatagagagctccaggaaagggggttgctattttaatagggtggtcagagggagcctcactgataaggggacatttgggatgtgacctggaggagctcttgttccagacagagggaacagcaggcactgaggtcccaggctggcctgtgcggggtgtgttgggaaacagcaaagaggttcttgtgactggggtgcagtgaggaagctgaagagccttaggattatcactgttagctggtggcagatcatgaggtcaggagatcgagaccatcctagctaacacagtgaaactccgtctctactaaaaaatagaaaaaatttccctgggcatggtggcaggcgcctgtagtcccagctatttgggaggctgaatggtgtgaacccgggaggcggagcttgcagtgagccaagatcgtgccactgcactccagcctgggtgacagagtgagactccgtctcaaaaaaaaaaaaaaaaaaaaaaaaactccagattttttcttctgcttctgttgagaaaaatcagatcgggacccactgggacccagtggcaacagtctacagctgctgggtggtgcctgccccatgcacagggtatgaactcttttcctcccagttctgaaccataagctgcttcactcattgacttgggcacttgagtttgtgaccaccaacaaacagtgccttttagggaaattttcaagtatactggctttggggtcagacaaatctggtttagaatcgtggttctctcacttatgtggctgctggatctttgggcaactctttcttcttttcttttctttgtattttattttattttattttattttatttccctcccttccctcccttccttccctctctccctccctccctccttttttccttccttccttttttttttttttttcaggctatggctattgcccaggctagagttcagtggtgcacaatcctggctcactgcagcctccaccaccagggcccaagcaatcctcctgccttagcctcctgaatggcccggtctataggtgcataccaccacaccaggctaatttttttttttttgagacggagtctcactctgtcacccaggctggagtgcaatggcgcgatctttgctcactgcaacctctgccacccgggttcaagcaattctcctgcctcagctcctgagtagctgggattacaggcgcccgccaccacgcccggctaatttttgtatttttagtagagacgaggtttcaccatcttggccaggctggtcttgaactcctgaccttgtgatctacctgccagggccttccaaagtgctgggattacggacgtgagccaccacgcctggcccaggctaattttttgaaattttaatagaggcagggtcttgctgtattgcccaggttgctctcacattcctagccttaagccatcctcctatctcggcctcacaaagtgctgggattacaggtgtaagccactgtgcctggttttgggcaagtttcttgtcctgactgtgtcttgggttctcacctgttgattggggatacccttgttgcctacctccaagtaattttatgaggatgaaactcatagcttgtcagtgggaagtgcttaggtaatgagctactagtggtggcagtggctgtgatggtggtattaataccactcctactggatggtctctaatactatctccttccttccctaccagcaacatgtcatggtttagtggcctcctggtccctaaagtggatgaacggaaaacagcctggggtgaacgcaatgggcagaagcgttcgcggcgccgtggcactcgggcaggtggcttctgcacgccccgctatatgagctgcctccgggatgcagagccacccagccccacccctgcgggcccccctcggtgcccctggcaggatgacgccttcatccggaggggcggcccaggcaagggcaaggagctggggctgcgggcagtggccctgggcttcgaggataccgaggtgacaacgacagcgggcgg

SEQ ID NO: 5962 - DNA, 6000 bp, Homo sapiens
gctgaaggcaataaatacctgccaattagacagctgtagacttctgattatctattgcagaagctttatcagagagttcaactgaacatccctaaaatgtttgttgagaagctgagtgaatctatatgaccttgacattttttataaggcaaataatacatgtatctggtaaaacttctttttatgtgcaaaaggtatacagtgtatattcagtgagaggttttcccttcacatgacctcatttgggctctcctactccttccttctctcagggatggcctttattaccagtttttggtgtgtcctttggagattgtacgtgtacgtgtgtgttttctcttttttctttttgctacatacatgatagcatgctgctcaacaaattggtcttttgacttgacaacatgtaatattttagagattgtatcctatctatacatgatagatcgtcttatttatagtggttgcatggtattctgtccaatgaatgtgcacagtttattcaaccagtcctctactaatatcaaggttgtttacagtcttttcatactacaaacaatgctgtgggaaatatccttgtacatatttccttgatgagtactttttgctttttttttttaaagaatacatttttaggagtaaaattgctagatcaaagaatatgtagacttttgaaattttagacagaaaataaaattttgttagcatttttatcttgtaaaacagtcttacaacactttttttttgagacagggtcttgctttgtcacccaggctggaatgcagtggcctgatcaacactcactgcagccttgacctcccagactcaggtgatcctcccaccttagcctcccgggactacagacgcccaccaccacacccaactaattttttttttttttttttttttttgagacagagttttgctcttgtcacccaggctggagtgcagtggcgcgatctcggcttattgcaacctccgcctcccaggttcaagcaattctcctgcctcagcctccccagtagctgggattacaggtgttcaccaccacacccggctaactttttttttttttttgagatggagtctccccctgccacccaggctggagtgcaatggtgcgatctcaacccactgcaacctctgcctctcaggttccagtgaatctcctgcctcagcctcctgagtagctgggattacaggcatgcgccactacactggctaattttttgtatcttaagtaaagatggggtctcaccatgttggccaggctggtctcaagctctcgacctcacgatctgcccgcctcagcctcccaaagtgctgggattacaggcgtgagccactgcacctagctttaatttttgtattattagtagagatggggtttcaccatattggccaggctggtctcgaactcctgacctcaggtgatctacctgcctcagcctccgaaagtgctgggattacaggtgtgagccaccgtgtccggcctccacctagctaatttttgtatattttgtagagatggggtttctctatgttgcccaggctggtcttgaactcctgggcttaagcaatctgcctgccttggcctcccgaagtgttaggattacaggcatgagccactacagccagccagtcttacaacttttgttagagaatgggataaaataggctgggcatggtggctcacgcctgtaatcccagcactttgggaggctgaggtgggcagatcacaaggtcaggagatcgagaccatcctggccaacacggtgaaaccccgtctttactaaaaatacaaaaattagccgggcatggtggcatgcgcctgtaatcccagctactagggaggctgaggcaggagaatgggataaaatagtcatattacatttaaccatgagtgccattttttttctgtcaattgctgttcgataggaagaaacttaatgggtttaagagaaggtgacactttatggttaggggtaagctggaatatcaaagcaatgttaatcataattgtgatggttacttatcaaagtattgctgggttgattctagttgtttgtgtcctaactctggatcttttccttaatgtgacgaagtaactgaaacaacctggtgctacagccctggagagcaaaactgtcttaatattaacttactgcttccatatgggtcataaattttcatggagacttgaatgctgtgcataactggcctggccctttctattcctccctagttttttttttttttaactatttaattatttattttttataagatggagtcttgctctgttgcccaggctggagtgcagtggcgcaatctcagctcactgcaacctccacctcccaggtttaagcgattctcccgcctcagcctcctgagtagctgggattacaggcatgcaccatgatgcctggctaattttgtatttttagtagaggcagggtttctccatgttggtcaggcttgtcttgaactcccgacctcaggtgatccgcctgcctcagcctcccaaagtgctgggattacaggtgtgagccactgcgcccggcccctccctagttttattaatttttttttttttaatgagacggagtcttgctctgttgcccaggctggagtgcagtggtgcaatattggctcaccgcaacctccacctcccgggttcaagcgattctcccgctttagcgttccgagtagctgggattacaggcatgcgccaccacgctggctaacttttgtatttttagtagagatggggtttcaccatgttggccaggctggtctcgaactcctgacctcaggtgatctgcctgcctcagcctcccgaagtgatgagattacaggcgtgagccaccacgcctgacctcttttattttattttattttattttgagacagagttttactctgtcgcccaggctggagttcagtggcatgatctcggctcactgcaacctctacctcctgggttcaaacgattctcctgcttctgccaccctagtagttggaattacaggcacctaccaccacgcctggctaatgtttgtatttttagtagagacggggtttcacccatgttggccaggctggtattgaatttctgacctcaggtgatccgcccacttcagcctcccaaagtggtgggattagagacgtgagccaccgcctccggccccaagttttattctgtaggcactgtaatgaaacatgtagtttgttgactaaaagctttgttgaaaaggctggagactggaatctagaatttgttttctttcttgaaataattcattcttgagatttcagatagaagacgaaactttttgtatttgaacggctctgtatgtacttggtataggaatgaacttagaatatcactaataattatttaaaattttatcatgaaatatttctgtctaaaaatatttgcagactacagtcctgggaagatcacgctattaccttaattgtttgcttttaaaatataacttaaaagcctattttggtgcttgcttcggcagcacgtatactaaattggaacaatcaagagaagattagcatggcctctctgcacaaggatgacacgcaaatttgtgaagtgttccatattaaaagaaaaatttttgtccaggggcagtggctcatgcctgtaatcccagcactttgggaggccgtggtgggtggatcacctgaggtcaggagtttcagaccagcctggccaacatggcaaaaccccatctctactaaaaatagaaaaattagctgggtgtggtggcacgtgcctgtaatcccagctactcgggaggctgaggtaggagaatcgcttgaacccgggaggcggaggttgcagtgagccaagatcgcaccactacactccagcctgagtgacggagtgagactccatctcaaaaaaaaataaaaacttttaaggcctgttttgcctattctggataaaaatcttcctcagatgtagacgagacatttctgtgtcttctttttcttcttttttagacaaggcctcgctgtgtcacccaggctggagtgcagtggtgcgatcatggctcaccgcagccttgaccccagggctcaagcagttctcctagttcagtctcccaagtagctggcaccacagacatgcactaccacgcccaggtgattttccagtgccttaaacagtgcccagctgattttccagtgccttaatgatattaatcatcattacaaaagtgatttacagcctggccaacatgatgaaaccctgtctgtactgaaaaaaaaaaatacaaaaattagccgggctcggtggtgggcgcctgtaatcctagctacttcggaggctgaggcaggagaatcacttgaacctaggaagcagaggttgtagcgagctgagatcatgccattgcactccagcctaggtgacaagagtgaaactctgtctcaaaaaaaaaaaaaaaaaagcaatttaattcattcagctcattttgatcagggccacaattggaaacttgagttattatacttgcagtaatattctcagaactgattgacgcataaggaaggactgtttgcctcatatcaaatagcccaagactaattgatgtacttgagttttttgattcctcagtgtgccaagttcctcttttcctggaagagctatgcatagttccagatctgatttgtggtttccaatttattgtgggttaagacaatctgataacattagtttgttacaattatatgtaaaacaaaagtaaaaaggctttgccgggaacgtcggggctgtgctgtgattggaatccaagtgagtactgctactctgagtggtcaaatatttaaatcccatttaggtgaggtgctattgtcattgactgaaagaggggttgaatttagtcagtattattgggggctgttggctgatgtttagtcatctggtggcttaaaacctgacaggagacacatggctagttgtccgttgtaatataatacttggcattggtgactctagagaggaaggattatgttttccaaattagcaggtggtggtatatatgccccagaagacagatgaaacctaaaaagaaaagaaaagctcctttctggtctgaattctgtaattctataagtacagaatatgttggtagatagaaagattacccaaaacctgaaacagcaagtagaagattgttcatgtaggaacaacatataagggacaagggtggaaaaaagactagatttaagcagtaaaagatcattaagcgaggcttcatcacttcttcagtaggacagttattattgggattcaaagaggggcttatcaatgaatactatgttgtccttccccttctaaatttgaaatcaactgagaagtagataagaagattgaaacattttttttttaatagccttattggtaaggctcaatggagaatatgccatagatctgttcccaagtgagcttgctaaaatcctccctcccaattaaacttaacaggatgatggacatctggaacttccaccccacccctgactccacccgccccactgcgggttgcttagtacaggacctgtagacaaaggctggcatcccacacgctatgcttaatcctgctggtgcttcagctctcttggagagcttgggaggggctgggccacgggtgactagtttcttctagttgtcagagggttgaggaatgaggtctagaacattatggctgcagactttactttcttaggaagatttgaggctgccaaatagtggccttccactaccagtatgcttgtatggtgctttttcctaccctttctagaagattgaaccatgagcttaaattacatattttagaccaaagagaattacagatttctgtccttaaaaactcataaaataggctgggcgtggtggctcatgcctgtaatcccagcactttgggaagtggggtgggcggatcatgaggtcaggactttgagaccagcgtggccaacatggtc

SEQ ID NO: 5963 - DNA, 6000 bp, Homo sapiens
agtctgtggcccccctgagggttgttaaccaatcctaagaaaggaaagatcaatctcatttcttcgtcaccactgggcagggaggctgccaaccagtcagaatctgccactcacagtcattaaaaaaactggccaatcagtccaaccttgttatatggtctggtaggaaaagaaagggactgattggaaaggatagttctgtctccacaccctttccttcctggaccccggttttccctttgtgaagtgaaagaaggacccttccccaagcctatagttaagaagatcctccgaccctcagctaagcttctcttggatcttttgctgtcttcaaattcacccctccccttacaaacctcctttttggagcctcactgctcccttgcggatttgatttcttgcttcaagcctcgtagtaatagtcccaggattctcagcctcccctcagatctccactcaccagcaagtaaaataacttgttttgtatgacttatgcaggtgaaaacgtttttaaagtgtagttgagtctctttcaggagatactatctcaaggaccttgcaataaacagtccatataggtagcagtgcagaattgagttgcaatgcccttaactatagaagcagtgatgatgatggtgatgatggtggtgatggtggtggtggtggtggtggtggtgacgatgatgattttaatgctagcaattactgaactcttactgggtaccaagtaccttgctaaaagcttcatatgtattatcccaatattggctgtgtgataagtactattattcttctcaatttacataggaggaaatagatttagagggggttaaacagctagctcaagatcacacagcaatttgggaacccagatttgtctgaacgcagaacccattattctatgagggcaagggagtgttaaacatcgcaggctgtaacaacttttggaaagagccagctttagcttcctcccaggccccttctctgatcctcctctgggattgttagccatatctgagtgtctaaattgtcgcaacagctgcaacagccgtttgggggtggtggctcctaagaactgtggactttctctgccactgaggatgtgaagctgacagcttaaaagaattccgttttggtgggaatggagatgtctggagacctcaggggataaacttgtgtctttgctagcctgtctttctcctaacagcatctccacagtgcctggcaccacttggtacttgataaatacctgttgattgattcccaaagatcccagttccatttcccacgtacctgcccgctcggggcgcaatcaacaactaaaactggagatttggggatttcagaggaacctgtgagaatcctgatggagctggaaatgcgaatttaggaaagacaggcagtctaccaccctcctcttctcgcccgcttctcctatttctccccactccttcccctccctttcaggagctcagggccataaaaatgcagatggaggatcggtgtgaaataacgggcccatataaatccctctgccgcccgcctgcaagatggattggccgcattgaaattcctccgcgaggataattaaactcggggcctcatccgggcaaaattacattcctgtaatggcgtcgctcggggtcccgggaaattgctccgtgggctttcagcggcggtttttatcgccggccggggtgtgcctgtctgcggctcgcctctcctccgggaccgtaaagctgctgccgtgatttatcctccccttctcccaaatccgattaaatggaggagctcggggccggggcgccgcggggcccgggagccgggagggggcggcgggaaggacggggccaaggaggggaggacaaacggcccctcagagagtggcggatttgcctttatttacagccgcggctttctttttattttttattttttatggggtttggtgagcttttcccgtctttctcgtgctgcgttcaagcacgatgcagggacggcaggggtttggaactggataggccttgtcgccctgttccaaagggcagggcaggtcctgtctgggagacaaggaggcctaggaaagatgagggccaggaagcctcccccacctccttccatcaggggaagggcgagcgaaaggggagagaaaacccacgttcaggagagcatgggggcgggaggggagggcgctgcttatcccaactcgcgtagttgaaacctgagcagaggctcgggcaagcctggagtgacctcgcaaccttacagcgggtcgcaggtgcccgttattcctagactgtcccaggagccaggaaagagggattcggatcatatttaaccctatcttctggctcgctgatgctgcttctctcatggtttatcaccggaatggaaaggaggaaacggggagtgggggaaagggcgaagccaccagaagcagctgcggcattttgctgactattcgcccatggagccggtttgccatccagtgatgccagagtcccggcgcgacagaaagcaggactcccaagatcttcctcctgctgcattttaggcactgaaccccaatcccgaccgtatgttaacactgaattctgagtaggagttttgttttggcagtgtgacgactgcgcatgctcggaaaggggacgcaagtccgagatcccaaacgcggtacagaccaaaccgcagtccacgttacggatcggcttactccgcggagttggcctcatttctgcagtcggcgctccctgtagtttctcctctcgaacgccaggtggagcaaccggccggataccgccacagccctggcaggcggcgctgtgatgcctgagctgatcctgtatgttgcaatcactctatccgtggctgagcgactcgttggcccgggtcacgcatgcgctgagccttcctttcgctcttcccgctgctccgcccctctctgtcttctctgcagtgggagcaggtaaggccttgggacctagagccctctgtgcgctgcgcacgcgcgcgggacacctcaccttgcgcggatgctttgaggcgcttaccttgcgtgctcccaccctggtcctctcgccctttcttgcttccgctatcccttagccttagagttggctcttccgcgtgccggtgacctccaaccgcgcgggcctggcgccatcttggatgtctcgcagggggaggataccttggagctggccaaagttagatcctggagtgctgcttttcacctgttccacccagtccctgcaaacactcttttctcgccctctggccctttcagattgtgacaacccccaggctctcccctcctatctctgctttctcttctcatcctgacttgtgccttctttattctgaaatctccagactttaggccccagaacctcaggtgctccgagcaatggagatagtggatcgtctaaagtcaccaatccctctagtcagcacccctcaatttaaaaagtaaaccttgaacatggtagaagtgggaaaaaaagccaaaacatcgcctcccgttaggttgtggcttgggatagctaaggcagaagagagaggctggttgctttggaatcactagttatttaccagtacctttctcgcatcccggcacgctggtgaagttgtaaaagtcacaaatggtgggctagagatgagggtttctgttgaggcagcaggcccagaaaggtggggtaaggccaagctagtggggccagcatgagaccctgcctgccagctttcctgtgaaggattaattaacctccccagattctgctgttacaaggaaaagaaggtttaaggaaaggaatagttaagttactacccctgtgactcatctacactgaggaaaaagcccgtgatgattttggagtcctgattctggatagtgcctttgcccaagttgtaggctaacaattgcagagttgccatggttagatagccaatggtgggatcacttaattgccaccccttgttgtgggtttattatatgccagcaccacattaaactctttatgtatgttaatttgtaaatgaacatacttaatccccctaagagctgcattttacaaagaagataataaggtataattcccttagaaaagaaccaccccttctttttctaaaagccttaaagaactattggattttgacccaagaaaacctgaatagtacggcagcaaaattgggttagagttacatataggcaaaaatcagagttctagataggacaagagttgaagacatccattaacttaaaagtaattaaggctgggtgtggtggctcacacctgtaatcccaacactgggaggccaaggtgggaagatcttttgatgccaggagttccacaatagcctgggcaaaaaataaattaagagcaattaagatgttggattcagaagtgttttaacctgggacaatctgagttcagttcatttaatgaagtggtatttaatagccctaagcattcactgagtatttcagcctgtgacatattagaaagcatgtaacttaaaagatccaagttcaagtctatcctctaccactaccacagtttcaagactgggtttagggtcacgctcttgcgttaagtatacctaataatcatctgggaaacttgtttgaaatacagggcacttgagccttattcccagagatcttttttgtttgtttatagacagggtttcacgttgttgcccatactggacaactggcgtgatcatagctcactgaagcctccagctcctgggttcaagcagtcctcctgcctcagcttctggagtagctgggactacaggtgcacttccacctcacctggctaattttatgttttgtagagatgaggtcttgatgtttgcccaggctggtctcaaactcctggcttcaagttatctttccgccccagcttctcagtgttgggattacaggaatgagccactgaacctagctcccccagagatcttgaccaggaaggtccaagttgcgcccaagaatatgcattttttaatacgtacaccacccagataattctagttcagatgggcttctcacttcacttggagaaaccctgcctttaggtttttaactcaccttctgtttgaggtaagttcacttctaccaacttagatacctatagggtgtcagatcttctttagatcttggggagacacaatttaatacttttttttttttttttgagacagtttccctcttgttgcccaggctggagtacaatggcgcaatcttggctcaccgtagcctctgcctcctggattcaagcaattctcctgcctcagcctcctgagtagctgggattacaggcatgcaccaccatgcccgactaattttgtattttcagtagagacggggtttctccatgttggtcagcctggtctcgaactcctgacctcgtgatctacccgcctcagcctcctaaagtgctaggattacaggcgtgagccactgcgcccagccactaataccttttggatagactaataacagagttcctccttgatcttcctcatcttattaatacaggaaattgaagtattttcaggaatcagatacttccagggatcagcaaagagattgttggagaccttccagtgtcttggccttcaacaaatatctcccaaaactacaaagactctaaagggcaactttttgtttgtttgtttgtttgtttgtttgttttgagatggggtctcgctctgtcacccaggctggagtgcagtggcgtggtctcgtctcactgcaacctccgcctcctgggttcaagcaattctcctgcctcagcctcctgagtagctgggattacaggcgcgtgctaccacacctggctaatttttgtatttttagtagaggtggggtttcaccatgttggtcaggctggtctcgaactcctgacctcgtgatccgcccgcctcggcctcccaaagtgctgggattacaggtgtgaaccacgtgcccagcctaaacggcaacttttaaaggtc

SEQ ID NO: 5964 - DNA, 6000 bp, Homo sapiens
gtacatcaagaccctggcagggtgtggtggttcacgcctgtaatcccagcactttgggaggccaaggcaggtggatcacttgaggtcaggagttcaagaccagcctgaccaacatggtgaaaccccgtctctactaaaaatacaaaaagttagccagcgtggtggtgggcacctataatcccagctattcaggaggctgaggcaggagaatcgcttgaacctgggaggcaaaggttgcagtgagctgagatcgcgccattgcactccaacctgggcaacaagagcgaaactctgtcggaaaaaaataaaaaagaattaaaaaaattagctaggtgtggtggcgggctacagcctgtaatcccggctactcgggaggctgaggcaggagaatcacttgaaactggtaggcggaggttttggggagctgagtgccactacacttcagcctgggtgacagagtgagacttcatctcaaaaaaaaaaaaaaaaagacccagattcttacgtgcaggttgatctgttgaccctgagtgagtggctttacctctctgagccccactttcctggaagtgagataaaaaagggactttggcaatatgttcttctggataccatggtaatgtagtcttgccaattatgaagggtgtggcctcccccaaaaagttggagcagagatggccacccagtgactggaagactcctttttttttttttttgagatggagtctcactctgttgcccaagctggagtgcagtggcatgatcttgactcactgcaacctctgccttccaggttcaagcaattttcctgcctcagcttcctgagtagctgggattataggtgtgcaccaccacgcccggctaatttttttttttttttgagacagagtctcgctctgttgcccaggctggagtgcaatggcgtgttctcagctcactgcaaccgccgcctcccggggttagagtgattctcctgcctcagcctcctgagtagctgggattacaggcgtgcgccacaatgcccggctaatttttgtattttttagtggagacggggtttcaccacgttggtcaggctgtctcgaacttctgacctcgtgatccgcctgccttggcctcccaaagtgctgggattacaggcgtgagtcaccgccctggccacacctggctaatttttgtatttgtagtagagatggggtttcactgtgttgtccaggctggtctcaaactcttgacctcaggtgatccacccgcctcggcctcccaaagtgctaggattataggcgtgagccaccgcgcctggcctggagactcctttgtgttccccagtctccaccaaccagtaaatacatagtggtgatgtcgccatggagcccgtgcacagtactcccctgggggctgcactcagtgctggtgctggggcatataacctactctctggagagccctgcgggatggtctatgagcttttctgccagcaggacctgcaaacgcgcaggtgcagcccctccttcaccctgcgatctgagagatgccatcaagcaccgtgcctctatccttatccaaagctgaggcctctggacttaaatttcaggcccccatttcagacccaacctctggaccttgaattttatccaccactctccttaccctcccagtggggggatggctttgatgatgcatccttgtttccttcttccctcccatccctatctcttcctcttccctctccccactcctctcttacacctatttttcaaaaattaaagaaaatgttttttaaactgaagcccaagaagcattgatccttcatgtatttttgcctcctcttcccccatccttccccatgcctcccaccctcctctatgtctctcactttccggtttttcctcacccctctcccaactctcctcaactgttcttttcccttgattctggatcccttctttcttcctcaccttcctcatatcccctcaccctcctcatatcccctcaccctttcctgtgcttagatgcaggctacaagctgctgtgcatggcactgggtctggctgatgcctacatgctctcagaaggctgcaggtttgcttgagacatctgtggcccccatgctgtgtcgctgggcctaggtggaggcgtggtgaagctggagggaaagctggctttgcttggtgtggagggacaagggtccccgcctcagcacacctaccaccaactggtgccaggcaaccaagaggcagcagcctgggccagccaggacggcttggtggcatatctggatgtcaggcacttggaacaggtgctgggggatctgaaggatgtgaagggccaggtctgagatcagccacttcccactaagaggcccctctatcctgcaccccagcaaacacatggagctctgtgtcaactttccaggctgtagaagtgggccattctttgtgtgtatgtgtgtagtaaaatatatataacataaaattcagggacattgagtacatacacattgtgcaaccatcagcaccatccatctccacaacattttcatctttctttctttttctttgagacagagtctcgctctgttgcccaggctggagtgcaatggcacaatatcggctctactaaaaatacaaaattatccaggcatggtggcgcatgcctgtaatcccggctactcaggaggctgaggcaggagaatctcttgaacctgggaggcagaggttgtggtgagttgtgccactgcactccagcctgggcaacaagagcaaaactccatctcaaaaacaaaaacaaaaacaaaaaacctagatgtttatggttaaggaaacaaattaataataataaaaaagataatatcgattcttacaaaatacagtaattaagaaaattaatcctttatcacaaacttttgtagcagagcacatctctccatatatacaagcattataccgagggtgaatgtgttcctcctcttactttttttttttgagacagagttttgccgggcacagtggctcacgcctgtaatcccagcactttggaaggctgagggggcggatcacgaggtcaatagatggagaccatcctggccaatatggtgaaaccccatctctactaaaaacacaaaaattagctgggcgtagtggtgcgtgcctgtagtcccagctacttgggaggctgaggcaggagaatcacttgaacacgggaggcggaggttgcagtgagccaagatggcaccactgcactccaccctggtgacagagcgagactccgtctcaaaaaaaaaaaaaaaaaaaagagagacggagtttcactcttgttgcccaggatggcatgcagcaacacgatctctgctcactgcaacctctgcctcctgggttcaagtgattctcctgcctcagcctcctgagtagctgggactacaggcacacatcattgtgcccagctactttttgtatttttagtagagacggggtttcaccgtgttggccaggctggtctcgaactcctgacctcaggtgatccacctgcctaggcctcccaaaatgctgggattacaggtgtggtgagccactgcgcctagcccctcctcttactttggggaacatcctactctgtctatggagcagctgttgtttcaccactttactttcttaataaacttgcttatactttgcactgcgactcgccctgaatctttcttgcatgagatccaagaaccctctcttgtggtctggattgggacccctttcctgtaacaaatgcattggctgataggagaataaagaaaaaaaaagaggaaaaactagagtaacttctctacataatcatattatatgaccgttttgttaaccatgataacagttaacaaaataattttcttatgtctaattctcagtccatgtctgtatgtcccaaaatgtctttcacagctggtttgttcaaccattcaatgaaggaccaaacattgcagttggttgttatgtatctagtctctcaatcttgatcttcagaccaccttcagcccatctcaccacatccgtcccaagccctttgagccagccaaccccaacctgccatgtactttacaaaatgctccttttttttccacagtcgactgcttctctgtccctggagctctcccctttattctccaaggtcaccttgagcacatccttctgctccgtgaaatccattctcctctccctttccctccctctgagcttaaccagctgccaccgcaggcttctgcctttcttcacagtgtggccagaactcggttctgcctgctagcagagggcagggccgctgtcttcctctccttgcagcccccaagcctagcacatgcctggcatctagtggcagcacaataaggaacctgatgaatactcctttcttctgctctccgctcctcctccacagcctgccagccatggtcaggaagagcaagatccggaatgggcttggtgtgtcccgcgggaaggccgtgatcctggaagatgcttctcagcccagcccggatctccttcctttagctctagagacttctttcattctttgtgtacacacatacactaagactcaggaagtggttcttgaggcaggaccttaagagcccaaggagtggggccgaggctggaggtgtgggggtgtgacggccggtcctactctccggcctgttcagatcagctccttctggggaccacccctggcacacaagggagggaggcagcttgatccccctagcccgcttccagccctcacctggctttgtcttctgggataagacggggaaatccagaggatgtaagcctctcctgccttcgtgtcttcccccaagccctcgctatcacagacggatgcaggagctgtctgggaggctggaagcacagaccttgtcaatcctcccccagagggcgggacccgacgcggacgtgtcttgattgactgggtagcgtggcttcggggaagggcttcctccccttttctcagactaggatccctggaaaatggagaagctgtgctaatagaggggggccagaaatccccactctagaatgctgtagaatgttgggagacacccaggatgtgagccagggactttctggaagtgtttgttctggccccacccgaccccaggcagtccccagctgtctgcacagtcggatggggagggggcttgcacagagttggagccagaggagagagctggctcatcccctacggtaggatggggaaacctcacagaccacattgtcacccggcctcagctctccgccccggcgctcagagggtaactctcacccacctcgtccgcttctctgaaccagagtgacccaggctgcgctccgccccgctctcctaccccgagttggcacggaggtatagcgccagaggggggccccaggcgccccgaggtcttgcccttgcggctttccctttgcgggggtgggcgccttcttccgggtaggggccacgtggccctggccgggcggggggctcggcccaccccgcgccgggcccagtgactcaggccgcagctgttaccgcgtcacatgagggaggccggcggccactcggcgggggaggggaccgtggctggagcccggggcggggccgcgcggcaggcggggcgggagccggggggcgcagctagagagccccggagccgcggcgggagaggaacgcgcagccagccttgggaagcccaggtgaggccgcggggacccggcggacttcggcgcgggctgggagagaccacccgcagtcccttcctccagggctcgccccaggcccgcggagactcgtccggcgctctccagccgccctggagcaactttgcttcgaagttccctgggcccgggcagggtgtggcgggggtgctggctgcactttttttttttttggtgggcggggaggtcagagcccaggggaaaggggctggggcgggggtcggggttgggctgaagaccgtttctccaggctgggtgttgggtggggaaa

SEQ ID NO: 5965 - DNA, 6000 bp, Homo sapiens
tcaacttcttttttttttgaggtggagtcctgctctgttgcctaggctggatggagtgcaatggcacaatctcggctcactgcaacctctgcttcccaggttcaagcgattctcctgcctcagcctcccgagtagctgggactacaggtgcccaccaccatgcccggctaatttttgtatttttagtagagacgaggttttaccatgttgcccaggctggtctccaactcctgacctcaggtgatctgcccacctcagcctcccaaagtgcttggattacaggcatgagccaccgtgcccggcctcaacttttatattttgttctatacccatactaccaagactgcttaatctaattctgtatctaacagaataccaactcaacctagcctcctaatcatggtttctttactcttccttttcactttctttcggttgggtgaatttcattgccaactcgtgtcgtgattgtttgcatgctggagagtgtatgattcagatagctaagagacaaattcacatttagagtcacatggggattctgatatcacttcctctctgttcttgacttgggactcagataggccagggatttttgccgattgaaccatactatggcctctaaccagcatttagacatttaaggaactatgggactcctggtcacttcctcctcaccttcctgtacctattcctccccaaacccttctgagaaagcttcttaaaccaacgatctttttcacatttttttggttttttttcgagatggtgtgtctcactctgtcacccaagctggtggcgcgatctcggctcattgcaacctccgcctcctaggttcaagcgattcttgtgcctgagcctcctgagtagtggggattacagtcacctgccaccatgcccagctaatttttgtatttttagtagagatggggtttcaccatgttggccaggctggtctcaaactcctgacttcgggtgatccacccacctcggcctcccaaagtgctgggattacaggcttaagcctccacgcccagccccttttcacatttaaagttactgtcacagttttatgttaccagctcctccccactggctttaggggaggtcataagtagctcatcaaggttacttccaaaggtgctggaccttcaaaaacctattatatcttaaaattggaacccagtggggtgtacaagtgacttttttggttattagcttgtaaggactttttccagtgacaattttgactataaaaacaaaaatctggccgggcgcggtggctcacacagtaatcccggcactttgggaggctgaggcaggcagatcacctgaggtcaggagttcgagaccagcctggccaacatggtgaaaccctgtctctactaaaaatatcaaaattagccagacatgctggtgggcacctgtaatctcagctacttgggagggtgaggcaggagaattgcttgaatccaggagacggaggttgtagtgagccaacatggtgccactgcactctagcctgggtgacagagtgagactctgtctcaaaaaaaaaggtagtggaagaggaagataaaaaatgagtaggaaaaaaagttgaagtcaggattggacataatctgactctaaattttatggttgcctatgaatctataattcatatatcccaaattttctttctttcttttttttttttttttttgagacagggtctcactctgtcacccatgctggaatgcagtggtgcgatctcttctcactgctgcctcaacctcctgggcagcacaagcgatcctcctacctcagcctcctgagtagttggggccataggtctgtgtcaccatgcctggctaatttcttattttatgtagtgatgggatctcgctatattgcccaggctggtctcaaactcctgggctccgccttagcctcccaaagtgctgagattacaggcatgagccactgccaccagccccaaattttcttagtcccaatttcaattattctgtgttcattaggataacaaatgtttaaaatgtggtctctttatgtgccagtgagggaatcaagtgagaagtggtcatccaaggaccgcttatcctttgtcacaatgttgaagtcctacagtgaaatcatgactggaaattcttctgaggctccatgaaatcttttcttgcacagtgtctacatgaatgtgcctgcagcactctcctgattttctcacctgctgcccctgagttctcatttactaacccctcaacaacatctgttcttctgaagcagattccttgaacctaaaatgatagggagaatttgatgtagtctaagcagatcttcctatgataaggctgacatttaaattactttttttaaataagaaaaataatgactctctctcctggggagggattataaagcaagttctctcacaggccttcagtttcccaagccttattgatactgcaagctaatttaggtggatatgacagcttttaacattttaatagtcatgcttttacttaatatatattagaaatatatatctagaaaagtgataatgatatgaagtttctcaggagttggaagccagccttagcaacatagcaagaccctgtcttaaaaaaaaaaaaatctacaatgtgatgattttaagtctgttatccaccaatacatacatgataagcttcatatgcaccatgcattctcatggaaatacgtgattcctgtgcttctctgtaactcaacctcttgctctcccactccagaagatactttggaaggcaaccaaatgaaaaatgttgtaagaatcattattgcggccgggcgcagtgtctcatgcctgtaatcccagcactttgggtgtctgaggcaggtggatcacttgaggttaggagttcaagaccagcctggccaacatagtgaaaccccatctctactaaaaatacaagaattagctgggcgtggtggcacacgcctgtaatcccagctactcaggaagctgaggcaagagaatcgcttgaacccaggaggcggaggttgcaatgagccaagatcgcgccaatgcactccagcctgggtgacggagttgagactgtctcaaaaaaaaaaaaaaaaaaaggaagcagcagcagcagcagcattattccactctaattcatttttgcaatatgtaaactatttacaaataggtactttcactcttactagcatttttcagcatacctcaggactgatcgccacctgatggccacttggcagagcataagcatgcttgagaaagagtgatcttacaaactagtttgggtctgagatatcatgtgtagagacccctattggggaatttgtaccgtagggagtgctttccttattgcctctgacctaataatgtcctcttttctctttaacacatatagactgttgggcgggagctgctgctccatctgattgactatctcgtaaccagtgatggcaaagaccctgaaatcacaaatctgatcaatagtacccggatacacatcatgccttccatgaacccagatggatttgaagccgtcaaaaagcctgactgttattacagcatcggaaggtaaagaggggctggtctatctttacttgaaaacaacacaacacaaaggctcccgacaggcacctgttggccttggcaagaggagatgtgtcatggtgagagccctcagagccggtgtcatgtcgctgatgtgccaaagctcaaggcacatcagggctgcctccggcttgcaggaagaaatgcaaataaggctactttgccccggtgcccacctagcctctccatcttcatttgccactccttctctctcccctgcctcctcccctctaggcctccttcctggaagtaccaggtgctttcttacctcagcattttacacacaccgtttccctgcctaaatagcatttcctccaagactctttctctcgacctgtcatacactagatcccctgataaactctcacatcacctggcactttactgtcagagcacaacttttaatatctaatttcttgcttcatgtctctccccccactacactgcaagctacctgcaggcaggaatcctgtccattgtgtttgtcgttgttagatccgcagtgcctggcagagcacccaggcccttggtaatgaccggttgatttattaggccagtagtccaagaactaaccataagcaagaacgggtcttgaaggagctctgatttaaacagtttattttgtttcaagctgccttgggaggtttggaatttctcagatgtctaatatacattcatatgtatgcaatttacatatatgtgtttgctttaccaaagctgaacaaaatctcaccacttgattccctccaattttaagtttttcaaatatatttaaacatggctgttccacgtttcacaagtacttctgtgtaatgtgtttagtgttgtttctgttatcagttgctacttaacgaaccaccccaaaattagcgacttaaagcaacagcctttttatttactgttgattccataggtcaggaatttgggcagggcagagcagggatggctactgtccgtgccacaggtctggggctcagctctggtctttctgagacaatttacctggagccatggactctccgtggactctccacgtggcgaccattgggatctcaaggtcccaaaagggagcatctaagagcagaagtcccaaatacaaacacttatcaaacctctgcctgcatcacaatagctagtatctcattggtgagagcagatcacgaggcaggggatgccatgggatgtaagtgccaggtgtgggtcatggcaggccacaagggcagccatccaccacacccatactcacgtttggaaagacacctggagcctaaaccaaagggcaagacactgtaagaatccactccctcatgccctatcaataagccctaaaatattctttcttttaaagggaaaattataaccagtatgacttgaatcgaaatttccccgatgcttttgaatataataatgtctcaaggcagcctgaaactgtggcagtcatgaagtggctgaaaacagagacgtttgtcctctctgcaaacctccatggtggtgccctcgtggccagttacccatttgataatggtgttcaaggtaagcaggtgcgggtccagttctggcttcttaagtccagagtggggctgaaaactctctgcctctggatggggatcagctctcccttcccctcttaacttctctggcagggtgaaaagagcttcatgttcccaactctagccatccttcctgtgattcttcaacagcagatgggcagtgtggctgaactgacaacccacagctggacatgcatcagtgaattagtgaaatttagattctagaaaatacaatctaaatagtcagattttgattctctgacaagagacaacatggctaaaataacataaaactggaacaactcacttttttttttgctaatcatatatgaacaataattgttgactcttcttaaaactctgtgggatgaggacccaaaatattacagtagctttattcacccctataatacctaaagaaattgtccttacctccagaaattagcaagagtgactgagaggacacttaatttttaagctgatttaggagtttggatttgtatctgacttatttgggggctatcaccttgcatatgtttattataaagtagaaagaagaatagaggaggtggatgaaggatttctctctagggaaattagagcatgtgtgtgtgatgcgattatgtctttgctaatatggtgtttgtgtttcctcttactctcaagtcagtttaaaggtcttggttcatcttttaaatgcagcaactggggcattatactcccgaagcttaacgcctgatgatgatgtttttcaatatcttgcacatacctatgcttcaagaaatcccaacatgaagaaaggagacgagtgtaaaaacaaaatga

SEQ ID NO: 5966 - DNA, 6000 bp, Homo sapiens
cggtaagctatgatcgtgccactgcactccagcctggctgacagtgtgcaagcttgtgtgtgtgtgtgtgtgtgtgtgtgtgtataacatatatatatatggcttgtgtgtatatatatagcttatatatatatatagctcgtatatatatacacacacacacatagcttgtgtgtatatatatatatataaatagcatatatatataaaatagctttggaagatatatttaagtgttccagcagtagaaaccacagtgcttagtttctcatcgaatgggagtaagtgagagcttgacttcaggacttctggtttgggaggttgagtggatgtgatatcagtttcatctttaacctgttaagtttgataaatgttggagacttctggctggtaaagtcttttaagtctattaagcagttagaaataagggtactctggagaaatgcacaggtgagagagatcagatgtcatgagaaggtacagcattggtgtaaagacaataaaagagggtattgtattatgatgtatattctgcttttaacattatgagtattctccatgtcattaataattcatcaaaatgttaaattactagaatttcattgtgtggatgtgctaaaatgtaatcatttccttattgataggtacttaaattgtttccaatttattgtccacaaaaaccttaagacctcattaagtcaaattgcagctaccatatatgtctttgattaattaaatacattccaagaaagtttttttggaaatataaatattgactaagcaactgagcacagcccatgtttgcctttacaaaagagtttctttatttaaatttttatttttaattttgtgggtatgtagtaagtatacattaatggagtacattgccttaaatttcattataaaatcagatgtgcattcattcagatagaaagattggctactcaatagatatgtaaattttactttaaaataaagtggactttattaaactatatgtttgaggagaaaataaattattctggtaagatactaataagaaaatgttaagtgtgccatgttaaattctaaatgcataaaatgaaaatatatcttctctatcatttataattagcttaaaaagtagagtaaaaggtaatctagaaggttcaacaaatatacatggaaagctcagaaattggactgttggatcttctgaagaacaactgtttatggagcactaacagtgtgcttgaaaattaatctttatagtaaacatatttgtaaaccccattacaaatgagaacactgaggcacaggaaggcaacttgcccaaagccaaacagctgactcccaagctgctgctgctcctcctcctcctcctcttcctcctcttcttcatccttatcctcctcctcctcttccttatcctcctctcctcctcttccttctcttcctcctcctcaccattacactatgctgctgcctggaatccacttatggtgggaaaggatagtctacagtgcaagaagtgattgcatccagaaagtggtatgtatgattgcttacattcaaggttagaaatctataaccattctcttttggaagaggagatagacaagacattttgatcaggttttaaaaaaaacgttgaatctgtttattcaaactagtggacaattttgaaagtgtggactaggattatgagggagaagtcgtcctcaatttgcagatcactgtggagtagactaaaggattcatgctttgaaaatgaatgaaaagaaacgagcaaaccaagtcccacaaccagagggtctatccaaacaaggtcagagaaggtattattgtgggagtccaacctagcaagcaagcagaagagagtccctttctggtattcagctttcctttggaggatcagaattagatattatgaatgctgtcgctggtcaactggattcatgagcataaattggagtcacaagataaattaggatctcatgcaggactttgcttatgaaacacgaatccattcaagatagattcaacaggaagcaaagagaccaaagccaccacaagcatgaccaaggccacctagcctctgacttagggccatcatgttggtggagaggcaacctggccaccactgtccagcagtgacaggcagcctaatttcatttcatgggtaaccagggggttgatgggtatgctgaccaagcaattaagggtggctagaaattcagatgctgactgcgcccaaacaaaattactctcctgtccttccaggcatgcatatattccaaatctaactttgcaccttaatgtttaatccacagtgttatgtttaaactgcattagcctgctttacttccaactatagttagaagccctcttgtttaacacagttaatcagccaggcacggtggctcatgcctgcaatcctagcactttgggaggccaaggcaggaggatcacgacgtcaggagatcgagactatcctggctaacacggtgaaactccgtctctactaaaaaatacaaaaaattagccaggcatggtggcgggcgcctgtagtcccagctactcgggaggctgaggcaggagaatggggtgaacctgggaggcggagcttgcagtgagccaagatcgtgccactgcactccagcctgagtgacagagcgagactccgtctcaaaaaaaaaaaaaaaaaaaaaaaaaaaaaaaaaaaaaacagaaaaacacacagttaatcaaaaatggtcaatgtgagaatcataaaaaaagtattttattttaaaacatgtacatttgttcatattcaaatgtgtttgtttattatggggttcagtcttatgagtgttggtctgaagatggagttctagatcatatagtttatgtcaatcacattgtttatatattatcaaaattttccattttagtttatttaaaatgaaagagaaaatagaaaagcctatgaaacaatataaatgcagttttctatttagattttttaacttagagacaaatttctgtcattgtctcacctgtccctgatttgactgtagttttctttactggtttacttttttcaccagtgaaaaacttacgcaacttattcaattatctcataaagctcttttctcttttaaacctcatattttattgatttctgtaatatgtaattaaattactggacttcaataataagtacacctgccataaaggtgttttggtataaaaacaacttgaggaacacagagatcaaaagatggtaacagaagtactgagctcagtaggagagtgaaccaagactatgcaaggttgcatgtgcctcaacatatttgacagagggaacaggtcattggtcaatgctgtggttaagtagcattggttaagagtcagtgtggaaatcaaagatggaaagtttcattcataaagtgatattttcttggaaaattctagccccccaaggcaattttcccctaccaaaacacctgagccttcatgtcctcatctgaaaaataatttaaataataataatacctgctacccaccctacctacttcaaaggattgtggaaggggctaaatgatatgatgttggtgaaggtacttaaatctctgagcctatgtcagtaatattccatcggagcaccaggaataaaagtagctatagtaataataattttagacaacctgacccattctatccctctcatgtattaatataacccaaatgaagctaagtatgaagattttatttacttagagccacattctatgtgatgatacagatctttagcttatagagcaatatctctgatatttaaatatatagaaactaaaaagaaaataacttaaaaataggtttttttttttcaggcaactaaacaactagctagaccgcctcctcacatagccctaacttggtgggggccagaaggagaatcaagggaagaaaaaagatcacaaaaatatgagctggcggccgggcgcagtggctcacgcctataatcccaggactttgggaggccaaggtgggcagatcacctgaggtcaggagttcaagaccagtctggccaacatggtgaaaccccgtctctactaaaaatacaaaaattagctgggcgtgatggtgcacacctgtaatctcagctacttgggaggctgaggcgggagaatcgcttgaacccgggaggtggaggttgcagtaagctgacattgtgccactgcactccaacctgagtgatagaatgagactccatcacaaaaaaaaaaaaaaaaaaaaaaaaaaaaaaaaaaagaatttgcattgctttgtgttacatcctacttttgctgtaaaccaccagttacaaagcactggttaatgtccagaatcttttcagtcagagtttgataataacttgtttgcacaagagacactgtcctctggaaacctatttttttcttccaaattatggattcttagaattaatagataattttactgaaaggataagcctagctagcaaaagaatagtgatgatttggggttatattctgctaaatagcatgctattttgaatcacctacaattagtgtggtttcacagtattatctgtaaggcagcatttttcttccctgccttttctgcctcttttatctcattgttagcaccacaataaagaaaccctaaaaagctgtacaggaaaataatttgaacatgaacttgtactcttagaaacaactgcatttgcagctgtcccccacctcatattcaaaagtacccacacttatctggtctctttttctgtcatctaaatgagggaaaaatgtattcagtgtgtaaaaataagctattgtatctcagaaaggagatgggatgctaattaagggttgtttgaatgaacaagtcacattgcattgtctactgggagctgactgccaattgcttttttggtaacgagtcaaaaaaaacattcaagagggcccccggcaagcttgggagagaagcgagcagcatttccatttatcaagtaggtgcagaagcctgtgcaagtattaagagtcagggtgcaggcggcaagctcctgctttgcagcttttcttactggttttgagagccaccttcctaaagagggccctgctgctcaggtctgatcgtggacaatggggcacgtacgccagactgctggactactgaatgaatgcctctttctttgttcaataccttttccaagattctttgtcattcttcttggactcatcgggaggcatgggttttaagatacacagtagctcgggtcttacagcgaaataattgatgcttcattgaaagaaaccaggcaaattggtttgtatgattacctttaacaaagtgggaaaattttagacatttggcaactcatagatttcgagagaaatgagttgctctactttaaaaaggtttcttctcttaatgttaacattaagtcagccagagtaagtcttttggtctgatagcctgagagtctcaggtggcatgtaaataaagctgaaacaatttacttcatttagaaaaagggtcaaaatgtagaggatgtaaatgtgtttttattgtaatggatgaaagaaactgattctgctaggtgaagtgacttccttcgctgtgctagcttgtagagtagtggtacttagcataatagagccctggaggtgtgtttctgatactttgtgtcacttttccttcagttctataattttgtgagtcttttgctgctcttttaaatctataagtatttaaatttttatcaagtgtattcatatgcctttgacaaagatgtgaagaaacaagtgtcctgggtattaaaaggttctgattgaaggcaacaaatgaaagaatttctatgtaaatgtatgtatggttgggagaaaataagtgctatttaaacatttctaaaattaacattgcttccaagagcactcaaaataaaacataaacatttgtcattttacattctttatcatcaaaatttgtggtaaaaaatagttattttacagttgt

SEQ ID NO: 5967 - DNA, 6000 bp, Homo sapiens
gtaatcccagctacctgggaggctgctgcaggtggatcacttgaactcaggagttcaaggccagcctgggcagcccatcatatatattatatatatatatatggtgaggaggtagttgataggacttggagactgaatgttaacttaaatgaatcatgcagttttcaaaaatgtaattcattattgattcaaacccatcttgtacttttccatgtgctctcctatactttggaggaagtgtatcaacaagggagttccattgcctgtaaacaggctcaaaatatgttcactccaagtgctatatagtaaggtgaacagtagatggcacttttgtactatgctgaatttccaaatttgaaggccaaggaagaaccagtgctaaaataaaaataactctttataatgctcaagtaagtacattcaatttctgttttagggggaactgtataagaagggctaattagaggtcagtttgtcctagctagtacccggcctccagtaaaaccttgtaggtttttaaatactgatcctgcttgtggctcccacccacataaatgattaggttgcagtccagagaggtctaaataatcattgtagcaagtggaattaggcttgaggttagaaaaaacttccccaactttgaccacatttccaattgtctacctctgagcttttgctatttgcaaaggtgaagaaaagccgaaaagaacaaaatcaaatactatggaaaagaacaatgggaagggcagtttagagtaataaatgaggacagtggaatgaaaataaaggagatattactttcattttgtaaaacttattattataaaccttggcaagaatgcaatgttttatacatttacataacacttgcaatcacacaaaagtcatgacagtgattaagagagtggattctgggccaggtgaggtggctcacacctgtaatcccagcactttgggaggccgagacaggcggatcacgaggttaggatattgagaccatcctggctaacacggtgaaaaccagtctctattaaaaaaaaaatacaaaaaaaattagccgggcttggtggcgggcgcctgtagtcccagctgctcgggaggctgaggcaggggaatggcgtgaacctgggaggcggagcagcttgcagtgagccgagatcgcgccactgcattccagtctgggcgacagagtgagactccgtctcaaaaaaaaaaaaaaaaaagagagagtggattctggaggcagactgcgagtgtctaaaaatctcaactctgccacttcctagttagcagtgtgccttgggcaagtaacttaatgtctttgcatatcaatttactcatctataaaacggaaatggtaataatagcacatctctaataagatcgttatgatcactaaatgtcaaaatttgtaaggtacttagaaaagtcctggcatgtagtgaaaacataggtaggtatattagtccgttctcacattgctatgaagaactacctgcgactgggtaatttacaaaaaaagcgggtttaattggctcatggttctgcaggctgtacaggaagtatggctggggaggccacaggaaacttacaaacatggtggaaggcaaaggggaagagagcatggctgctccatggctggagcaggaggaagagagcaaagggggaagtgctacacacttttaaacaaccagatctcgtgataactcactcagaacagcaagggagaaatccacccccatgatccaatcacctcccaccagccccctcctccaacactggggattacaattctacatgacagttgggtggggacacaaatccaaaccatatcagtaggtgacaaattttttaagatcaactttaggtaataggattaatatgtagtttccctcccatcttttaaatttaaaacatgtgtttcttgataattgagaaaaaaagtaaaagctaaacttttactaaaacacttaaataaaaatctatattttttcttcttgtgagctagtttctaaatctccaacttcttcccttttctgcttctcctgtgcccaatattagacgtaacatacctatgagtaatcctgaggtcctgattactcttcagcttctggcattattattttattattggggtgaaatacctgtaatgaaatttaccattttacccattttttaggtgtacaattcactggcattaagtacattcacaatgttgtgcaaacatcaccactatctatttccagaacttcatcatcccaaacagaaactctgcacccattaaacagtaactccccagtctcccttacccccagccctagtaacctctattctactttctgtccttatgaattcacctattctaggtacctcatatgaatggaatcatacaatatatgctcatttgtgtttggcttattcacttagcaaaatgttttcaaggttcatccatgttatagcttgtatcacaatttcatttctttttatggcaggataatatttccttatatgtatatatcacatacattttgtttatccattcatctgttggatactaggattgtatccactttttggctattgtaaataatgcttgctttgaacactggcatctgttggagtctctgctttcaatacttatgggatatacctagcagtgaaattgctggattataaggtaattgtatgtttaactttttaggaactgacaaactttttcacagagctacatcattttacattcccaccagtatccagcattagttttaaacatggcaggcttttaaaataaatcaagcctaaactggtaatatgtagcaaaactaagagtcctgcaacagtttgctgacaagttgctgatatcaacactcttaacatatcatctcctagactaatgcagtgtttctcaacatagacagctgagactcccatagtaatcatctatggagcttgttacatcagaagggccctggatcccaccttgtatatgttgattcagcatctctggaaatggagcccccaaatcaacattacaaatgctaaagcatgagactcaccaaccctagattgctgagttcttgaaggtaggggaaatatcttagtcatcattgtgtccctcaaggccaaacatacaacagatatttaacaagtgtatacttaaattaactaatactgtaatctaaagcctacctgtttagttgttaagtaccatattcaataaaattaaactcaatcactagacaactagggaatctgtaattaaggtgtgtagcatacctttcatttgcataaaacacatgtcttaccagctgtgttctatcatgccctttgatgttgctaaggatctttacactatatgtaattttcagctcagaacatcacgctttgaggcagggttaaaaaaaaaaaaaggatatggacttggaattagaagaactgtctctgtgtgacctctaagaccaatatctaggaatcaagtttataacttggaaacattgaaaacattttgtaattctaccaacttcattgtttggctgaagcacaaatgatactatgtgtaacaaagcctgctgtagaaacgtggtctcacaaaaaacaaacaaaaaaaaccatgtttccaagtcttcctaaagactttaagtatccagctgtgtaagtttagtgctctaaggtatacgcaaataagcagatgagaatggaaacatatcgcagaaaattattaagtgcatgcacaacatttattcattcattcactcattcattcatcacgcacatccagcaactatatcaatatcctgcagggcactgtgtggaaaacagtggttaaataaattcaaatctgccctcaggggatttagttccttttagtatattaataactagcaagctgcccctcttcatgtcaaagctttacgtcaacaaaataagcggtaggggatcaccttaaacgtcacgggtgctgtctctttaaaacgtaatagaactctgatcgcatcgatcacaggctcacaacgcccttccattcatcgctcttattccagtcctggttactaccccacttcctgacatcaaaccagggagaacgcgagtgttagttaacatggcttggtgtgtggccacagctgacccggcgcatacctcccgtcctctctttacagggctggcggtgtctcggggctcggctggccatgcctggagcgcggggtttgactgggccgccgttgttgtagtgaccgggaggcgctgccgctctgggcagacggttccgggagccgcacggtcccctctccttccccatcctctcccctcccctctccgggttcccccacccacaggagccttgggccgaccactcccccgatggcctcagccacggtaaggacgggttggaggtggggggggtccctccctggagcctgtcccgcgggctgcggggccaggtccgggccgaagccgcacctggagggagatggaggcaggtgtccgtagccgggtcctgagcccctcgtcccggggcgtccgtatctcactctctgccatcggggcggacggagtgcggaacccagacccggctcccggacgctcttccccgagttccggagctccggactgagctgggcggccccacggcccccagaattctcggagggtttccgtggagcgcctgcgtcagaatcacctaggaagtattaaaaaaaaaaaaagtaccaaagccgaggcgcatcctcgcacctgcctgccttgggccagcgggcggggcccgggaacgtgcatttcaaaggggccgcggttcctgcgatgcgctggactctgggaagcgcgaacagagcgttttgcgggctctgcggggagagctggcgccggcgtctccctgtagcaggactgggcgccgcgcccgtgggtgggctgctgcccggccccgccgcccagccaagccgccgcctgggtggccattcccaagccggactccggggaagtggcagcgtggatcccagccgccagaattcgaggtctgcggcggctttcaaaacttgacaactttcctttccaggaggaccccgttctggagcgttatttcaaaggccacaaagctgcgatcacctccttggacctcagccccaacggcaagcaacttggtaagtcttattcttgttttgcttttgtaatgagactaaactccatgggccggaaacctttcctcctgtccgggcagggtccctaggagaacggctaagggcctgtatgagggttgagagcacccggagacgagggcccagcgcggcggggcgcagctagggccccctctgccatcccggcccccagcccccggcccggccaagagcctcctatccagcggtctgggcctggcggacgactttcgcaaactaaccaccaggaggagtgagtgggaaggggaggggtttctcctcggcccggggagggtggggtgttggctggagagtttgtgaaaagttgtgagccgagcaggaggaagtagggagagaggagttgggctgtgccggaggccgaggaccgagagggctcaggtgacccctggaaagcctgggtggctggaaaggagcctagcgcctgcatgaaaggaagaacctgctgggaagtacctgagctcgagctgtgggttccgccgcccttcccctgcgtggtggcttggtggccgcgtctgcgcctcagccctgagaatccggatggcggtgaggtggacttgggcaggcaagagctgcctgctgctggcgtttttaacagtggcctatatcttcgtggagctcttggtctctacttttcatgcctccgcaggagccggccgtgccagggagctggggtcaagaaggctctcagacctccagaaaaatacggaggatttgtctcgaccgctttataagaagccccctgcagattcccgtgcacttggggagtgggggaaagccagcaaactccagctcaacgaggatgaactgaagcagcaagaagaactcattgaga

SEQ ID NO: 5968 - DNA, 6000 bp, Homo sapiens
gagacttaagagttttgagatctgatcaccggcctcaaagaagttactgtcttatgtgggacgaaccaaacacgtgattattgcaacccaagatattactaccttgctgggtatatacagagcatgttatatgagcagagaacacgagttcccaacctagcctaatagcatctttttattgagttctcactgtgtgccatatacttaagccatgtgttttacaagtaatttttttaaatgtctacctttatgaggtatgcatattattactcttatttggcagatttttaagaatcaaaaatgtatagagcgttagacatgtttaaaaatacatttttaaaaaatcgagaatgtatagagcatagacctagtgtgttaaaataccagctttgtctaaaacacatgtgcttaaaagactactgtactgtattgaccactggaggggtcaggtaagacttcctagaggttaattacctgatctgattcttaaagaaggaggaagtattatctaaaccaagaaagagagcgagcagttaggtatattctgagcaaagaagcaacataaataaaagcactaacagaaaaccacttttgttcagtgactttatcagctaattgattcaaaacctaatgtgtagcactcttttaggagctggaaatactgcagtgaccagaataggcttgagatttatattctagaggaagaagacagctaagtaggtagaatgatagatacatggacaccatgtcaagtgaaaaatgaattctgggaggaataagacttggtccctgttctcataggccttaagatattctgggtggcagggtggcatatcaggggggatgatattaaataagacaattacaagtgcagaagggctatataagatatgcacggtgtaatgaaataaagtaatggagagagactgcattaagaatttctgaggatgtggcatttgagttgcaatctgatggttcatagtgggtctgccatgtaaatagctgcaagaagagcattccaagcaaaacgagaaatgcaagtgaaagtgagaaaagtagctattttaaaggtggaaaagaggccagtgtggctataaatgtaaagaagaaaggggagacgagatgatctctggccttactgggctgtgaggactctgaattttctgaaattcaggctgggaagtgacatgatttatgttgttaaaatactattttgggtacgtgtaagacagggattagagatgaagaagagtagaagcagggaagctaatgagattattgcagtgatcccaggcaagagatgatcatggcttggcccacagttgtggcataggagatggaaagaaaagaatgatttcaaagtaagtggagatagaaccagtaggaagtaatatgttgggtttggatacgctgtttttgacattgttgaggtgtctgagacatccaaatgtatgtcaagcatttggacctcagagcctgaaagtgggctagtctgaagaaatcactgatgaaactaaagatatttagagaaagtgtgtagctagggaagaaggcttttatgactaagaggttgccacaattagaagtcttataaaggagatggtcgctaaccatctctgtacaagttagagaaccagtctgtaacttggtggctgatagagggttaccaatgtaataagagaaccagaaacagcagcctgttgagagattaagataaatttggtttggggttttgtaatttcaaatgcttataaaatagccaggtgggtaatgtttgccatgtggtcacaggagaatcattcaaaggttgtttttttattttgtcttgtttttgttttctttaaggaaggagtcttcctatgttgcccaggctggagtacagtggcttttcacaggcaggagatcatggtgcactgcagcctcaaactcctggcctcaagcagcctcccacctcagcctcctgaatagctgtaattacaggcatgcaccactgtgcctggcttttcaaagttctatacattgacttacggtttaaactttaacatgaaatcagggtatctgcaactttcattctttggaagacatcagtctattatcatgctcttggcattgcagttgatggagagttttatcttttttaaagcatgtaaatggcacttgtttttcagtatcacaaaatgagatgggtatttatatactaaattgagacgatgtaatatgaaacagttttctctgagtttattttgtacagtgcaattctggtggagggattcttgaataattagatgtctagaacaaatccagtttttattacatatgtataagtacttggccttgctttagtttcttatatgtaaaagtagagatagtttgtaagttttaagctgaaagcatctggtgactagtaggcagttaataaatgttagtgtgcctttcttatgtattatttgccacatagttttaacctgagaccaatttctcccttttactcattgtttccctgtccagatgatcctgggatactacctaatcaaggactgcttagatacaaaaatttaagatagattttatctcaaatgagataacaggagatatatacatttataaaacagacaagtgtttttagtgtcaaatattgatttttttgaaaaaataatctaagcaggccctgtccttttgctcatcactctggcactaggacctaagcacagtgcctggcattcagtaaatattagtttgagtaaatgcacgtgatgtccccctccaatgatttgaatcactaagagttgactgggtagagggaaataacttttatgatgtaaatcttaaaacttatagataaatatgtatttaaattgcaattaattacattgcatacatgttttaaaacatggtaccctgggccgggcatggtggctcacacctataatcccattactttgggaggctgaggcagacggatcgcctgagctcaggagttcaagaccagtctgggcaacatggtgaaaccccatctctaccaaaaatacaaaaaattagctgtgcatggtggcgtgtacctgtgatcccagctactcaggaggctgaggtgggaggatcacttgagcctgggaggcagaggttgcagtgaatcaacattatacccctgcactttatcctgggtgatggagtgagacccatcttaaaaaaaaaagtaccttgtctggaatgtgcaccccttaaaaaatgtaccttgctattatcccaaagatatttaattcagcagttcagtaaatacttagctccagttacatgcctggtgcttatttgttaaatgaacaaaaggtatactaggtgttggtgatgcaaagataaggtaaaggtcctaccttcaagaagctcattgaagattcaggtaaacaataactatagtatgacttaatgatctgtaatagaggtatgtataagatgaaggtgcagttttgtctaggtagaccaagaaagctccagataagttagatttacactggatttaggatagacttcacaaacagctaggctgcagttcaaagttagccttcagtcaagttatctttgttgggcggggggagttagaaacattaagtatgaagagattacgcacaaatctctgtttctttcttttgcagttacaggttctgttaacactggggtctcattccatcatggcagaaataggctagagctaaatagctctttcattaggcatttgtctcgggggtttgtcattttcagcatattttcttcatgtatgttacctccgtgatcctttaggcattttaatttgcaacccctgctccagtaggatccgtgtggattttctggttacagaaaagcaggaaaagattttctaggtgaaaggaactgtagtagcacaggcacaaacactgattgtgttatactgagaactttgtggtttgtgtataacagctgaggaatcatcgtatattttaagaaagtgtatttctgcttaaaaaataaaaaactctaccatcaagtatatcatatgttttaaaggaggaacaaacttaaaggcagggtaccttataaaaagccattgcagtaggttgggcaacaagcaacagagacatgatgcagggcaagtttgaggtagaatccacaggacttactggcttctaaggatgtaggataagagagctgaaagaagaggtacaggtgactcttaggtttctgctagacaggtaaaggaaacatggtttcacttttagacacctgaatcgatacccactttacaggtggaactatgactctcctcttacagtgaggtaggggcaggatgtggattctaaagtcattagaatatgatggaattagatggaaattgaaggtatgggaataggtaaggtaacacttaaaagatatggattgtgagccacccttaaccctaaacaaaagaataccaacattttactcatgtaatctgggtagtaaaaccagaagggtagaaagccaaccagaaaagaattgcctaatggttgcctggggaaatggtgctttaaaaagccttctgtaaataaatactgcaaacaaattagtagatgacaactgaaaacgaagcctgagctaagtctggcagtggaattggaaagagattattgaaaatagtgcaagaaatgttgagtattggaaatgaaatcaatcattattaagtcattgtatcattgtcatcatttgggggactataaattaatgcagtcgtgtgcagtgaaatatttttccttctaaaaataccaaattaactttgtaatttttttttttaatgtaaaccaggtgccagatgcaattaaaaagtgtcagagggctggaattactgtgcggatggtcactggtgataatattaatactgctcgggccattgctaccaaatgtggtattttacatcctggggaagattttctgtgcctagaaggtaaagattttaacagaagaatacgaaatgaaaaaggagaggtaaagatttattattattttgtttttggttgacagatgtttaatatattaggaatttaactcaacaaacacatattgaatatgcactgtgttaggcaccatgcatgaaataaatgcagtctataccttaggaagcaaaatactagtgttctaagggataaaagagagaagtaataaattggtactaaagggagtaagcatttcttgctatgaatgctatataaaagtagcagcagtgaatctaggccaatttcagaagtacagtatgtataagggagtaatgggagatgagttggaaaggctgatatggagcatattttagggggccccaaactctctgaacttcttatgctaaattaaggaagttctattttcataggcagtagggggattttttaaatttggtctcataatgatatataaaaacagtggcttttaaacttgagtatgcatcaaagtcacctagcaagattattaaaacacagattgctgggcctgccccacagtattcgctaagatagatctgggtccatgcccaagaattcacgtttctaacaagttcccaggagtttctgattgttctgtggaccacactttgagagctactgataaatatgccagatagctcattaggatttaagaaactatgtttgggcatattttaactttgataaacacttatagattgagcaagagaggatagacaagatttggccaaaacttcgagtacttgcaagatcatctcctactgataagcatacactggttaaaggtaagtagatttttcagttatttcacaatttcttaatacagaaatgtgttctgcttcccagaatagtaatagatactgaatattagattgagtcatggatatcatctgttttaataaaatctaaatacatttcctttgataccttaggtaaattgtgttgttaagtgattatcttaagtgtttaaaacaggatattgctctgaatatacccatagtttctgaagtaggttctcacccaa

SEQ ID NO: 5969 - DNA, 6000 bp, Homo sapiens
aatgagaagagggctccatccagacttttaagaatcctcatggctctaaaataattgaaatagtgacttctctgttttttatttcatattttatatttcgtagagacagggtctcactctgtcaccaggctggagcgtagtggtgtgatcatagctcactgcagccttgaactcctggcctcaagtgttcctcttgcctcagcctcacaagtagctgggaccacaggcatgcacaagcacgtccagctatttatttatttttaaaatttttggtagagacagggtcttgctgtgttgctcaggctggtctcaaactcctgggctcaagcagtcctcctgccttggcctctcaaagtgctgggattacagatgtgagccactgcgcctggctgaccacttttcttttaatttagtagtgtaatcaaactataatttaatgtgtcatatttatggtgcacttattacgtgccaggcactatgcaaagcatttgaaaatgcatcatctgctgactctcacaacaaccccaagaggtaagtactattatcagccctctttgacagatgagaaaagtgagaggctaagtaactgagcggtgatatagctagttagtggctgggctaggatccaaactgttgtctaactcctggaacactattaaccactccactatttagcctagtacatagtaggtgcccaataaatgttccattgacttgagactcagaacatggccagaacagtgttagatttgccatagaatgtggccactctgtctgtatctttggggtggccagtaaataaattattttgcattgaggaaccagttgtgtttggttctctgacagcctaagtttgaacccttttataactcttggttacttgttggggggtggagtttggttcatagcagggaagtatacttacagtattcataattactgttcactatgggtcagccatgctattaaatgctttatagccatgatttctgttctcccagccaccctctgaggcaggtatcatttagtagtaccattttgcagatggggcagctgaggactggctgtgtaactcattcaaggtcacacacagaccataagttgtgtagctggagttgggtgcccacctgtctcttgttctccagatgttcttgttattggagaatggctcaaatcttctgaatgactgtagcacaggcagagaggcaggcctgtccttacccagaggattcagcaggcacaagtgggtcctgggcttcagaaagtgttggcagttcatctctaggccctctgaagagcctgtgttgccctggcagatccagcgtgatataaagcaatggtaggagtaggcttaggcctggtagggacagtttaatgagactaggacctatttgtggaagagtgagctccctggtcatatttctttgttttcttgtctagattctctggctaaggagtcagggcttcaggagttggcagtctctcttccaggtactcagggcactttgaagtcagtgcccctgcctgagcatatcacatactggttgagagctcaggttctgaaatcaagcattttgggattttaacgtttgagcctaccacttaccagtttcctcattagtaaaatggagatcactgggagataccaactcatgagattatggtgagggtgtaatgagatgatgtgtctgaagtcctttgtatagttattggtccatcacaagtgtccggttgaatgtcaaccactgctaacacccagtccccccaccctagggtgtaaccttgagggcaaggatcctagccattatttcatctctggcatcttgcctgttgcctaccacttagtgggcatcccacatttgttgggggaacagatatttccaatgcatattgatgataatgaattatttgcacataaagatgcacaactcatagtcccctcagtaggggaacaccatgttcttttttatagtgttgggggttggatataatttctgttctagtctccttcctaaccatttgtgaagagccagcgcaggtcagggctgacagggatcagaggagacatggaccagctcatcaggctttgcttgaattccctcattatgtgattccatcaaaaaacactggatgaaagcctgccatgttgaaggtactgtgctcacctgctcacacctctgttctgagtgctatgcttagaacaggcagacagtgtgatttaataacgtagtttcagagatgggctctctccagtaccttcacagagtgtcctttaagactcaggttgtatttggttgggcagggaaattgtctagtattctggagcccctgagaaccttattctaatctgccttaaaacagactgatggagctagacagcactttagagacctatttgctattggatgaggagcctgggactcggaaagtgaatgtgactcttcatgcttacagagctggctactggtggggctggcacgagagctgagggatgttgttcacatcccacttcagtttatcctcctgccttttggcatgggttgaggatatttctaggaatctgcagacttaccaggtgcttcagaagaaatgggaaataatcacgatgataatagctgccatgtattgagtgttcactatgtgctgggcacagtttaagtacttgatatattattaattcacttaatcttcatacagacaatcatatgagtccggtactgttttcccatccttcagctgaggaaaccaaggtacagataggctaaataacttccccaagatcacactgctggaaagtgttaaagttatgatttgaacctaggcagtctggctccagagaccgtgctgttttattttttaactttttatcatggcagtgttcaagtgtaaacaaaaaaagaatataatgaacctcagtttcaagaattactgatgttttgccattcttttttcattccatcggcactcttcccctctgccactttttttttttggctggagttagaagtctgactgtgaaccactctcttgccctatgcgtgcccagcctggtctcccttcttctccagatgctgttggtgttgcatggccatagcacaggcagagaggttgtcctgtcctgaagccagaaaatttactaggcagaagtgggtccagggcttcagaaaatgttggcagttcagctttagggcctctaaagagcctgtgttgtcctggcagatccaggggatagtgaattaggaattagttttaaaatgaggccaggcgcggtggctcacgcctgtaatcccagcactttgggaggccgaggcgggcggatcacgaggtcaggagatcgagaccatcccggctaaaacggtgaaaccccgtctctactaaaaaatacaaaaaattagccgggcgtagtggcgggcgcctgtagtcccagctactcgggaggctgaggcaggagaatggcgtgaacccgggaggcggagcttgcagtgagccgagatcccgccactgcactccagcctgggcgacagagcgagactccgtctcaaaaaaaaaaaaaaaaaaagaatccctggctgacatttttagtttacccaaagcattttaggatttatttccaactgataagcgttcctttcctttccttccctttgtactcctttccctgtttgttttaacagaacacagcatatcatacctaacaaagattacagtattacttgaatgtcatctgacacccagtccagaatcacagttcttgattatttcaaaaatggctttaaaaattttatttattttttaatttttttgttgttttagagacagaacctcactctgttgcccaggctcaaggcactcctgggctcaaggcaacctgtcaccttagcttcccaagtagttgggacttcaggtggacaccaccaggcccagctcaaagatgtctttttaacagctggtttgttcaaatcaggatctatagaagatccacacattatatttgattgaaaaatttcctaaatttctttcagtctgtaagtttcctgcttttccttcttttaaaatgccacttagttgttgaagatcctggttctttgtcctgtagaattttccacattgtgggtttggctgattgcatcctcacgacatgtctcttctgcatgatggggacttgatagagtcaggttcttgttttctgtcttttccctttttttttcttttttttttttttgcaacaaagcattaaaggtggcaccatgtgccacctttaatggttattaatccatttatttccaggttattaatcattgtgctgtgcagcctgattagtcaggcctgggttataaatcatccctggagcactaggaggggaccctaggattggtccttaaaaccatatggactatatgtggaaggatgtttctccaaaggaaaattgtggtgacattctggaaaaaaacaggacctggaggctgggcagacaaaaaaagttgtatcatgtgaaactcatcagctcttctcagcaattaacgtctggattttgattacaggtgcagtctttgcaagccacatttggaacttttgagtccatcttgagaagctcccaacataaacaagacctcacagagaaagctgtgaagcaaggggagagtgaggtcagccggatcagcgaagtgctgcagaaactccagaatgagattctcaaagacctctcggatgggatccatgtggtgaaggacgcccgggagcgggacttcacgtccctggagaacacggtggaggagcggctgacggagctcaccaaatccatcaacgacaacatcgccatcttcacagaagtccagaagaggagccagaaggagatcaatgacatgaaggcaaaggttgcctccctggaagaatctgaggggaacaagcaggatttgaaagccttaaaggaagctgtgaaggagatacagacctcagccaagtccagagagtgggacatggaggccctgagaagtacccttcagactatggagtctgacatctacaccgaggtccgcgagctggtgagcctcaagcaggagcagcaggctttcaaggaggcggccgacacggagcggctcgccctgcaggccctcacggagaagcttctcaggtctgaggagtccgtctcccgcctcccggaggagatccggagactggaggaagagctccgccagctgaagtccgattcccacgggccgaaggaggacggaggcttcagacactcggaagcctttgaggcactccagcaaaagagtcagggactggactccaggctccagcacgtggaggatggggtgctctccatgcaggtggcttctgcgcgccagaccgagagcctggagtccctcctgtccaagagccaggagcacgagcagcgcctggccgccctgcaggggcgcctggaaggcctcgggtcctcagaggcagaccaggatggcctggccagcacggtgaggagcctgggcgagacccagctggtgctctacggtgacgtggaggagctgaagaggagtgtgggcgagctccccagcaccgtggaatcactccagaaggtgcaggagcaggtgcacacgctgctcagtcaggaccaagcccaggccgcccgtctgcctcctcaggacttcctggacagactttcttctctagacaacctgaaagcctcagtcagccaagtggaggcggacttgaaaatgctcaggactgctgtggacagtttggttgcatactcggtcaaaatagaaaccaacgagaacaatctggaatcagccaagggtttactagatgacctgaggaatgatctggataggttgtttgtgaaagtggagaagattcacgaaaaggtctaaatgaattgcgtgtgcagggcgcggatttaaagtccaatttctcatgaccaaaaaatgtgtggttttttcccatgtgtcccctaccccccaatttcttgtcccctcttaaagagcagttgtcaccacctgaaca

SEQ ID NO: 5970 - DNA, 6000 bp, Homo sapiens
cgaggtggggcccgggaggatggggcagggcaggggtgggggcagagggaccatggtgcctgtgcccatgccagtctccccacagctgcacctgcgcgtgcacgcggcctatggctccaccaaggacgtggcggtgtacagcgccattagcctgtcccccatgcagatctacatcgtgggccggcccaccaagaagctgcagcagcagtgccaggtgagtgggcgcattgtgggggcgggtgcaggcgggcagctcggggagccccagcctgtgacagccgtcctcactgaccccgcagttcatcacggatggctacgcggcccacctggcgcagctgaagtacagccaccgggcgcggcccgctcgcaacacggccacccgcatggcgctgcgcaagggcagcttcggcctgcccggccagggcgactttctgcgctcccggaaccacctgcttcgcaccatctcggcccagcccagcgggcccagccaccggcacgagcggacacagagccaggcggatggcgagcagcggggccagcgcagcatgagtgtggcggccggctgctggggccgcgccatgactggccgcctggagccgggggcagccgcgggccccaagtagggcaccgtgagtgcagcgcggggtctccatggtgctaggccagggtggccagccccgccaggaggcctggcctgggcacacgcactgacgtgggcctgggagattgtcccagggccttgtggaggacacgggccgcaccacacagtgctccctgccctgcctcacgtcctcgggcctgacgggtccggcttgtcatggaagctggcagggaccaccagccccaggatggcagagggaccagaacctcccactcagactggcccgggaggttctcccagacattttgccctgtgtggatctccaagtgtcctggtgccaggtgtgggcccaggcgcagcctgccacctccccatccactggccaccctcactcccaggtcccctcccatttggtagcagctccaacaggggtccagcctgcatcttgttaactcgagtttctcaactgttcaacctcactggttttgcactgatttttgagagcggagacccattaccacctcctatggctacagccccgttgacatgcatgaaactcagtacctgctgacccaggacctacaaccacactgaaggctccagtgcggcagagcctcgtgcaagcaggagagaaaggctgtatcttaatttctgcaccccggaccctgcccacctgtctgcctgccccgcctggagcccaggccagtgttgtttccagcctcaggccacgggctggacgggcctggccgcctcttccgctccctgccatcagtcaaggccgcccgcccacgtttctacgcctttctacttctcaatctgatttctatgaggtttttttaaacgagcaatccttggctgcttccttttcttaactctttcagtactgagagcagcccctccacactgaaaacacccagcactgtgacggagtccagcctggttctgggtcccgtgggccctgctcctgcccacttagcgaggcatgggctccttgcctcacctggccccggcaatcccactgaatttctactctggggtgggtggggcacacacttcggtttttttaatgccaattccgttttcatgccgaatctaagaagccacaacttgctttgtcagcttcagggcaggcagccatgacttcatttctcgcctgaacaaggaccatgctgtcctgcacgctgggtctgaccgtctgccctctctccccagcaccaagcgtgaccttggctgtggcgctcaacggccagctccggcggcccctctgctgctcctcggctttcccggaagtgggagagcctgcctggcctcggcctttgtccagcgaccaggctctgtccccgagaagctacggccgacctgggtctggtgttgggacgcatggaccgggctggggaggtgcacagagtgatgttaactttttcccgtgtgtagatatgtacagccaaagggtcgtgtaaatgttctgcaaaagtgggtctatacagagtgaaagctatttattttgtgcagagaaaaaagtctggagggatggaaccttcagggtttattcatatttaagatgtagctttttgttgtttcaggcattatgtataaagcaacgattattttatggaccaagttttcatgtaactgttgcagtgaaagtgcaatatctgacccccctgctcccagcaggaagttgcttggcccgacaatcacagcccctgtcaggggccctgtggccagtgcctcctcctctcttggccccaccttatcctgtcttgcctgctgcctgggagaccagccatccagagaagcacctggaagagtctcgggccctcctgcaataaaggccgggaggccctgtgggcagtgggctcagcctctccccaggggggcagctcccccacggctcctcactccccgcctgcctgcccagccgccagccatgccaaggacaacagcaatagtcccctggggctctcccagcggccctcagccatagatggcaaggtgggcagcctgcccccccatgggaagtctcttctgtatccaggtctgctttccacctcccttcagattccttttggcacattctcctcttgaggaagtaccagtctttctgaaactaagagagggagggcagcgtcctttaaaaataccaaaaatgtttacagagttgggtgctgagctgcagggctcaggcctgaccagtcataaccaaagggtgaggcaggccttgctgactgccaccccccaggcctgttagaatagaagccttagtcccactcccaccacacccccacgccccaccacctgccttctctttgatttctaaagagggattcagcagagaccccccacccctccctggctcggtctgagtcccactgcccaccccatcacagccttcacgtctcagcccctcccgtctggtctgtccgtgtgccgtctgtttctctgggccatgtgtgagcagtgtccccatctccccatccgtccctgctgtccccgcatcattgggcctgagtgtgctctgtatacaacgtcatgtctgttacaccaattaaagaagcgggaaggcttccttctggatctctttactgcagtggcgaccgtggggcatggtgggatgggggcatggaacagtaatgctagtgacactcacagtgacgccaacacgtgagtgcggggctgactctaggcctagcctgcttctagctccttcctgggatggaactcagtttgccctcacagacctcagtgaaacgggtgctgtgagcctccctgcctcagagtggaagacacagctgggcagtgagagccagacctgccacacaggccacccagccccagcacctggctctgcactgctgcgatctgtggaatgaacatggcaggggaagccgactctctccatgcctgagtgcatggcatttcagagccagctctctgggtttggggttcagctggcatgaggtctggtccaggcaggctgacctgaagaggaaggcacaggcgctggtgtggcctgtgctcacgaccaccagaggacaccccagctttgcccaaaagctcccggagcccttgtttttccctggcagtcatgtagcacccttccctcccactcagcacaaaaagccacagaacagagaaagtctatccagggggcctttaatagctgagaagtgctgctctttcagatgggggtgccaagcaggccggtgaccccaacctccaccccctgcccctgagaagagactgggctgggccagagaccaatccacgggggaaaggccaccagcacccatcaggcttcccactggcaccctgaaacctgcccaggctgggccgccagcgtcgtccacaggccttggccagcgggggccctcagggaagcaacccagctcgcatctggaaggccaggcagtcccctcgggtggcttgctggggaagaaagcacacaggaggaggggtacatcacaaacagagctgggggcggatggcaggcagaggggccacacccaccttgttgatctctctgtgtcgttctttggttacgatttcctctaggacctcgccatctcccttaataagcctgggggtgggagggtctccgttcagcaaggaataggcaggtcccctaatgccagaggagcagaaccacaagcagccggcagaggggtcccagggctcccaccccgcagccttgagtggacagaccctggggcctcacccactctccctgatgaaggcagtggagctgggctctgccttgccagcctcagcccggccaacaacagccctttcaagagcctcctccaggcccttccagcccctgcaactacttactccaagtgaccgtatttttgcccacatttggcctttttcaggcaccaggaaccccgcccggccccactcctcccgagagcacacatcttcagccaacactcccagatcctgtggtgtaagtcaggccgaaagctccccacctggtgcgccccgtctcagggtccaccaccttgcggatgatgctctgccgggcatcccactcctccttggtcatgggcttcatggcctggattcgggacttctgctcatccgtcaggactggaagggaagacggaggtggtggccaggccttgggaagcgaccttctccctctcaggtgctgggcagcacagtacctgggccatcctcttcctccccagctgatcggtgccactggtccagcgaggggcccggcagagcctccacctgctgtgcttccgccttctccttgcccttcttcttcagcttcttcctcttcttcttcttcttcctcctcttgtccttgtacttcccccgcttcttccggccatcactggaggaagaggaggaggacgaggaggaagaagaggagctagaagaactggaagaagaggaggaggagctggatcttgttctcctccgggccttctgcttgcttctctctgtgatgcagggagaaggtgaggctggaaggccaggaggggaagaggtaaaccttcgtcccctgctctggcctggggcaggcacagaccggctacagggtgagcgcttcctgaggggctttccagaacagagatggagcttcccagaggagccccttcctggctcctgcggcgcctggccctcacatctcaggcccggctgcacagaggcatgactgagcgtccccgaccactgctcgcccgacttccccgggtagtaactgcgcctcctctccccgatgcctgtggtcctcaccctccgccccaggggccgtgctggccttgcgaccttgggatgtggaggccgagcagttcctcgaggtgtctttcctgctcttcttctttctcttttccgacccccgtccccgggaccggctgcgactcctcgagcgcttgcgggagccgacgtgagccatggcgccgcgggctggcgacgaagaagacgcgcttgagccgaagcccccaaggccggccgcgggcgggctccaagggtggctctagcggggccggggcctggcgacgcccagtacccgtcaccgtcccgggaaaatgagcgaccctcacccacccccagcgctggggaccccggttttctccgccgactccagtccccgcagcggtgcctgttaagggcccgccccgtgcccggaggccccacgcctgcgcacccggctccaaacccctgggaactggccgccgtccgccgcgagtggcgtctggggcgctttcccgcgctctcctaccctccagccccgcgcccttcgcggcctcgccgcctcaagggggcccccggggctgctccgttcccacctcgaccgccctgcgggccggacagcccgccccgcgccttctcgagaggaagcggcggcgaggaggcttccggccggggcgctgcgcgggaggctg

SEQ ID NO: 5971 - DNA, 6000 bp, Homo sapiens
ctgttctcccgtcttccaggtacgcggtaggatctcccttcccaccccactgcgtgaaggggcccgtgtgacggtctctgtccagcaggtgactgctggaagcagcgggagtcacttcggagtggggtgttgacagcgtgaagcccctgagcgctcctccccgcccagccatccagcattcgcgccgggggctccgagcgactccagtcaacagagctccgcggggacccaggtggacacgcaatcccatgataaattaccctgtgtcgtttatgccgttgaggtttggggtttgcttgtgattacggcataaccctgcctcctcgggggacacacttagatgctaaaacatggcacgccacgttcccggggtgatgcctgagtgagaaaatgcctttctctccatgatgcggccagaaagcacttcagtgaccttgagttccaatctgtgcttcgaggaaagggccatatccaactgggggtgaatgctgttcagatctgtgcaaaataatcgaggctacacctcccacagggcttgagctcatggacattgaagaaccagcatttcccttcactgggctcattttaaatcccacgctgcgtcctccatggcccccacccacgcaagagcctgcctctccagagttctgcagtgacaaccacgtgactccctccccagtgatgctgccgtggtgcgatcttggctcactggggggtgatgctactggtgagggtttctcccagtgccgagggtcggcaccccagaccgcagctacgttcagggactccgcaggggctggttctctgagggaggccctggaaggccagggcttatcaaagacagggtggggctggcactgtggtgctaagatgaggggcagctgtgggtgtgtgcgccttctcagacaggttcatctctgcaccccgtgggtacatgctccttctcagttgggttcatctctgcaccccgtgggtacatgcgccttctcaggggttcatctctgcaccccgtgggtacatgtgccttctcagacgggttcatctctgcaccccgtgggtacatgcaccttctcagacaggggttcatctctgcaccctgtgggtacatgcgccttcccagaggttcatctctgcacccccgtgggtacatgcgtcttctcagacaggggttcatctctgcaccctgtgggtacatgcgccttcccagaggttcatctctgcacccccgtgggtacatgcgtcttctcagacaggggttcatctctgcaccctgtgggtacatgcgccttcccagaggttcatctctgcacccccgtgggtacatgcggcttctcaagacaggggttcatcgctgcaccccatgggtacatgcgccttctcagacaggggttcatctctgcaccccgtgggaacatacgccttcttagcggttcatctcggcacccctgggggctgcctcacatgttacagctcactgagcattcagcatatatatatttttgtgttttgtttgttgagacagggtctcactctgttacccaggctggagtgcagtggtgcaatctcggctcactgcagccttgacttccccaggctcaggtgattctcccacctcaacctcccacgtagctgagactacagctgtgcaccaccacacccggctaattttttgtattttttttcatagagatgaggttttaccatattgcccgggctagtcttggactcctgggctcgagcaatccaccggcctcagcctccccaattgctgggattgctgggggaggtcaccgcacccggcctcccatatgtcctaaaaatccagcaaatgctagtgcgccagactatcagatgcattctcttccatgtaaagttccccagtattttcccatgtccaatgtgcttgtatttccaatgaaatgtacccagatcttgacggtagttaggccacatcttttcctgctagattttagaatgcagtaaaatgtatttacatgaatgaaatgttttctcctacaaaaccactttaacatcattttcattaaacatgtaatgaaaagtgcttgatgttttctctggagtgatcatgactaataaagtcaattctggagcccaattgtctgggcttgaatcccagatccacgctttgccattcacgcgaccttgagcaagccagttgccctttgtgtgcctcagtttcctcacatggaacgttagatgacgccagtgtgtattacaccttaacgtggctgctgctcgtattgaccaggtgataggcatagaagaccatgtctggtgaaacctttgcactgcgtgtgtgccagctacctgcatcattattccagcagctgtcctcgtaacgtcgggaaacattttacaacctgcattttataagcagaagaatacggcattttcaggagggacacgggaatggctattgatcaaaaacagaccagggtttatcacactggctgcatagtaatcacctcccggatgattaaaaacagcctcccaggctctgtctcagaacaggtgatacgtatctacggtaaacgccccgcagacagctgcctccgtcccagtgccgggtcctgcctggttctgatcctctggatttcctgggataaacatcctgaggaagaaaagaatggctcaacaaagaaaggagaaatgggtgttcggctcgcccagcctcagccaaggggcagaaaacctccaagctggataggctgtcatgcccgatgccaagaaacggatatttgaagaatagagtactaagctcagagccagaaccccccagatccccctacacacatgtgcatacacagacacacacacacaggcacatgcacacacagatatacatacaaacacacacatagacacatgaacacatgaacaaatgcagatatgaacacacagacatgcacacatttgaacatgcacagaccacacacatgaacagacatacatacacagaaacatgcacacacagagacacatggagagaaacatgcatacatgtgaacatgcacagacatgaacacacatgaacacagagacatatatacatagaaacatgcacatatgaacacacaaacacagacatgcacacacagacacacagacactcgtacacagatacacagacaaatgcacacatggacacacaaacacagacacatagatgcacacagatatagagacacatgcacacatgaacaaacagagatgaacacagagatatgcacacatgtgaacacacacacagacatacatagacacatacacaaatacacacaggcacagacagacacatgcacacgcatgaacacacacagagacaatgcacacagacacaggcacatgcacacacagatacatgcacacacgggcacacagacatgcacacagaaacacgtggacacatgcacatgcatgcgtgctgacaacacagacatgcacatatgcagatacacaggcacacagaggcaaatgcatgcacactcatgcacacacacggacacacacacagccaagagctgtgaagccccttgccttactcatctctgtatggagagccaagcacagccatgctcttaataaatgctccgtcatttattcactcatcccgcaaatgtttactgaacaccagctatgtgtccaatctctgggaacacaggggtgaaccctgcctttgggtgaaactcctgcctcttgggtgcttgcattctgccagtggaagttgggcccctgtgctgcgcggcttggctgacatctcccctggcttccagggtctcctccacaaaacgccagtgtggggccagatcagagcctgggctgggggtgggggcagccggggtttgcggcctcgggtcttacctgcgagcctggctcagggacggggccttctccctcctggtggctccagggccccctgctgttcccggaggtccggctgcatcccaagccccaacccccccatacccgtcccgggactcagcttccccagtcctcagccctggacgggggagagggagggaggccgggagctcggcttggggaggggtgggcaggagactaccagagtggccctgacccgggtcctgccccggccgccccctcccccattcactcccggcgacaccgccctggccaggcattcccggaggccccgctgccctcgggtcaagcttggggtcgattcggaccgtgctggccgttgggggccccgggcgtctggcgggtcctggggagggagggtccgcgcctgccccgcccccgctccccgcgcccgcgcgcccttggcccaggctaccccgcgcgccccgccccccgtcccccgccccccggacctgctgtcctggggtccccgggggggcgcggtggggggggcggggcaggcgcgcggggcggtcccggggggcggccttgaggggtgggggaggcggggcggggcggtcctggggccgcggttgcagatgaggtgaggtgaggccgcgtcactctgcaccggcgcggtggctgcggggcgggcaggacaggagccggcacagacaccgagcgccgcccgcccgcgccttccccgccgccccccggcgcccccggcccccctcaccgctccccggggcggggccgcgccctctgagcgggggatgccggccgcgccccgcgaccccagccccgggcagccctctgcgctctgggggacccccggcggccgtggcccggcgcgctgagctggtgctgaagggacagctccggccgagccccgcagcccccgcagccccgggcggctcatggtccccgaagccgaagctgaagcccaggcccgggcggggatgctggggatgccccgcgggtgaggcccccgctgcagccgtgttcatggcggtggccaggaagatccgaactttgctgacggtgaacatcctggtgttcgtgggcatcgtcctgttctccgtgtactgccgcctgcagggccgctcccaggagctcgtgcgcatcgtgagcggcgaccgccgggtgcgcagccgacacgccaaggtgggcacgctgggggaccgtgaggccatcctgcagcgcctggaccacctggaggaggtggtctacaaccagctcaacggtgagcgggggcgccggggcggagtgggggcagccctgcccgggacagtggccaccccgggcgcgatgggtcaggccggcctcgggtgcgcgcccctctgcgcccctgtgggagggaatatacaggagagaggagagggaagggccgcggaagccccttcagcagcgggcagcaacctgggttccccccgcaccgggcacccacccctccagtggagacttgaggaatccccctgcccccacaatgacgcaaacttgctctccgagggaacttctgcagaggatctttggagctgctctagaagcaggcagtgcctaggtccaggagtgtggggtggggggctggcttggcgctccaggagtgggggccgtcaggtttaggctgcgccgacccctccactcttgaaggtggggaaagaggagggtggggacgccacacttgggaggctgctggtgcagtgtcctttgcccctgaggttcgaaggcaccccaaatgcttcgaccactgggctaggcggccccctgtcctgggggtgcccgaggccgcgttagaaagttgttatgggagaagcttgaagctgagacctgagactcctgggaggatggagttgaggatcatgcagggcttggcaggactcattacccaggggggcccaagttgtggcacctgggagccccagaatccatgaaagcctccagctcccggtgggtctgtttcatcacgagcggacgtaggtcagcccgaggagcagcaccggcatcaccacaggtcagggccagcggccacagctgctgagagcaagcacttttccagctgctccaccttcccggaggagcagccgcccccaaggccactctgcaccggggcgccaggaa

SEQ ID NO: 5972 - DNA, 6000 bp, Homo sapiens
agaaaagatgtctctgtaacatgcggtgctatttgatggcattttacccattcaggttttatcctgagattgcagcaattcagtcacatcttcaggctccacttctagttctagtgcccttgctgtttccaccacatctgcagtcaagttctccacggaagcactgaatccctcaacgctgtccgtgagggtagaaatcagcttcttccacactcctgttaatgttgatattttgacccctccacccatgaatcatgaatgtttttaatggcatctagaatggtgaatcctttccagaaggttttcagtttactttgcccagatccatgagaggaatcactatgactatggcagttgtacccttacagaaggtatttcttaagtaataagacttgaaagtcaaaactagtccttgatccatgggctgcagaagggatgttgtgtctgcaggcaggaaagcgacattcacctccttgtacatctcccatcagagctcttaggtgatctggcgtattgtcaatgagcagttaaaaaaaatatatatatatatatatgtgtgtgtgtgtgtgtgtgtattttgagacagaatctcgctttgtcacccaagcaggtgtgtagtggtgcagtcttggcccactgcaacctccgtctccctagttcaagcaattctccagcctcagcctcccgagtaactgggattaaaagcacgtgccaccatgcccggctactttttttttttaatgtttttttttttttttttttttgagagacggagtctcactctgttgcccaggctggagcgatctcggttcactgcaacctccacctcccaggttccagtgattctctgcctcagcctcctgagtagctgggactacaggcacccaccatcgcgcccagcctatgtcatgtttcaaaaggatctcttcagtagaagaagatcaataaaatgaccagcgtgttcttcttatacctttaaggttatgtttttaaatactttaatctggctgggtgcagtggctcacacctataatcccagcactatgggagggtggggcgggcggattgcttgaggtcaggagtttgagaccagcctggccaacgtggagaaaccccgtctctactaaaaatacaaaaaattagccggatgtgatggcacacccctgtaatcctagctactcaggaggctgagacaggagaatcgcttgaacccaggcggcagaggttgcagtgagccaagattgcaccactgcactccagcctgggtccatctcaaaaaaaaaataaaaatgcaagtatgaaaaatgaagagttatcctagcagttgtaagattagtgggaagtataacatttataacaacaaaaaggataaactgagaaataagttagaatggccgcagagggcctgggttctagatgggggtggggtagctgctctgttgaggggcgtgcatgtagggtccagccccacagggtcagtgggttttctccctgtgtgcggagacgagagagtgtagaaataaagacacaagacaaagagataaaagacagctgggccggggggaccactaccaccaagacgtggagacaggtagtggccccgaatgtcaggctgtgctgttatttattggatacaaagcaaaaggggcagggtaaagagtgtgagtcatctccaatgataagtaaggtcacgtgggtcacgtgcccactggacagggggccctcccctgcctggcagctgaggtagagagagagggagagagagagacagcttatgccgttatttctgcatatcagagacttttagtactttcactaattttgctactgttatctaaaaggcagagccacgtgtacaggatggaacatgaaagcagactaggagtgtgaccactgaagcacagcatcacaggttgatggttaggcctccggataactgtgcgcgggcctgactgacgtcaggccctccacaagaggtggaggagtagagtcttctctaaactctgctaagtagtgggtgtttttccttgacactgatgctaccgctagaccatggtctgcttggcaatgggcgtcttcccagatgctggcgttaccgctagacccaggagccctctggtggccctgtctgggcataacagaaggctcgcacttgtcttctggtcacttctcactgtgtcccctcagctcctatctctgtatggcctggtttttcctaggttatgattgtagagtgaggattattataatattggaataaaaagtaattgctgcaaactaatgattaatgatattcatatataatcatatctaagatctatatctggtataactattcttattttatatactttattatactggaacagttcgcgtcctcagtctcttgcctcggcacctgggtggcttgccgcccacacgtgcaagcagatgtgggcaggcggaggaaattatggatttaaggtggttatagttcaacagaatgttcttcctttttgaagaaatttttttttgttttggagacagggtctcactctgtcacccaggctggagtgcagtggcatgatctcggcttattacgacctccacctcctgggttcaagtgattctcctgcctcatcctcccaagtagctgagattacaggtgtgtgccaccatgcctggctcatttttttgtatttttagtagagacgggggtttcaacatgttggccagcctggtcttgaactccttacctcaaatgatctgcccgcctcagcctcccaaagtgctgggattacaggtgtgaaccaccacgcccggccttgaagaaaatttctatgtttatccaaaaaaataaaataaactggagagtagccaggaaagttctgttgaggaagtctgtgggtggcaagccactcaggcaccgaggcaagagacagaggacacgggctgttccagtataataaaatataaaacaagaatagttacaccagatatagatcttagatatgattatatatgaatatcattaatcattagtttgtagcaattactttttattccaatattatgataatcctcgctctataatcatagcctaggaaaaaccaggccatacagagataggagctgaggggacatagtgaggtgtgaccagaaggcaagagtgcaagccttctgttatgcccagacagggccaccagagggctccttggtctagcggtgaagccagtgtctgggaagacgggaagacgcccgttaccaggcggatcgtggtccagcggtagcaaaaggtgtcaaggaacaacacccactacttagcagaccgggaaccggggggcgggggggcgggggtgggggttggtgtctccctttccccgggggagtttagagaagactctgctcctccacctcttgtggagggcctgactgatgtcaggcctgcccgcagttatccggaggcctaaccatctccctgtgatgctgtgcttcagtggtcacactcctagtctgccttcatgttccatcctgtatacctggctctgccttctagacagcagtagtaaattagtgaaagtactaatagtccctgatatgcagaaataatggcgtaagctgtctttgtgtctcctctccctctctgccttggttgccaggcagggaagggcccccgtccagtggacacgtgacccacgtgaccttacctatcattggaggtgactcacattctttaccctgccccttctgccttgtatccaataaataacagcgcagcccgacattcagggccactaccggtctccgcgcattggtggtagtggtcccccaggcccagctgccttttctcttgtctctttgtcttgtgtctttatttctacactctcgtcgccgcacacagggggagacccactgaccctgtggggctggtccctacagaagtctgatgaggaggtacttgctgggatgtgttttaaacgtgttgaggtcacagtcactgaagagtgtgctttagaccagaggtggtcatgctggtcactagagtggggccttgcggcagtgagaccaccacggatcggaggcctggccgcaccctgtgtggtgaggggctggggaggtggtgctctctggttgtcagcggagggagtagtgatcggtgccacctttctgaatggcagttttaagtatgctgcttgtggattttaaatgtaatttttgtacttttgttttcttctcagtccagtcaacctgcaaccaaaacgagactttttagcacgcttgatcctgagctcatgttaaacccagaaaacttaccaagggccagtaccctggctatgacaaaagaatattccttcctgcgcaccagtgtccctcgggggcctaaggtgggcagcctggggcttccggcacatcctagggagaaaaaaacttccaaatcaagcaaaatccggtctctggccgattacagaactgaagattcaaatgcggggaattctgggggaaatgtcccggctcccgattctaccaagggttccctgaagcagaacagaagcagtgcggcgtccgttgtgtctgagatcagcctgtcccccgacactgacgaccgtctggagaacacctccctggctggagacagcgtgtctgaggtggatggaaatgacagcgacagctcatcgtacagcagcgcctccacccgagggacctatggcattctgtcgaagacagtgggcacgcaggacaccccctatatggtcaacggccaggagattcctgcggataccctgggccagttcccctccattaaggacgtcctccaggccgcagccgctgagcaccaagaccaggggcaggaggtcaacggggaggtgcggagtcggagagacagcatctgcagcaggtggtggggacagcagaggtgggcggggtgggtggaggtgggtggggccaacagaggggggtgtggggcgggcagaggtgggtggggcggtagcagaggtgggtggggccaacagagggggcggggtgggcagagacgggcagggcaggcagagggcctggcctgagatgttgcttcccgggcccacggctctccgcactggaacaggtgatacacagcttttcttcctgattctatccttagtcttgacatgaacatttaattcataacaagtctgctgctttttaatcagtagaattagatcagcaatggtctgtgttactaaaatatccagtctcccgtttacatagacttgtcactaagctgcacgacgcttgcatgtctcatgtttctgtaacagttcccactgcgtgaggtgccaactgttggcaggaatgttcatccgtgcatcatgcaagcctcagctctctacttaaatctcttacttaattttaaaaaattgggagagagcagcaggggtgtgtggaatttggagaatgtggaggagtgtgaaagaaaatgaggatggctcgcacaggcctgacccgtgcctttgtccccagcgtgtccttggagagctctgcagcagaaacacaggaggagatgctgcaggtgctcaaagagaaaatgcgactcgaaggacagctggaagccttgtcactggaggcgagtcaggtaacggacgttcgactgacatctcagcgtgcggcgaagtcggaaagcatgtgtggctcctctgttgggtacgaggtttcacagatgtggttgggaatcagccgccgcagcatgtgtggcagccgagggttctgcatctttacgttttttgtctacttgtcagccttagaaagagttgtgagttttctgcctcatcgtgcatgggcgtgtttctccctgcgtctctaccagaatatttgctagatgttaggtgtctcacagtccataagagtcaaattctcttggtgggttgcagctttttctggcatggtgaaccttttttctttgtagtgatttctgctttttctgatactaattgtgctgtatcagagaaagctgcacacgctggcttggttagcatgtgccagaaa

SEQ ID NO: 5973 - DNA, 6000 bp, Homo sapiens
cgtctgtgcctacgaagccaagtcttgtgaagggcatgaggcagacgactgaagaataaaccagagcaagctggggagcccgggaggccacatgcagaagacaacaccgtctcgcaggactggcaacacctagatcaagcttgtccaacctgcagcctgcacaccgcccaggatggctttgaatgtggcccaacacaaatccacagactttcttaaaatactatgagattttgtttggatttttattttttagctcatcagcaatcgttagtgtattttatgggtggcccaagaccattcttcttcttctaatgtggcccagggaagcctggacaaccctgaccctcctcccctttgcccccagactctgggcttccagccccgagggtaagaagcagcaagctagagctacctaccctagcacagtacacccctctgagggggctgacttcatctgccagccccgatgataagacaggggtgcaggagagtagagagagggtgcatgtagggctgtcttggccaaaggcaggcaataaagctgtacttttgctttcttaggtgataggagaggtcccaatgcccagcagagcccttgcttgtcttgctgctgcctgacatttcacataagaatgttctttttttctgcaaacctctggtccctatctaaaggcaggcagatggttctggaagagctaaccctttgtgtaattatgcagaacgggagccacagcttagatcacagcctggtgagtaaacacaggttgaagagaggtgtggtgagtgtctaagggcgacactgggcagaggggctggcacgaaggtgggcaaggagggaagaaggtgaaggcggtgggcaaaagagtggggtgaggcccaggctggaagcctcctgccacccctactctgtcccctcccactgcgatcctctttcttccctccgtgggccctccaggccaggcaggcggctgctgaggacagacgactcaggttagaaaaagctctcttgacatttggagaacagagcaggatttggctcctctagtggagcctcttgttctcagggaaatcattttaaagcttgggctggtgccagcaggagccatttatagcccaaagggcttaggttcactttggctgcctggtgcagagagtgctggcttccctctcccctctgcaggctgccttcccccttcagatgtccagcaccttcactctccttccttaaagcttctttttcctctcctctaccacctctttcctattctcttggaggttccagttccagatccacctccggacctagattcccctaggtgagcctaaacaaattcctttccttctgtgggcctcagtctctccatctgcaccctgacacctattgtctgctctctttaaactctgtcaccttggagaggtgcctgcctgtgcctacctccactgaagcgctctcctctgtctagttattgcctgttgactctctttctgccctcaacactgggcttcctgcctgggccagctgtgttacccttttctgagcacagggcctggctcctggcagtagctcagttaagcttggttgggccgaactgagctaaccatggcatcagtttcaagagcacaggttttggcataaaacagatactggttgacatcttggctgtgctgcttgctatctctgggccctggcaaatgactggactttgtgagctttagtttcctcatctgtaaatgtcagttactatgaggatttcacgagatggtgtctatctataaagtgcttggcgcagcgcctggggcgcagtgggcccttagtcaatgttaggtctcatcaccatcatcatcctctgccatctacctgcattttcaagggatgtgggttaggtcaaacatgctcccccaaatccccacccctgcttgtggaaatccgacccacccttcaaggacgagctcacaagctcacatgccccttcttcaggaagccagcttcctcctgtctccagctctgctgcgtccataacctttcatctctgcatttagtgggcccgaggcctgttcaccccagtagagtgggtagactaagacaatcgcactttatttattagggagaaaaactgtgctgaagctgccctgggtaaggccagtctgggggcggaacactgtgttgggggagtcctgatcagccgctggcgtggtgagtcgaaggcaaatcacaagtattgacagtggagggtgattctcaccatatcagggaggcagacaacatcgggagacctccagcaagtaacagggccctgggcctgggcctttggacggaggtggggaaagagcaaggcagggtgctttctctgccctggggcccaagaacccaacaggacaaggctggaggcgatggtgcagaaacaggtaccagaaccgactccagggcagagcaggcagggccagacctccagggtgatgtgggcacaggaaccctggaagggactgggggcactggaatgtccagtggggagggacttgggcacagggagcaaattggaggtgagaaagctgcagccatgagcagaccaagacgctgatgttgagagtccagctgcccatccgagtgtgattccaaatccttttgctgacttctcagactatgtatacaagattggagtttgaaagtcaccttcactcagagactctgcttgcctggtgtggcttagggaggagttgagccttctgactttacagaggagaccactgtcatcccccaagacctatcccctgtgctcctcaagtctcaagagccttcagttgtggctgaacaatcatgtatatctcttggagatgcatctggattcctataagtgttccaatttgcctgcataggatccatagaatacccatatgtctcttgtttctttcacagggctggcacagtgccttgctgttgtagaagttcagcaggtagttgtagaatttaaaagcatcaccccatgtagctgaatgttcagggatcacaggccacggctgcttcccacccactcccagccttcagggagagggtatgcctgtcagccaatgggcagagtgccaggctgcagaccagggtctgggccagtcatttatttgtccccatgacctgtggctattgaaatgaatgcccccaaatccatgcatccttttgcctcctgcatggcacacggcagacacttcataagctggctgttggggagagtctcagggagccccatggaaaagagaaccttggaatcagagttgaatgacagcttatgggtgctggaggcccctgtgaccttgaccgtgcacaatgcccaggccagctaggactttttcctctccttaatatatttaaatggagtcaatactggggtcagcttcatgcacacagccttcttcagccctagaggtgaggtgatctgcacagcttcctgagcagggtcctccctggtggctgaggtgtggagggccccagccaggctggatggaggttgactttgtttcggagcccttgcttggacaccggagtgcaatgctcgggccacacatccttggaggaagggcagcctggaagtggtggaacaatctgtcatgatcatatttttgtgtaatcaaacactcttcccataatacctttaatggccgcatagtgttctattgtgtggctacaccacagtttaatgtctcactttgtggaacatttcagttgactcctaccttttgtcactaaggacagcattgtcatgaaattctcaacagctacatcattatgatgatccatgattctcttcttatggtaaagtccacagaacttcaattgctgggttaacggatttgtgctctttaacacttcaagtacattttaccaaacggcctttctaaaagtcttgacctattttcattcccactagaaatgtgtgaaaggacctatctctctgcaactcttacatatgcagagctgtggttgttttggtgggagaagagcttatctggtatttaaaagctgtaagttttctatttgaatttgaatttacctgatttctaatgaggttaaacatttttgttgcacatcaacctgccatttgtatttcacatgtacttgcctcatgtggacagattatccaatcctttccccaatattacattgtgggtgttcatctatttttgtattggcttgtaagagctctctacgtattaagggcattaacctttgtctgccacatatgttaaaacgtacttctcggtttatcatttgccttttaattttgtttatgatatttattgtctggaactgcattaatgtcttcttgctagacatcttctcttatatgactcaatgacatttcaaactctgcatatccaaattgaaattcattatttccccccaccccaacctgctctgcctgctgactggcttatttttgttaatgtcaccaccatttccctagtcacccaggcttgaaatgttgaagtcatctttgattccagctcctctctcttcccctacattttgtcagttgccaaagcctgtagagtctatttctgcactttctctggcaggcagcccctcggacaccccagtagttcaggctctcattatttcttgactggactttgaacatagcctccaaagttcatactttgcctctcttccattcccttcttttccttggcccctcctgtgtgctgctaccacatctatcttcctaaagaggagcccaaacacagaagtcactgcttccctggttacaaaccggcaatagctccccgttgtcttttgtatttaattacgacctcttagcctggccataatttcctttcaactgaatctctcactgtctcagccaagctgctcccaaacaaactcactgctctcccgccttttggttgctcaagccgtctcttcctccacctgccaaaatccgttcaaaaagctcccacctcaccccacctcctgctatcccagggcttcctgactctctgcattaaagtgaattctctttcctgtgaacctccagaacaatttgcttgaacttctcttgtagaacaaaccttattccagcatctatcagagacaataagggtcttagaatctagaaaacagggtcctgggagggcacagttcccacacgtctatttcttccacaggacctgcacgctgccttgctgttggagatctgtgcagtaggcagttgtggaattaaaagcaacaccccatgtcgctgaatgttcagggatcacaggccactgccgtttcccacccactcccagcctccggggagtcttagcctgtggagtcccaggaagcacatggaaaagagagccttggaaccagagtggagtgacagctaaggggtgctggaggcccctgtgaccttgaccatgcacaatgcccagaccagctccgactttttcctctccttcacatatttaaatggagtcgatattggggtcagcttcatgcacggagccttcttcagctttagaggtgattctgcagcctgcacaggagtgtgcacttgacacagtctatttttagcctcccagagaccgtgaccaacatcccaagctgagagtgggcacacctgctgcattctaatgaggcagccccactcgcctttgccagcccgcccgggatctcaccgacgtgaaatctgatgttgctaaactgggaagtctgcttatttcccaagggcggtagcctaggtacactgggaagatgggaccatcccactgcccccagctcactcccctgcagccctggacacagaacagtcttgggactgcgcggagtgattccacggaggggttgaaataacttggctttcttgatcttgctgtgtcctaggattcccctgtttctcttgctagaaaggagacagtaagtctgagctgacccagctcacagacaagaaaatcgagacatagaacaaggacatgatgtatgtaataatcataagcacttactatgtgccagcctgttctaaagtcttt

SEQ ID NO: 5974 - DNA, 6000 bp, Homo sapiens
acgtgttagaaagttttcttttcaagctgggcacggtggctcacacctgtaatcgcagtacttccggaggctgaggcgggtggagcacttgaggtcaggagttcgaaaccagcctggcatcatggtgaaaccccatctctactaaaaaatacaaaaattagccgggcgtggtggcatgcgcctgtaatccctgctactccggaggctgaggcaggagaatcgcttgagcccaggaggtggaggttgcagtgatccgagatcaggccactgcacgccagcccgggcgacacatgtgacactcgacctcaaaaaaaaaagttactggaatactgaagctgagagagaggttacgtgacctgttgaagatcacacagccactagaagtactcatacagttttttttttttctgcgtcttcacttttttttctgcatttcccatatgttctaactaaaatgactatattttcttttctttttttttttttttttttgagaccgagttttgctcttgttgcccaggctggagtgtagtggcacgatcttggctcaccgcaacctctgcctcccaggttcatgcgattctcctgcctcagccttcctgagtagctgggattataggcatgcatcacaatgcctggctaattttgtatttttagtagagatggggtttctctatgttggtcaggctggtctcgaactcccgacctcagatgatccgcccgcctcgacctcccaaagtgctgggattacaggcatgagccattgcgcccggcaatgattatattttctaaactaaaagtctaaagctcatgattttacaatagatattttctgtttggtaagttttagtgtattaaaaatatcttttaaattttgataaatctagtacagaaatacatgatttttttacaacttgaactatagaagtatataacgtagacataaatcccttaaaatcctaacaatcgaaagcctaaagctcatgattttataacagatattttctgtttgggaagttttagtgtataaaaaaatcttttatatttttatagatctagtacagaaatacatgatctttattagaagtatataatgtggacattgaaaatcccttaaagtcctaacataatcaatatctataaatggcttgttgtgctgacatcatattataggatatcattgtcagacttgttttaacactgtttcttttccatttaataatgtttgaacaatctttacagttcttggaaattttgacaaagatttaaaccacgttattggtacctttaataaatggtatttatgagaaataataacttacaggtgatcaggaccatatgagaaaacccagttttcttgatgctctaattaaataccagaaggtggccaggcacggtagctcacatctgtaatcccagcactttgggaggccaaggcaggcagatcacttgaagtcaggagtttgagaccagcctgcccaacatggtgaaaccgcatctctcttaaaaatacaaatacttagccaggcgttgtggcatgtgcctgtaatcccagttactcaggaggctgaggcaggagaattgcttgaatccgggaggtggagattgcagtgagctgagagggagccattgcactccagccttggtgacagtgagacttcatctcaaagataaataataaataaataaataccaataggtatatgtcctatagtagatcttacaggtaacctgtaattacttaaaatcaaagttctttttacttttcatcatatacaatctctagtttatttttattttagtaatgcagctataacctcatgaagcctattttttttgtataattttataaggggtggggggataagaaatgaaacaggtgtcctgggcctagacagattcatttccagtagtaactaggcaactctagggtgtagaaggaaaaatactagattgccttctgtagttttcattcctactctcctcctcttcttccaggtgattgtagagaaggctccaaaagccagggtgcctgatctggacaagaggaagtacctagtgccctctgaccttactggtaatgctctttgccttccctgacccttcctccggtgaaaaaactctctagatcctcattacatgcatgagattgtgagattgagaggcagtacatacttgaaggaagtgagtgggatgctctggagttatctgattaaaaaatgactcaggctgggcgccctggctcacgcctgtaatcccagcactttgggagactgaggcgggtggatcatgaggtcagatcgagaccatcctggctaacacagtgaaaccccgtttctactaaaaaaaatacaaaaaattagctgggcttggtggcgggtgcctgtagtcccagctacttgggaggctgaggcagaagaatggtgtgaacccgggaggcagagcttgcagtgagccgagatcatgccactgcactccaccctgggcaacagagcgagactcggtctcaaaaacaagaagactcaatagttctttcccatcaccatgtcttgttggattttgacacagcaaagcataagacattgaaagaaaggatcagatgcccattatttaaaccacttttattttaattaattaattaattaattaatattattatttgagatggagtttcactcttgtagcccaggctggagtgcagtggcatcatcttggctcactgcaacctccgtctcctggattcaagcgattctcctgcctcagcctgccgagtagctgggattgcaggcacctgccaccatacccggctactttttttggtatttttagtagagacagggtttcaccatgttggccaggctggtcttgaactgctgaactcaggtgatccacccgccttggcctcccaaattgctgggattacaggcgtgagccaccatgccccacctaaaccaattttaaaattcagctttggctgggggtggtggctcacgcctgtaatcccagcactttgggacggggatgtgggcagatcacctgaggtcaggagtttgagaccaggctggccaacatggtgaaaccatgtcttcattaaaaatacaaaaattagctgggtgtgttgttgggcacctgtaatcccagctactcaggaggccaaggctggagaatggcttgaacctgggaggcagaggttgcagtgagccgagatcgcaccactgcactccaggctgagtgacacagtgagactccgcctcaaaaaaacaaaaaacaaaaaaaaaaaaccccaaaattcggctttgttaattgtgatatcaatttgttccaaaaagaaaaccagtctggcttcttgagaggattatattttagagtttcctgattaaatacatcttcttaagctacatttttttaaactaagttttgtagattttgtttgagattataagacatatattcattgttgggtgtggtggctcatgcctgtaatcccagcactttgggaggctgaggcgggtggatcacaaggtcaggagtttgagaccagcctggccaacgtggtgaaaccccgtctctactaaaaatacaaaagttagctgggcatggtggcgcgtgcctgtaatcccagctactcgggaggctgaggcaggagaattgcttgaacctggggaggtggagattgcagtgagccgagatttcgccattgcgctttcagcctgggtgacagagtagaactctgtctcggaaaaaaaaaaaatacatatattcagtcttcatcgtgatccttaatggaatacacactgcatccaggacacactggaaagattttgttgatttgctccagagttaataggtttgaatatcagccatctagaaaattttcagtattctcaagtaaaggcaaagcattgaaccttgtttaatgccccaacactgaggtgactgactgtgctaagatgaccagagtccagtggacccctttccattgctaagtttttcttagggagggtctggggatggaaagagtttcaagtcaggtttagacagtgatgggaatgttttggtctggatgcacatggtattccttcaacgtagtcctcaggctttgagtggatatgctaacatgaggtctgagattgaataagaggggaaaggaggaataaattccactatggcaagtcagggactgtgtgggcttccgagtttccctttttattttgaaagctccaggccggtatttggctcttctcagatggtatataaagctggtactgactctaaggtgaaaaaatgcaattgaatttttttccaggacttacccttctactaattccttgttttcttactttcttttctgcccttttcttcttccatcatccagttggccagttctacttcttaatccggaagagaatccacctgagacctgaggacgccttattcttctttgtcaacaacaccatccctcccaccagtgctaccatgggccaactgtatgaggtaatggttctggttgcacaatactggatgccgtccagtgcagtctggcatcctctagcccttgttctagatgcgttgataacacatctgagaagtggggcagaaggtgttatttatccggatcctcttacatatggcagtgtaaggctctgagagattagatacctcttgttttttagggattagccactctactagatttaatccttctgaaatcttgtctgactatagtcttgtctgactatagtgttttaatgctggactgtttattgaaacagcaggaagtgattcctgatagcaaaagttccaaagcgtcagcccatcgcagttcctgctattctggttggtagcatgtaatttgtaatgcattcagaatccagttcattattttactcccatttagcaacagattgagaaagcacgtaatagtaaagccagctccttctaactctgaggccagcctctgccaactgaaggattctccccacagtcagcttcttctatgaactctgaagttttggcttaagacaaccacattgatactaaacaaggggaaacttttcttagaacaaaactaaaactgtgaaacagattccacattatctgggcacaatgaatcagataaaatgaaatataaaattaaggcaaagtctgtaaatggattcatgtcttaacagataaactcaggaggaataatttttatgtgatgtggtttaattggaagtgtcagaatctgaggaaactatagtgaaggactttattattactgaaaatataacctgggattataactattgttttttgcagtattttgcataagatgcttccttctcattgtgctccgttaatgaattacgtaaacttctaataatcctgaatctttttttgcatagcatatattccctgttagtatatgtcccattatatatccatctgtggtatctatgttccccttgctaggagtgagctctttaagagtgaggactgtgccctagtcatcttcatatccctgatacctatgtgtaatatgttttcaatgaaggatttttgtttgtgaactcagagctcaaagtgtaattccaaccacttctccctatcctttgctcctcttttaaatggggactaatgataccttccatacctgctttacaaggttgtgtgaggctcagcatcttagagctaatgaatgaatatgttttctaaactgttgtcttatctcttcccctaggacaatcatgaggaagactattttctgtatgtggcctacagtgatgagagtgtctatgggaaatgagtggttggaagcccagcagatgggagcacctggacttgggggtaggggaggggtgtgtgtgcgcgacatggggaaagagggtggctcccaccgcaaggagacagaaggtgaagacatctagaaacattacaccacacacaccgtcatcacattttcacatgctcaattgatattttttgctgcttcctcggcccagggagaaagcatgtcag

SEQ ID NO: 5975 - DNA, 6000 bp, Homo sapiens
tctctttttcgggaattaaggtgtcatatattgctctagctggcttgggacagaggagagaggagtgcatgtaaatcttctagtctctctgcttctcttgaaatgtggcagtctgagctccacgtttatattcccctatttcttctccctaatttcttacccagtgagtgctgagtgggtgcccgcaagcattgctgtatagcacccaggcctccagtgagcaatccttaaagcccagttttcctggggtcccagcctgctgtgagtcccagcctacacctaccttttgcatatgcttttcttggccttaggatagtactggactttgttgtcctctgctgtttccaaaataagagggctatgtgtgcgattatctttggtaattaaaaaaaaaaaaaaaaaaaaggcaaatcagtccaaatttggatattaccctctctggcagacgagtaaaatttttctaccgctttgttttagagtggtgtctatgaatccctgagattggaaaaggaggtcaggtcagcacagagaaaggccttaccccaccactctcccgagaggcaccagcatttcacctgcagcctctgggctctgaaccccactttgcatgagaccacatagtgggctgagtctgcagccaccacgatgccttcaggaaatgctagaattcatctagagttccagattaacgtatccgcaacatggccaccgaattatcttttttctttatctcatgtgtagtgtttgttagttttagaaggtacaaaattgcagagtcatggccctggggatgcgtgcccagattattcatgtgtttcacaatattgatgcagaaaggctggccacctcatcctgagaagagaactttgctcattttggccaaaagcctgtaaagggaaagggcgttcctcaactgagaagtgaagattcttctctgctagatagtacgggggtttggggggaggggtagaaaacaggaatgagatttgacaaggaaaggcctccagaagaccagagctgttgagaattcttagccttgatggtgggtagcccagaggtaaacacttgagaaaactaagttgcagtcttggtctctccactgtgaatttgggtcatattactcactacttttctgggccttaatttccttacatactaaaggtagaaaaaaatattatttgctctacctcaggatttttcgggtcaagcgagataaaatatgcaaaagctttttgaaaattctaaaatcctcagtgcctagaacagcgccaaagtcggaagttttttatttaccaaacacacagcatttaacaggtcccagagcttctttttttttttttttttttgagacggggtctcgcactgtcacccaggctggagtgcagtggcacgatctcagctcactgcaaactccgcttcccgggttcacgccattctcctgcctcagcctcccgagtagctgggactacaggcacctgccaccacgcccagctaattttttgtatttttaatagagacggggtttcaccatgttagccaggatggtctcgatctcctgacctcgtgatctgcccgcctccggctcccaaagtgctgggattacaggcatgagccaccgcgctcggcccccgcttttctaactttattcagctaaggctcacaagaatccagtgaaatgggagttcttattcaactcctttcacaggtaaggtgaagaggtcccagagaagttaagttacacttactaagtggcagggtcgagatccacccgaatgccaatctagttccagagttttgaatacttgacactctaccccatgtcctcttatgaagaagtcacctccacattaggggacagagctctggtctctggcaagagaggttgagatacttattaccatgctggccaatgaatggagaatataatgagcaaacaaaccactgtgcaaacatgattgatcattgtaaatattttctataattcataaccaaattagtgtttttccctgcttacttttctttgattatttctccttcattccttgaatcctcaaaccacttaacatttcatcctgttatttattattatacaggaccactcttctccctcctgacaacctttcctggtaaaaggctttcagtaattttgttgtggctgcagagccaaccatgataatggctgcagttttgtgcagcaaactcgtggcaattgattgataaatcagctttgggggaaaaaaagtttacaacagcattgccttaatccatgctataaacaactactatttcttaatgttcttaccttaactgctcattacctggctcttgggtacctgtgaaggggaagatgttaccctggagagatggttcattgactcatcaggtgtgtgtcagatgcttggtgctggccagtctcccaaacccacagacttgaggagttaagccacattcttcgtgattgagaaactctgtgtgaagtgcacagtgtgttgttcatttttaaagaaaaggcctcccattgccctttttcccagccactgacttctttgtgtactttcctaccaacagtcctgggaggctgccatttttttctctactctttcaatactgattttcaatgagggggaaaaaaaagttctctggacttttgttccatcaatacataaatttcattctgggaacattagtagaggcctatagagaatgttttagttttaaaattattgttaagtagcaactttctatttgataaacttaccttaattttaaaaaacttcacacgcttgctgtatttcttcacatctttgtacagaggcctgggacttagggatcctttcttaagctaattactttacctacactctgaaggatagtgcagtttattcatgactttcaccccttcaatactagaacaagcagacacattaaatgttaccaaaaatattatattgcactgagagctaatctaacatactgtgctttcaagactagagacttatggaggttgattaatttgctatctaggggattttttaaaaaccttgcgcatgtagtttctgtttgcctaaatccaagctgtatatttttagcctaagaaaacaaaaataggggggccaggcatggtggctcatgcctgtaatcctagcagtttgggaggctgaggcgggtggatcacctgaggtcaggagtttaagaccagcctgacaaatatggtgaaaccccgtctttactaaaaatacaaaaattagccaggtgtggtggcgggcacctgtaatcccagctactcgggaggctgaggcaggagaatggcttgaacccaggaggcagaggttgcagtgagccaagattgcaccactgcactgcagcctgggcgacagagtgagactccatctcaaaaaaagaaaagaaaaggaaacaaaaataggggttacttaggtagctttgatttctttatctgcaaaatgggaattttaatacctcaccacataactggaaaaagaaagaagatgacagatataaggggtgcctacttgtgccagccacagagtaggcattcacttaatgtcaattgaattagaattaagcagaattaaagagttgagagcagaattaatcaagcctcttgaaagagagagtatagtgtagtaaccgtatggggtgttcgtgtcccagcttggcagcttaacaactctaattccctttttcttcttttgtgaaatgggtatagttatgacaattgtaatagattaacaaaggtgatgaaagtagtgtacataatgtacatagtatagttgaacacatagcaagctctaataaagctaagtatatatgtatgtggtttttaatcacattcaccagcaacacaaagatggctatatgaccaataaagatacatataaatgtatagattactggtaagatggatagaaagattgcagctgataggtgtcaggctaataaggacacaatgcaggggttgagctttaaaggcaggaatgaacatcatctagaagagacagtactacatgccaagcaggataaatagcctctaagcttgggtctgagaaaagttgtgtgtgttctgtggaagagagagaagtagatagcagggctgataaaagaacaagaggaggttacaaagaataatggcagaggactggaaatgtacattttaagctttaccctaagttcctacctgttttgacttcagtatcaccagtgtgtcttggccttcctcttcagcacattcccaattatacttccaattccagacacagataactacattcctctactcaacggcttttagttgaatgtaactttggaatgtgaaatgactcaaggatcatgtaaagctaattctccttccctattacacccatgaaagtaccatatatggtaattccttaccttgcatttgcaagcctgttttttgatgtttccattatcctgcttctccttctttacctgtcttcgaattgatgatgatggtgatcatgatgacaattgtgataaggatattataaatttattgagggtttttcttgggccagtccatattttatctccattacattagacaataacccattaagttagaagctattactatttcaatttttttttttggagggggagacagagtctcactctgtcacccaggctagagtgcagtggtgccatcttggctcactgcaagctctgcctcctgggttcatgctattctcctgcttcagcctcccaagcagccgggactacaggcgcctgccaccacacccggctaattttttgtatttttagtagagacggggtttcactgtgtcagccaggatggacttgatctctcgacctcgtgatccacccgcctcggcctcccaaagtgctgggactacaggcgtgagccaccacaccaggcctactgtttcgattttaagaatgaagaaatttagtctcagagactgaatccctcaagcaaggttaacagctaaatcgtgggactggaattcaagtcctaaagcctacagttttgaatactactgaaatgacaagttgtaagttgggtctccaaagcaggatacataagaactgaggccttcctaagttcagtgctgctgctaggtacatagcttgatgtttccaaagagatcagtctatgacctctggtcttttgctttcaacctacttatagttaatctcagtgctagtatgtgatgttagtctatgtttagggcatttttgctatttatttttgcttatactgcacccttttttttcaagtagtacttgcttgatgtcttcaagctaaataatatagaactagataaaatataatattgcatacttttttttttttttttttttgagatagagtctctctctgtcgcccaggctacagtgcagtggcgcaatcttggctcattgcaacctccgcctcccggatttaagcaattctcctgcctcagtctcacgagtagctgggattgcaggcacacgccactgcgtctggctaatttttgtatttttagtagagatggggtttcaccatgttgggctggctggtctcaaactcccgatctcaagtgatccaccagcctcggcctcccaaagtgctgggattaacaggtataagccactgcgttcagcccctatttactttgacattttaaaaactaaacaatcatttcttctgcaaatagtccaagatatttttaagaacagtataattaatgctgcaatataagaacatcaaatgatcttccagttattttgggtatttatgtctgctttttcccattttatttaaatctttttaagattccagaccaaaattgaaaaaatggttgacctcacccaggtaatggatgatgaagtattcatggcttttgcatcctatgcaacaattattctttcaaaaatgatgcttatgagtactgcaactgcattctatagattgacaagaaaggtaagaaatttggaggtaatattttcttacttttaaga

SEQ ID NO: 5976 - DNA, 6000 bp, Homo sapiens
actgggttgcttctacctttgactattgcaaataatgctgctataaacatgggtgtctaatttgtatttttaaatattttataagtatgactcccatctctttatgtctatgttagtctgagatttggagggtagtgactgtgttttaaacctgttgaatccttggtgtctagcatagcactgtgcctttttaataaacaatgtgtagtaattatttcttgatgagtagagcagatttactttgttaactcttcttgattatttttaattctttggggataattagtctttctatcataagttgaaagaaggcaaaaccaaacttgccttcaaaaatatattaatctcagaaatcttagctaattactcaaaggcagctaaaaagctgttttttttttttggtgctcaattaactttcctggtcattctcaatgcaaacatatgacctggaaatcatgattaacaagagcagtcacagattttctgaaagaaacaacagctattttggtgaccttttctcatctcttccctggtcctgctgtatgccagtaggtaacaatagagactagactaaattttagtttaatatattacaggtctagaaggaataagagtagtatgtagttcttttgccttctttttttctaacttacttttctaaacatttgtttccaaagaaaaatcatctccaactttgcagagcatctaacataagaaagtttttgagttggctactcatagcactgtattttataaaaaaattaataattttttttggctaagaaatctcttttaaaagaaattattcacaagtaactgtcttttataaatgttcataaggctagtaatgctctactttttagtaaactaataagagcagagacttttcaaaatgaatggctatcttcttatatataaatatgtatgtatatatgtatatatatgtgtataagaatataggcacatatatatatatgtctgtctgtgtgtgtgtgtgtgtgtgtgtgtgtgtgtgtgtattctgatttcttccttttccccctccaatgtaaattctttacctgtactgatttgaaaggactgtatcatgacttgaccttgcaatttctaagaagttagtcttagtttggtattactacatgtattttattttattttctcattgtagcggactcaaagtttcagaatccatggagtttatttaaattaattctttggtttgtttgttcatttgtttattcattcactcacttagcatatatttgaaaatttactgtgtttcagacaccaaatgccatgacccgtgcaccttatttcattttcagtgatgccatataaaggctgtcatctaaaaggacaggatgtctcatgaaatgtgttgttaatattggcaaacactttcatcagtaactttaagttcaaatctttgatagcagctacatgaaaagaatattatgtcagaaagtgttgtcatgttgccattgtgtacaatgtgggtggtgctgttttagaggcaaagaactgttcactttttatgtttaactgtataaatataaattgtctagaaggcgaagtgggaggcaaaaccttgaatagtgtcctttctaatatgtttctaagttccttgtagcactacacagaccacattagaatgcattgaccatcaaagggaaaaacaagctatccagatagatactttaatccaaattagctccttccaaacagcttatatagagggcaaactaaactgtcacaagctgaccctttagaaggaataatgggaattggaccagcagatgttgaaccaaataagttagatgtggttcactttgcatctggagctatttgcatacaaagccaacaggaaagttcaaacatttttctcaagacattggcagagagaaacctggaagacagatgccttttggatttcatggttcaatttttccattctccattctgtccaggaaaacctaggacaacagatcggtcattttattaatatcccattactctccttactaaccctgtttttccagtagaatctgtgttacatatctatgagagctcagaacctgagtccacaaatttttgtttgaggaaaaattgtctcaatatttttcttcagattaatctgtagtttgtacctagtaataatgaatgttaatcaaattcatttgtctgatttatatttgaggtaaaatttgaaggtgacttattacatagtcacatatgtgcattatggtaggcagtataggtaatgcttaaaaactttccgtctgtctttgtatttacattagacatttttgtcaggacataaaccagatttctgttgaagtctaataattttgtagtgcctttacacagattatttgaatagaaatttgtcacatatcttctttttgctacatcttgtattttctgtttaactcctaggttattaactcaccttcttttactctggagccagtttttaaaaatgacgcctaaaatgatagcttctataaagctgtgaattattactgtacatataaatactagtcttgatgtgggttttcagtaatttattgcagttcatgtttttattaatgcatatgataggaagtatacagtgatatttgctatgcttctgaagattaggtttattatagtgtggattagagtcaaatatccgtgttgtggagtgaggatttctgtctttgccttcagctaactatgtaacttctgtgaatctcaattagcaaatctataaattgaaagactagatgatatctaaacaattctttgagattttgaattctcagtttagtattttattttctggtcatagtgtctgtaacatgaatagcttttactaggtgaattatggtgcctggtttaactgtgtggtataactgacagtactaatctaataaattacggtggttctaaaaacatagaacacaaatattaatgtgaagaactataattcttaagagaaaccttgtctttttcggtatcttttaacaatcaattactgttcacattgctttttctaacagtattttatggtacctgctttatctgttctatctgaatctgaatttgctttttaaggactgtggtgtgcattttaggatattttaggatatatttagagaaaagtaaaatagtttgaaaatagtgctatagggattttctgatactgctaaaaaatgaaggtttggcaatgagtattttttctataatatgaagatagtgctctgactctttataatcctaagttagcgccccccgccccaccaaaaaaaaccactggaaataaaacaaaatttagattccatttagctcagaaacagtaggaatcattgcctaccattcttataccagtatatacaattctcatcagctatccatcctgaattacattttttggcctcagaaaagatactttttattgtttttgagagacacacgtatgtacatatatatatatagtataagggtatgaaagaaaagggaaataatgcaaaagatatacagtgaaaaatttttcttttatcttagttctctagtctcacttctgatgctatagttttataaattcttttttaaccatcccaatatcttccaggcatgtacaattgtgtcgtgtctatttttttaaatagagatgacagtgtattatatatacatagtaatactccttgcttttttttccacaataatttggagacctttctgtagaagtacttatagattttccaaattcattttagtggtcgcatagtactgttttttaaggatatattattattaatgtaactagttattttcacttcagttcttgccgttacaaacagacctgtagtgaatattcttgtattttcagcaaagctattttaattaggatgataatgtatattgtttctgtgacttgaaagattatttaaaattaacagtttacttactaattttactaatataaacatagaacaagacatgctctttgactctgaacagtgtcaaaatttatatttgaggtcatatatacctaattaatatatatacccaattaatatattaattatattatatgttatataaattatttattatatataattatataattatatatattatttattatatataattatatattactatataattatatataattatattattaatatataattatatataattatatagtaatatataattatattattaatatataattatatataattatatagtaatatataattatatataattatatataattattataattatatataattatattatatataattattataattatatataattatatataattattatatataattatatataattaatatatacccaatcttaattatataatacttaattatatgattaataatttaattattaattattaattaaaaattaaaaattaaaaataattaataataataactttttgagacagagtcttgctctgttgcccaggctgcagtgcactggcacaatcttggctcactgcaacctctgcctcacgggttcaagagcttttcctgcctcagcctcctgagtagctgggattacaggtgtgtgccaccatgcccagctaatgttttgtagttttagtagagatggggtttcaccatgtcagccaggatagtctccatctcctgacctcgtgatctgcccacctcggcttcccaaagtgctaggattacaggcgtgagccactgtgcccagctggattatatttatataatagaacaccatacacctggaaaattaacaaactatagctacatattaacaacatggaagaatctcatgaccatctgtactgttctcagagtacctttaagagatcagtaggaagccttaaactgacagactgttctataatgttagattctataacaccacattttcatagaatctgtgaagtctagaatatcagtctcccctttggttctggaattcttcttgttcgttagaatgagggctccattattttggccacagagctatatccaggactgcttcagagcaagccccgtgtctgaatcttcagagggtagaagtcatcatcctgtttactcagtagggatggcatggggaagggaggagggagtagattttacctaaaatctactgtggatgaatagtgcaatatgagactaagaaaaatttttgaatctgacctcaagtgtctggtatggaggtcacagactaagactggacctgaatcaaacagaataacctccatcactcacttcctccctccctttacccctgagattcttgtattggactcttgggcctagctgtagctggaaacagtaaatgcttttgctgtatgaattttcaagtggccagacagggttgagggacccacaggaacatgagacttacaggacaagtacaaccagaggttctgacagatatgccctatgcacatttggcttgatgtctctgtactgatgcccgtaatgaatactgttgttgctaatgtgtattttaaatgaacttatactttgtatttactcaggttgagttttcatgtatttcctccctctttttaaaggttgggcatttgagcttcttaaacggtgtctctaattcttggtggtattctcctctgtatttgtggtacttcctctttgtggcaggcggagtgggagggtaccatgatttcttgagattctggaatcttccaacccctttttgtgcccattctctccttgtgattatctattccatatcccacccatcagcaatttctgtagtttctaagttcattcaaaccagggatgttttcagttctctctacttccttggtcactatctcagtcaaaagccaccatcatatctttcttagatgacttaagcacctttttttcctgcatccactctcagtgtctgctccccccaaccaaccctgccacccatgactccattattttaagtggcaccagagagggctgg

SEQ ID NO: 5977 - DNA, 6000 bp, Homo sapiens
ttatgcttccagttagtttgcacttgttaccctatatatagcttcacatatgcttcagaagcttaagcaaattaaaaaaacaaatggggactgtgagagtttgagactgttttcaattcttgataaccattttagaggaaaattaaataatgtataaattattcagactcatcgctatttcaagattttctgccatttagctcctttccttaattatccagatttaaagttctgaacttcaaataaaggtttataaatgtcttatcttctctcagcccactgtgctcagatattaatcaaaccatctaaatcactgcacaagttttatttcattcatgacgtcacactgaatgtgctctctctccttaagatttcatttggtatgtcattcatgtatagttaacaaacatttaaaaatctaattactcatttttaagttaatgtgtaacataaatatactacttatatttaaatgtagttcaccttaactgacatactaaagacagattttagcaaatattttgattcagaatgatacctcaaactaccatttttctaactgccataatcctctattaaacttatataatccatttttagattgtaagatcttaaagaatacctaaaaaaaaccctcttaaatgttgatgaattgtttttccattataaagtcatttttgacttttagaagtcaagactaatacattttctagaaaacaaggtacaaaagcacttgtgattaatggtagcactagatttctttcagcaaatccttaagagtacagaggttgaggggacttctgttgtttgtcacattccgcatttgaaacaactcacagtgactgtcagcctaagaatagcaaatgtagtcttgctttttgttaaagagttcttacttataccttatggcatttttgttgactattagaaatgtaaattgagaaacatataaactcttaagttcagagacgtaagttcatggaacttttagagtttaacagtgttaatgattacttaagaaattaaactgaatagcagttctttgtgcttttaacgagtagttttgtttttaagggcagcatatacttttcctacaatttagtgtttgaagggtgggagaagaggaacgattttgaaaagttagcgaatgataaagaaaaaaggaattaaatagaacataagttggttgatgccttgcaaacaacttagagcagaacttctttattatttagataggtcagggttccagttatacatgctacctagtgtctccttctgacctcattatctgtctgaataaacttcagatgggtactggatgtatattgactactgtcaaataaaatgaactttgttttagttaaggtcagatatgatgtggttggtatgttttggaacatgttttttcaggttgcatctggaggtggtggggttggagatggtgttcaagaaccaaccacaggcaactggagaggaatgctgaaaacttcaaaagctgaagagttattagcagaagaaaaatcaaaacccattccaattatgccagccagtccacaaaaaggtcatgccgtgaacctgctagatgtggtaagccatgacaatttggtttaggtaataaggtaggtgaccaagttagtaggaaaacgattagacagaaagaactaaaagtctcaaaaacttacataactttcagatgttaaagctgccattttagtgtcacaaaagtaatattttttccccctcatccctatttagccagttcctgttgcacgaaaactatctgctcgggaacagcgagattgtgaggttattgaacgactcattaaatcatattttctcattgtcagaaagaatattcaagacaggttagtattacttaatataaatgacggactttaatacttctggatgattctgtgatctgttttgaaaaatacatgtatttttacaattttaggtttttattctaaatcatcaagtggattttctgatagtccttgggtaacttgtagcaagacccattttgttaacatagaatgactaggacctcatgtatcagctagaaaaagctattaaaaatgagagattcttttgttctatctggctgccacattttgagtcatttaagaaaatctttttcctaaattttaatttagtagtttcattaattattttggctagtaacactgacttgcctttttaatttaacttggttttccaaagtatcaaaacgaatgtcttttactaggaaatatgtgtattttttctcgttcagaatgttttttcatgtgtctagtccctactgcatcttctccttcatgttgcctggtatgtcatttcatgcagtaatagggagaatatacatttagttgtgtgaagtgatctattagaaaatattctgcatccagtttttggtaatctgtcagcagctaagatgaattttactgcacagagtaataaacagtctaatacttcatattgaaataaatgatttttgtctgtagaaccatttatcttttttgcttgtagactttttaaacccgtagcttgtagtagaaataacagttcctagtgttttacactgtgggcctgaagaaaaaaattccatttgtttccttccttgcccccatcctctgcagaaggtgtttttgagatggagtctcgctttgtcgcccaggctggggtgcagtggcgcagtcttggcccacttcaacctctgccttctgggttcaagcgattctcctgcctcagcctcctgagtagctgggataacaggtgtgcaccaccatgcccagctaatttttgtatttttagtagagacgggtttcaccatgttggccaggctggtctcgaactcctgacgtcaggtgatctacctgtcttggcctcccaaagtgctgggattataggcgtgagccactgcacccggctcacttaatgtttttaagcctcatccatactgtagtatgaatcagtatagtcacgcaccacataacattttagtcaacagaccacgtatttgaatgtgttcccgttagattatgataccatgtttttgctgtacatttcctatgtttagatacacaaatactattgtgttacagttccctattcagtacagtaacatgctgtacatgtttgcagcctggagcaataggctatcccatatagcttaggcgtgtcataggctataccatctacgtttgtgtaagtacactctgtgctgtgcatgtaatgaaatcacctaataatgcatttctcaaagcatatccgtgtcattaagtgacatatcttttgtgtgaataatactagattatgtagatatactgtgtttaagcattcatcagctgatgtttggatttttctcacttcttggctattatgaataaatgcttattgaagagttttgaaataaagatgatgaaaagaaggtaaagtatcaagaattgttgcttttgtttttttttttgagacacagtctcactctgttgcccaggctggagtgcagtggcgcgttcttggctcactgcaatctccacctcctgggttcaagtgattctcgtatctcagcctcccgagtagctgggatcacaggcatgtgccaccacactcagctaattttttatttttagtgcagacggtgtttcaccatgttggccaggctgctgtcaaactcctggcctcaagcagtccacccgcgtcagcctcccagagtgctgggattacaggcatgagccactgcgcctggccgagaactgcttttcttaatgtttaattacagttaagcaaaaatctaaagggcgattatgccattaatgaaatatccaaagtagtagtgttcttacttaactttatttcatgaggttagcatctaagcccaaattgttaaaagtagaattttggctaaaattccataatttggttgtgttttgcagtgtgccaaaggcagtaatgcattttttggttaatcatgtgaaagacactcttcagagtgagctagtaggccagctgtataaatcatccttattggatgatcttctgacagaatctgaggacatggcacagcgcaggaaagaagcagctgatatgctaaaggtattgtggaccttttgattttttatacttgggtagtagatagaaacatagaaatagttttaaatgcagtttgattcttggatatgtatagtctttatattctagctaggcttgtttcctgttggtacttgataagaatctttttttttttttttttttttttttgagtgggagtctggctctgtcgcccaggctggagtgcagtggcacaatctcggctcactgcaagcgccgcctcccaggttcacgccattctcctgcctcagcctcccgagtagctgggactacaggcgcccaccaccacacccagctaattttttgtatttttagtagagacggggtttcaccatgttagccaggatagtctctaactcctgacctcatgatccgcccgcctcgacctcccaaagtgctgggattacaggcatgagccactgcgcctggccggtacttgattagattctaattccagagaagatattggttagtataaactggttagttataaacctaccacatatatattggaaaaattaccctgcgtaattcagattaatttcataactttataataagcatttaaaattttttttcctttaatgcaggcattacaaggagccagtcaaattattgctgaaatccgggagactcatctttggtgaagagaactatgtaatactgagactttgttgactcaaaacttgctagttactgcctacctgagtagaatcttatttatgaactcctgtgtattgcaatggtatgaatctgctcatgtggagactggctataaactgaaaagtgtattccaaattgcagaacacatcacacatttaatccaaataataaatggctgtttctaaagtttcccagtatatataaaatacatcaagtctgtcttgtgacagtttcatctgaacttaacttaaaaacaactgttaatgttctagttgtgcaaagcagtttgcctgtggataagatgacctgtgtaataatctttgttagtagtcttaaagctgctgccatagtcctccaagaagaaagcaccaagacaacatttcatatgactataatgcatgtactatataagctgatctggctttgaaagatgtgagttggcaagttcctcacatagagtcattgtattccacctgtccttcaatttagttttttctgagcttctttgcagcctttgatgtgtttttaagaaagctgaatgcacaagaggatctgtgacactgacatggctgtggtgtgcatactgtgtagttacatagcccttccaattctgggtccatttgcactagcaaattaaaatatgctttgattcatacttaaacctgaaagcaggaatgcctacattaattcctacattaaaaacagccatctacccttgattatctagaaagacttggtaatgatggtcagttccttttagatttcagaaaatcaaatgatgacctaaatttcccttaatttgcaaatacagtagtaattaaggtacatctctaaagtggagcacttacaccaggctctaagattcactttgaggtggaacttaaaaccagtgtactgtatgtatgcattggtaatagctacttttgcttcatagcttcataccaacaaaatatatttattagaatagtatgaaagtactggaggagctgaaagaaaaacacccaaggctgggcgtggtggcacacgcctgtaatcccagcactttgggaggccgaggcaggtggatcacctgaggttgggagttggagaccagcttgaccaacatggagaaaccccgtctctactaaaaatacaaaattggccgggcgtggtggcgcatgcctgtaatcccagctactcgggagggtgaggcaggagaattgcttgaccctgggaggtggaggttgt

SEQ ID NO: 5978 - DNA, 6000 bp, Homo sapiens; identical to SEQ ID NO: 626

SEQ ID NO: 5979 - DNA, 6000 bp, Homo sapiens
ggtggagctgggccaggcaggaagacgctggaataagaaacatttttgctccagcccccatcccagtcccgggaggctgccgcgccagctgcgccgagcgagcccctccccggctccagcccggtccggggccgcgcccggaccccagcccgccgtccagcgctggcggtgcaactgcggccgcgcggtggaggggaggtggccccggtccgccgaaggctagcgccccgccacccgcagagcgggcccagaggtgagtcgaggtccgcggacgggaccgggtggcgggcggcctgacccccgcttcagtgggcccttccttcgggcggaccccagagtcaccgcagagtggtcgcgggaggctcagtcccagctcattagaaaggcaagctgctcctggctgaccacgcacagctcccatgaccctacctgagacttggaggggaatggacgagactggactggaaatcagaaacttggttctagtcgggtgacctggggtcagtgacttcacttctctgttctcctaccctcttcataaaatgggcagtgggattcctgtcttgctctactcacatagaagggatcacacgtcctccaggccgctgggtggacctggagtgaatgcctacttccacagctgttgagcctcccagcagagctcacctttcccagatcagtccttccagctgttgcttgaggaatctgacactatcactccaacctaggagtctcaccctaggcgcgcatggtcagtcacctccttgccacgaccttccttcaggatccaggccaaaggggatcccagtctccccccaggctgggaccccagatttttccatggaggccagtgctgtgaaacccatggctgggctggctgccccagctcctctttccttctccaaggacaggggcataatggacagttgctctcactctctctatgtatggccagcttctggctgagtcagggtctgtcctaatacctgtcctctcacctgtccccccatttcattggtttgttagaaatagctaccattgattgagtactaactatgtagacacttagatatatatattttttctcatgtaatcctggccgcaacctagtggaagaggggttactatccccttcctacagaaaaggaaacagacatgaatatgggacttgtccaaaactccttggatggtggggtgaatggcatggttggggtcttgataacatttcagtgcttactgtgtactacttatactctgctaaataattgtactacattttacctatgagataacactattattattcccactttacatatgatgggaagcctaagcctcagaaagtttaagtaacgtctcaaatttcatacctctaagtggcaaaggcaggatttgaacccaggtctccatgctccagagcccacaccctaacctctgtgctacactgtgctgcctccatggtctgcctgagacctgaaaatccaggcatcacctggatgttccactgcatcaccccgctgtgaagggctaataaatcacatggatgaatcgtaagggcaacccaatatgaacagctgggtctgctcctctgctgttggggtaaggcctactgaagtgcagagtgagtccagaaggttgtgcttgatatggcgcttctccagccctgtgaagatcactgctgtgctgagccactgccgttgatgggagtaggttttatcaatccttcaggtgtgctagggagaaaaacattgataagcacctttcgggcataccactactctggctctccccacctgaggctcagactttgactaagcctatggcaaacagatgatttctgggcagcaacaccacctttgttgcctgggtcaacatagtgagaccctatctctactaaaaataaaactgggcatggtgctgcacccctgtagtcccttgggacttgggaggctgaggtgggaggatcacttgagcccaggagttcaaggctacagtgagctatgattgcaccactgcactccagcctgggcgactgagcaagaccctgtctcaaaaaaaattaaaaacaaacaaaaacgctgtcttcatttaaacaaatctgagtagggcacccgttaataacaacagtagtgggcaatttgtacacgtccaccgagacccatgtctttttcttcctttgagggactcatctaaccccaaacaactggaggaataacaatgaccaaggaatgatttattatcagcaatttaagtttattaagacacgctcagtgactatggacaagaaactgaacatctctgagcctcactttcccccgttggactgttgtgatgattaaatcagataaaccattcaagttcagtacttagcacataattagtactcagagaaggttaactgttattattaagtatttcatagtgtttagctaacgtttgaaattagtttaacgtctgtaatttctggccaacaatagtgatgcttctgtcagcaggagatctttcacaaagttttgcttagaagtgaaaggatcctgccaggccccaggagtctgtctgtgctacagtcagatttcagggtaaatcgtacagagtcagctctgagtttggactggtcgggactcagcatcctcctgtacttgatctcacactgggtccagttaaaaattggacagtcccaattttactccatcacattcccaggattagaccatagatgggttctgcagatgcagacagcctcgctccacagtgtcaccacgtcccagctttggtgtttacccttggctgtcccttctgtagtagatggggagtatcctgggtgggagtgagtgtcccctccctctgcatcccactcccactcacccagcagggccctgtacagcaaaatgaaagcagaggaaccagacttagcgttgtgcccacacaaactgatcagaactccctggggaacttttaaaaaatgcatgtttcttgctgattccaggactgaatcagagtctggagtgagggtgaaaccagtgaatatgcttttctcagtgagcacttcaggtgattctgatgcgtgataaagtagaaggagggtggactggggcacggccagagaagtagaggtacggacagaggatcctagaggaatgccggattttagccttattgttagccactttttcctttccacctcaaaccctctcctttgcagctttctgggctagcaaaggctgccaaggatggcttcctgctagtaccccagtgggcagattcagctcctctagggtgctctctccatcccatcccaccgtcagtcctgccgcacagtgctagccagagtcctcactggctgcgggaggggcaagaggcaggaggtcaggcagaggctggggacacagctgcagcagcccagggctctgtttcctcccccagcctgggcctctggggcagaggaagcccaggcaggaaggccaggcctgccaccagccagagaggcctatgaagcccccctaccccacccctagccatactgccctcagagcctcagcatcttgggtcttcatttggcaccattcttagactatgggctttctgaagcctctgtggccatgtgcccagccctgtcaggctcaccatgtcatgccaaaggacagtctccctgccttgtgccctgcctgaggatccagtccccagacacacacctgcacatgctccaccattcagaaagtcctgttgctgtctgaccagggtccttcttgctgcagctttagccaatatcttctggttctaaacctgtgagaaatgaagactgggtggcttcagaagcactagttggtgtgggacctggattggggactatcatagaccagaattactccccctaacactctccaacaaacttctggaaaagttcaaccctagtcagccatggaaggtcaaacattcagtgtctaagtgtgtttcacttcccctgccacatcactggccctccacccaccctttcctagatggcaaggggaaagaagggggccagggaacagctccgagagggcagcttatactctggtgagcttgcagagaggtttctctacacctggcatgaccctgccccgtccgagctttgcatggttgttatagccctgagggctcagacatgggctgccaccactggatagggacagagcgaagagagcacttgattaggagtctggaaacctgggatgtacgcctgctggtgccagtgagtcctgtctgacccgggacaagtcttcttccctgtatgagccttactcctctcttctgtaaaacaaggagctggattttgtgattcacaggatgtccacctagaattctgtcatgtgggtgtcccaggcacaaggaactaagggtagcaaggaactaagggcatatttaaaaagcccctccagaccttgtggctgctgcagcccaccctgaaaatatgccctcagttccctgctgtgcgtgactcctgcctgttctatccagaccccaatctaaacaatcttgattcctgttcctggcttggcaggaccctgaatggcaggaagcgaagacaggagcctgtttatgtttgaggcagccagggctgggggggcattgagaaagggtaggcaggggtggaagctgtgagggagtgggaaagagacacagaacagaaggggagctgctggagagatgctccttctaccccaattgggtgctccctgcggctctcccaacctgcctgcagtctgagctcagcagcaggagtgcagagctagggtttccccaagctctcagtcacttaaacattgctctccacccttcacctctaacaggatggtttccatggggaagtgaaccaggacttcccctgcaggccccgccccaaagccaggcggcagggagtagggaggcggcctccctgcctcccctccaaaaaaaactctgtgatttcctctgggcaggagggagccacggccagcggctgtcacacttcatggctcttactccacctctcttgctcctctctgcagggaccatgaccttgggctcccccaggaaaggccttctgatgctgctgatggccttggtgacccagggtgagtactgggggagcagttaggaaacaggaacctggatacagaaagggctatctgggcccagatcagctctgcctggggctgaacttgagaagctggggagaatgtaggagcttgactggagagtggaggacagtgaggctccattagactcagtccccagctaccccagccctcctttgctctcctcttgatccagacctgcaggctggagctctgtcagactagggtggaagcctatatgtggggtggagggagagcaggtgttggcaggccaagcctgggagagcactcagggctggggctgggggcccagcccagcctagaactgggaggggaggacctaggagccaggaggggacaaaagcctgcttttcagagtgtcagctgctctgaggggagggttctgagggaaggatgactgaggatgaaagtaagagaccaaagcttcaaggtgtttgtctgaggggtcagacgagagggacagtaggacagaaatgggtgtcgggctcagcctgggggagctgggaccacagtggctgagcttccggtgtgtcttccaggagaccctgtgaagccgtctcggggcccgctggtgacctgcacgtgtgagagcccacattgcaaggggcctacctgccggggggcctggtgcacagtagtgctggtgcgggaggaggggaggcacccccaggaacatcggggctgcgggaacttgcacagggagctctgcagggggcgccccaccgagttcgtcaaccactactgctgcgacagccacctctgcaaccacaacgtgtccctggtgctggagggtacgtccagctgccctagcactccctccccatcttcttggcccctgccctcccttccctcctttcctctcatgctctggccaataaagggg

SEQ ID NO: 5980 - DNA, 6000 bp, Homo sapiens
tcagcctcccgagtagctgggactacacgcgcccgccaccacacccggctaattttttttgtatttttagtagagacagggtttcactgtgttagccaggatggtctcgatctcctgacctcgtgatccgcccgcctcggcctcccaaagtgctgggattacaggcatgagccactgcgcctggccagctttgttcttttcttatacattaacccataaattctccattgatgcctcaacaagtcttatattttatccatttaatttaatttaattttttttttgagacaggatctcactctgttgcccaggatggcatgcagtggcatgatcacagctcactgcagcctcaacctctcctgggggctcaggtgatcctcccacctcagcctcccaagtagctgggactacagatgtataacaccacatttagctaattttgggttttttttttggtagggactgggtttcgccatgttgcccaggctggtcttgaactcctgggctcaagcaatctgcccaccttggcttcccaaagtgccaggattacagatgtgagccattgtgcccaaccttatttttttatattccatgataaacttaagaatgtataattatggccaggcacagtggcccacgcctgtaatcccaacactttgggaggtcgaggcgggcagttcacctcaggtcagaagttcgagaccagcctggccaacatgatgaaaccccatctctactaaaaatacaaaaattagctggtgtggtggtggacacctgtaatcccagctactcaggagtctgaggcaggagaatcacttggacctgggaggcagaggttgcagtgaggcgagattgtgccattgcactccagcctggatgatagagtgagactccatctaaaaaaaaaaaaaaaaaaagaatgtataattactctattggtcagtttcctccaatatatagggattgataagactgtcaagtatattttttgtaacaatttgtagattcttatgctgttgctcctatgctattacttaagctatattatcaatgcattttaaatgacattttaataaatatttaggtactctttcatctactggacagagttcgagagtcctctaccactgcagacaaagaaaagattgagtctggaggtggcaatattctcattcatcattcaagggacaccgccgagaagcaatgggctgagacgtgggtattaacattggctggagtagcaaggatcttcaacactagaagatatttgctgcagcctttaggtatacgtacatttttttctgattatacaagtaattaatgttaaaagaaatttggaaaatacagacgattcttttagagtctatcttaacttagtctttatgtgtggtgtgtgtgtaagcatctgtgttttcattcgtttgtacctactgtgggctagcctctagaggatacaatgaaaggcaaaatacacgtcattcttgctatcatgggcatgaggaagtacccataattacataaataaaggcgaaatttctacaatgatgtgttacaaggagtggtactttgtgagcttcggtaagtatttgacctggccagtgaattccagatggactttcctgagaaagcaatagttttcctgagatctgtagggtaagtaggagttcatcaggcaagagtaagacgaagtgtggagagccttatagtcaatgagagaatgtaaaagagacaggagaagattgaggaaaagagatggtggatgctagcatgtttaaaggtctagaatgaggagaataagaaagagtttgattatcaaagagattgagaggtagtgaaaggccagatcatccagatcatgtagaatgtgttaggagaaagttaggaggctgggcatggtggctcatgcctataatctcaacacttcggaaggctgaggcaacaggatagcttgagcccaggagtttgaaaccagcctgagaaatataatgagatctcatctctacaaaaatttttttaaaataaaaaatcatccaaatgtggtggtgcacacctgcaatcccagctacttgggaggctgagttgcaaggcttgcttgagcctgggatgtggaggttgctgcagttagccaagatcgtgccactgcactcaagtctgcgtgacagagtgagaccctgtctcgaaaaaaaaaaaaggatttcatcctaagagcaatgaaaaaaactactgatagattttaattcatgatttgacatgatcaaatatgcacttcaaaaagatcacaaagtgcatgtcttagtgtatatgtagaatggaatggcaacaaggaaggatgacaggatgttgttggactggttaggaagctgttggttgtgtatatcagtggttctcaaacagggcctattatactcccataagacatttggcaattttggagacatttttagttgtcataactggggaaggttgagcattactgctatctggggagggtagaggcaagggttgatgctacacatcttacaatgcagcctcctataacaaagaattatacaaccagaaatgtcaatggactaagactgagaaacctggttgccgattatactactttcaattctggtggtaatgctggtggtggtagaaaaaggtgaacagagatacttttgtacatagttatgagcatgttgtacatattatctattttattatttcgtgtttggcattttttaaactaatttatgttaaagcacaagcatatttactcattccataagcatttttgtatattgttctttatgtgcacttttttctccttttttccaaaaactatttatggtgtctgatccatttagcatgttagggcttggtatatgtatttttaaatattgggattttttcatataaaatttacgtacagtgaaatgcacaaattttcactgtacatttgctaagttttgacaaaatgagcatcatttttagtaccttcatgatatttctcttaaaagctgagaacgaatagatttatatatatatatatatatatatatatatatatatttttttttttttttttttttttttttttgagatggagtctcgttcttgttgcccaggctggagtgcaatggcacgatcttggctcaccccaacctctgcctcccaggttcaagcgattctcctgcctcagcctcctgagtagcagggattacagacaggcatgcgccaccatgcccggctaattttgtatttttagtagaaacgggatttcttcatgttggtcaggctagtctcaaactcctgacttcaggtgatctgcctgcctcagcctcccaaagtgctgggattacaggcgtgagccatcacgcccagcctagatttagattttttttaaatgaagacataagacagttaatgtctttgataattttttataactttaagaaatgatatttgttattttagaataagttttatatttttaacataaccacgtgcaatatataattatatctactcttttaaagggaccccttctctgacataaaatatgttaatagagaaattgcaggagtttttctccctaaatggcacgggatattctaaatctgatattaggtcaccattctgattggcaaatatagtgattcatgagacttttaaactttgatggcaacaggtagaagtgttttaattgtttgacattttaaaatgtaatttgtcaaaactcttttaaacagtttacttaaaattctgtgtttttattgtatgtaaattatacctcaatttttttttttttttttgagatggagttttggagtttcactcttgttgcccaggctggagtgcagtggtgtgatctcggctcactgaaacctctgcctcctaggttcaagcgattctcttgcctcggcctctgagtagctgggattacaggtgcccaccaccatgcccagctaattttttgtatttttagtcgagacagggtttcatcatgttggccaggctggtcccgaactcctgacctctggtgatccacccgccttggccttccaaagtgcagggattacagatgtgaggcactgggcccagccctcaatttttaataaaaagaatatggaggggaaagatgcatataactaggcaggtgttacagtttgtccagagtaggcagatagtacctattgttttataccagacctacttcaagcttttctattaaccgactgctttcccaggaatttggggtttatcccttttttaaaaaaatctggtcatttatcagctttccaaaatgaaagtccttaaaccttgattatttattttacatgtttcatagcctacttatgttgtactgctttggaaaatatcaactttcctaattttttacatcattttaatgtaggtatgtggataataatccatgttattaacaaagccagtaggcttgtttgctgtagggaaaagatctggctggacatggtggctcatggctgtaatcccagccctttggaagactgaggcaggaggattgcttgagcccagcatgggcaacatggtgaaaccctatctctacaaaaaatacaaaaattagccaagtgtggtggtgtgcatctgtagtcccagctactcaggaagctgaggtaggaggatcgcttgagcccaggagttcaagaccagactggacaacatagcaagatcccatcactacaaaaaataatttaaaaataaattagccaggcatggtggcatgtgcctgtgatcccagccacacttgggaggctgaggtgggagaatcacttgagctcagtgagccatgatcataccacatgacactctagcctgggtaacagagtgtgataccatctcttaaaaaaaaaaaaagaaaaaaattctgcagctctaaaataatttaaatatgaaaactaaagtataaagttaagatttatgaatgtgacatagtttatcttaaatatttaggccaataaaaaaacatgtattatactgtcctaagttacgacttttccaatgattctctggttaagaacgagaacttcttacttaatcattaataaaggtgggtagactgaagatgttactgaaatgcttttgtttcaacctcgttgatttaattttctgttatcctttggcagaagttctgggaaatggtataaatatgtataagtacatacatattttggggtttttaattttttttatttcagtagcttttggggtacaagtggttattggttacatggatgaattgtatagtggtgaagtctgagattttagtgcactcgtcacctacctgagttttgtttttaagattgaaacattatttgatatatccatcatcctcctcttggtgccctttgttcctatatctgaaaaatttttttactgaatttctaggttgtgataattttaattcccattgttagtaccttagtacctagtcatatattttccagttctgtaggattttaagcagaaaaattaagcaaatatgctttcaagtgtctaatatgaagagaaaatttgatcgcttttatgataatagtttttttttctcttcctaatataggagatttttcaagagcttgggatgttcttcttgaccatatacagtcagcagcactcagcaaaaacaatgaagtatctctggctgctctgaaaagcttccaggaaattttacagattgtgtcccctgtcagagactcagataagcctgagacaccacctgtagttaatgtacctgtgcctgttcttatagggcccatatcaggcatgagcaggccatttgtaagaacagattccattggagaaaaactaggaagatatagtagctctgagccacccattgttactgatgagcttgaagatttgaatctatggtgggctgcgtggaatacctggtatagaattggatctgaaagtactaagcctcctattacttttgataaactaacttttattcctagccagccttttcttacagcttta

SEQ ID NO: 5981 - DNA, 6000 bp, Homo sapiens
tactgaatggtaatgcctaagttttcttctagggtttttatggttttaggtctaacgtttaagtctttaatccatcttgaattaatttttgtataaggtgtaaggaagggatccagtttcagctttctacatatggctagccagttttcccagcaccatttattaaatagggaatcctttccccattgcttgtttttctcaggtttgtcaaagatcagatagttgtagatatgcggcgttatttctgagggctctgttctgttccattgatctatatctctgttttggtaccagtaccctgctgttttggttactgtagccttgtagtgtagtttgaagtcaggtagtgtgatgcctccagctttgttcttttggcttaagattgacttggcaatgcgggctcttttttggttccatatgaactttaaagtagttttttccaattctgtgaagaaagtcattggtagcttgatggggatggcattgaatctgtaaattaccttgggcagtatggccattttcatgatattcattcttcctacccatgagcatggaatgttcttccatttgtttgtatcctcttttatttcattgagcagtggtttgtagttctccttgaagaggtccttcacatcccctgtaagttggattcctaggtattttattctctttgaagcaattgtgaatgggatttcactcatgatttggctctctgtttgtctgttgttggtgtataagaatgcttgtgatttttgtacattgattttgtatcctgagactttgctgaagttgcttatcagcttaaggagattttgggctgagacaatggggttttcttgatacacaatcatgtcgtctgcaaacagggacagtttgacttcttattttcctaattgaataccctttatttccttctcctgcctaattgccctggccagaacttccaacactatgttgaataggagtggtgagacagggcatccctgtcttgtgccagttttcaaagggaatgcttccagtttttgcccattcagtatgatattggctgtgggtttgtcatagatagctcttattattttgaaatacgtcccatcaatacctaatttattgagagtttttagcatgaagggttgttgaattttgtcaaaggctttttctgcaactattgagataatcatgtggtttttgtctttggttctgtttatatgctggattccatttattgatttgcatatattgaaccagccttgcatcccagtgatgaagcccacttgatcatggtggataagctttttgatgtgctgctggattcgttttgccagtattttattgaggatttttgcatcaatgttcatcaaggatattggtctaaaattctcttttttggttgtgtctctgcccagctttggtatcagaatgatgctggcctcataaaatgagttagggaggattccctctttttctattgattggaatagtttcagaaggaatggtaccagctcctccttatacctctggtagaattcggctgtgaatccatctggtcctggactctttttggttggtaagctattgattattgccacaatttcagatcctgttattggtctattcagagattcaacttcttcctggtttagtcctgggagagtgtatgtgtcgaggaatttatccatttcttctagattttctagtttatttgcgtagaggtgtttgtagtattctctgatggtagtttgtatttctgtgggatcggtggtgatatcccctttatcattttttattgcatctatttgattcttctctctttttttctttattagtcttgctagtggtctatcaattttgttgatcctttcaaaaaaccagctcctggattcattaattttttgaagggttttttgtgtctctatttccttcagttctgctctgattttagttatttcttgccttctgctagcttttgaatgtgtttgctcttgcttttctagttcttttaattgtgatgttagggtgtcaattttggatctttcctgctttctcctgtgggcatttagtgctataaatttccctctacacactgctttgaatgtgtcccagagattctggtatgttgtgtctttgttctcattggtttcaaagaacatctttatttctgccttcattttgttatgtacccagtagtcactcaggagcaggttgtttagtttccatgtagttgagcggttttgaatgagattcttaatcctgagttctagtttgattgcactgtggtctgagagatagtttgttataatttctgttcttttacatttgctgaggagagctttacttccaagtatgtggtcaattttggaataggtgtggtgtggtgctgaaaaaaatgtatattctgttgatttggggtggagggttctgtagatgtctattaggtccgcttggtgcagagctgagttcaattcctgggtatccttgttgactttctgtcttgttgatctgtctaatgttgacagtggggtgttaaagtctcccattattaatgtgtgggagtctaagtctctttgtgggtcactcaggacttgctttatgaatctgggtcctcctgtattgggtgcatatatatttgggatagttagctcttcttgttgaattgatccctttaccattatgtaatggccttctttgtctcttttgatctttgttggtttaaagtctgttttatcagagactaggattgcaacccctgcctttttttgttttccatttgcttggtagatcttcctccatccttttattttgagcctatgtgtgtctctgcatgtgagatgggtttcctgaatacagcacactgatgggtcttgactctttatccaatatgccagtctgtgtcttttaattggagcatttagtccatttacatttaaagttagtattgttatgtgtgaatttaatcctgtcattatgatgttagctggttcttttgctggttagtcgatgcagtttcttcctagtctccatggtctttacattttggcatgattttgcagcggctggtgccagttgttcctttccatgtttagcacttccttcaggagctcttttagggcgggcctggtggtgacaaaatctctcagcatttgcttgtctgtaaagtattttatttctccttcgcttatgaagtttagtttggctggatatgaaattctgggtcgaaaattgttttctttaagaatgttgaatattggcccccactctcttctggcttgtagggtttctgccgagagatccgctgttagtctgatgggcttccctttgtgggtaacccaacctttctctctggctgcccttaacattttttccttcatttcaactttggtgaatctgacaattatgtgtcttggagttgctcttctcgaggagtatctttgtggcattctctgtatttcctgaatctgaatgttggcctgccttgctagattggggaagttctcctggataatatcctgcagagtgttttccaacttggttccattctccccatcactttcaggtacaccagtcagacgtagacttggtcttttcacatagtcccatatttcttggaagctttgctcatttctttttattcttttttctctaaacttcccttctcgcttcatttcattcatttcatcttctattgctgataccctttcttccagttgatcgcattggctcctgaggcttctgcattcttcacgtagttctcgagccttggttttcagctccatcagctcctttaagcacttctctgtattggttattctagttatacattcttctaaattttttttcaaagttttcaacttctttgcctttggtttgaatgtcctcccgtagctcagagtaatttgatcgtctgaagccttcttctctcagctcgtcaaagtcattctccatccagctttgttccgttgctggtgaggaactgcgttcctttggaggaggagaggcactctgctttttagagtttccagtttttctgttctgttttttccccatctttgtggttttatctacttttggtctttgatgatggtgatgtacagatgggtttttggtgtggatgtcctttctgtttgttagttttccttctaacagacaggaccctcagctgcaggtctgttggagtacgctgccgtgtgaggtgtcagtgtgcccctgctggggggtgcctcccagttaggccgctcgggggtcagggacacacttgaggaggcagtctgcccgttctcagatctgcagctgcgtgctgggagaaccactgctctcttcaaagctgtcagacagggacatttaagtctgcagaggttactgctgtctttttgtttgtctgtgccctgcccccagaggtggagcctacagaggcaggcaggcctccttgagctgtggtgggctccacccagttcgagcttcccggctgctttgtttacctaagcaagcccgggcaatggcgggcgcccctcccccagcctggctgccgccttgcagtttgatctcagactgctgtgctagcaatcagcgagactacgtgggcgtaggacccgccgagccaggtgcgggatataatctcgtggtgcgccattttttaagccggtcggaaaagcgcagtattcgggagggagtgacccgattttccaggtgcgtctgttacccctttctttgactccgaaagggaactccctgaccccttgcgcttcccaagtgaggcaatgcctcgcccctgtttcggctcgcgcacggtgcgcacacccactgacctgctcccactgtctggcactccctagtgagatgaacccggtacctcagatggaaatgcagaaatcacctgtcttctgcgtcactcacgctgggagctgtagacagcactgttcctattcggccatcttggctcctccctgattctaccaccaagaataaaatagttgtttgtcccctacagtagaacaagtttgcccattcatccttgtgatagatatgcatgcaaaaccaaaatgaaatcaaatccccacagatggctcgtaagtcaaaaacactgtttaattctttcactgcatccctttgggaagcctggcccttggtaagtagtaatgtacaatgtatatagtgtcaactattctcttattttttaatagaatgtctttgtcttatttaacaggtttttttcccatatttcttgtaagaagctctgtgtcactgtttaccttaatgtgtatgtccacagaatcttgctctagtttttgttttaataaaaaagaagtgtccgtatactaaaactatacaaagcatatctaaaattgattatggctctaagtcatgtttttagaggcagtcaggcaaacctaggtgcattttaacattgctcttccaaatggattttactaagaaacagttgagtttcaagcaggaataaaggaaaagcagatcttggagatttaactgttgagcagatgcagtaaatgaggttttggaaataccgctgtcactttagatattttatgctgagttacctatgtgacccaatagctagagctgctgatattaaaatatttttgtaattctgttgaaaatagatgccatgagaactcttaaaaacagagtaacatacttattataagacctattttaaatatttcattctttcctcattttcatgatacctaaattttttgaagactgaaaatgatgagaacttatataaaaaggtacttgtctgtagcatcatggaaattttcatttatgagttgttaacatgtcaaaccaaatcagaaattcctgatatctttattacattaaagcaattcttaatgttgcctcttgagaagggtttaatttttttactctttaaactgaaagtttatcttttttatgcaatgacgtgcaatcatttttctcttaattcctgatgggcttgtaatatatacatatttatttgtgtgtgtatgtacctacatatctatt

SEQ ID NO: 5982 - DNA, 6000 bp, Homo sapiens
ttttttttctcctaattagttggtgacaaagttcctgctgatataaggttaacttccatcaaatctaccacactaagagttgaccagtcaattctcacaggtaaatatgatatattaagtcattgaatttctgaagaccttcgcatattccatgccaatagagttggctcttgcctcactgtccctttatggtatcccatcttaatcctctctaagatacttatttcttagtgctttagtctcgctccattgcccaggctggagtgcagtggcgtgattgcggctcactgcagcctccgcctctcaggttcaggcagttctcctgtctcagcctcccaagtagctgggactacaggctcctgccaccatgcccagctaatttttgtatttttattagagatggggttttaccttgttggtcaggctggtcttgaactcctgacctcaggtaatccacctgcctcggcctcccaaagtgctgggattacaggcgtgaaccactgcacctggctgccgatacggttttaaaggcatgatttaaaaacaaaacaaaatggctgggcacggtggctcatgcatgtaattccaacactttgggagactgaggcgggcagatggcttgagcccaggagttaaagacgggcctgggcaacatggcaaaaccccgtatctacaaaaaatacaaaaattagccaggcctgtaatcccagctactcaggaggctgggtgaaaagatcacttgtgcctaggtcaaggctacagtgagccatgcttgtgcctctgcactccagcctgggggacagagcaagactctgtctccaaaaaaaagttgtaatttgttcgttaccataggtaaatcttaaggttgaattgttgtctgttttgtggaaagcaaattacttattcgatgtcctttttccaggcaagaaaaatagactccagtgctgtaatttttttcactggaggagtgctaatgttgtatcaatctttacagtatccaaatacacaatgaacaaaagttagcccccataagagatgaaaattgtactacctggaatttgcacaattgtttgaaacattttcccgtttttgtgtgataaaagcacaatctagggtggagggttcatactaactggaagtaagtttgtcagaagaattaactttaaatacaatgctaacttggattaaatagtaaacataaagtctaaaggctctcaagatttatctgattatcaattttgaaaagcagctaatgtcatggagacagttatatgagtaacctggctctattttttttggtattgtttctttataaatagcttacttattaaaattctcattagcaacaacaagctggaggccaattaagccataaaatgttggagaaatggttgggttatatgtgtgaaattctcatagtgtgccctaaagacgtagttgccatttaaaaaaaatttttttttttttgaggcggagtctcgctctgttgcccaggctatagtgtagtgctgtgatctcagctcactgcaacctctgcctcctggattcaagctgttctcctgcctcagccacctgagtgtctgggattataggcgtgcgccaccatgcccagcttatttttgtatttttagtagagacggggtttcactgtgttggtcaggctggtctcgaactcctgatctcatgatccgcctgccttggcctcccaaagtgctgggattacaggcatttaaaaactttttaggctggtcacggtggctcatgcctgtaatttcaggactttgggaggctgcggcagtaggatcacttgtggccaagagtttgagagagcagttatagtctctataatgaaaatctttttttttttttttttaaagacagagttgcactctgtggcccagtggcgcgatctcagctcagtgcagcctctgcttccggggttcaagtaattctcatgcctcagcctccctagtagctgaaattacaggcatgcaccaccacacctggctaattgtatttttagtagagatagggttttgccatgttgtccaggctggtcttgacctcctgacctgaagtgatcgcccgcctcaaacccccaaagtgctgggattacagacataagtcatcacacccagcctataataaaaaactttaaaagtttaaaaaaaaatttaaacttcatagaggttctcgaatattatctttctttcattaagaaatcataatgtagtttttggctaacttgtggaaccaatttttttggtcaaatattgagagtgaagtttgctacctgtaacttaaagtaacatttagagacatattttactcagattgaccctaattatatatctatgacatgatttttaaattgaaatcagctgggcatggtgtctcatgcctgtaatcccagcactttgggaggccgaggtggggggatcacctcaggtcaggagtttgagaccagccttggccaacatagcaaaacctgtctctactaaaaatacaaaaattagctgggcatggtggcacatgcctgtaatcccagctacttgggaggctgaggctggaaaattgcccgggaggcagaggtttcagtaagccaagattgtgccactggactccagcctgggcaacaaagcaagactccgtctcaaaaaaaaaaaaaaagtagttctttatttaccatgcgatctttccagtacacttgctaattgctactccagagcatagccagatgtggcccacacctgtaattccagcactttgaggaggacaagatgagcaaattgtttgagtccacgagttggagaccaccctgggcaacatggtaaaacctcatctctacaaaaaaataccaaaaaaattaacccggcgtggtattgggtgcctgtaatcccagctattcaggaagccaagttgggaagattgcttgagcccaggaagttgaggctgtagtgagttgtgatggtgccattgcaccagcccgggtgatagagcaagacctctgtctcgaaaaaaaaaaaaagtatcagtatatatgttaaagtatttattaaagtatacaacaaatatatgtaaataatacagtcacagtatcagagtataaaatgattactgaaaaataaattaatttgaatagttactccagaaaataatcaatggggattctacttgaaaattcacttttttattttggaattgtgttgatttttatcctgacaccctttgttctggtattaatttccattactaagttttcccagcttacctcctttgaatgaattgggccttttgccaaccttttctcacactaacagtatcccaagagtggtaatgggtgggcatgaatgagaggttctaggttcttggtgtgggtcgcagagatctgttttttctgtctcacaacccgcttaggtgaatctgtctctgtcatcaagcacactgatcccgtccctgacccacgagctgtcaaccaagataaaaagaacatgctgttttctgtaagtactttatgaaatgtgtttttatttacagacatttccaaagcctaatcaaatgttatgtttttcactgccaaccatcactggctatcattctaaaggataatcacacttttcatggtcagtcttaggtgtcagaatatggcagtaacataacgtgtgacttagatgtcttttaattggcaagttttgggggaccaaaaaataatgactagcttatacatcttcaaactcttacctgcaaacatagttgaaaagtagatttgtttggaaaagccttagccaataaagggtattttcaaaatgatgtagatgacagctgctatttgtatgtggttcacaataaaaaggtgcgtgtttagagagagagagaaagcaaacatggcaaaccattaataatggtgagtctaggtgcaaagtatatgaatgttcattttactatttcactttttctattgatgtgaaaaattctttgaatagtgaggaaatgattttaagttggggacatttgtgggtttgtatgagaacctgactactacccatagtaagtaaatagaggtaccctgaaaatagtgaagccatgtccttctcttataacactaggaattaaagtggcatgggagagactgctcacatttgatttctttggtttttggaccctgtcacatgagtaggggttgtcaagatagcccatggggctagttgccgtttctattacagtgagaaaagtaggggccttgagttgttggagccagaagtggagaatgcttagagttgaactatatgagtttgaaaaattgggaacacagaggggttaagagcactgcttgaagatggtctgcaagccgggctcaaatagaaatctaggtgggtcagtacagagctgcctgacataagtaagtagcacatggagcattgcttgttgtcacagttgtatggctggttgcttgaacagtagccagtggaagacctagtagaatgtgtagagaatctgggtgccctagtcaaaaaccagcgtcggtatttaagttgggatgtggtattcatcttgtgaccagttctctacttctgtcctagggtacaaacattgctgctgggaaagctatgggagtggtggtagcaactggagttaacaccgaaattggcaagatccgggatgaaatggtggcaacagaacaggagagaacaccccttcagcaaaaactagatgaatttggggaacagctttccaaagtcatctcccttatttgcattgcagtctggatcataaatattgggcacttcaatgacccggttcatggagggtcctggatcagaggtgctatttactactttaaaattgcagtggccctggctgtagcagccattcctgaaggtctgcctgcagtcatcaccacctgcctggctcttggaactcgcagaatggcaaagaaaaatgccattgttcgaagcctcccgtctgtggaaacccttggttgtacttctgttatctgctcagacaagactggtacacttacaacaaaccagatgtcagtctgcagggtaagaggagtaatttagaatattccgtgtcgtggttctttgttcatcctaccaatatgccttcatgccatcaaaacttttgatttgtaatttcatacatttctgtgggctgtatgtatagcctgagcttaatttctaatatttgagaggatctaatcatttaattcctaaaactttcacaaaatacaggatatctgtatggctgatatacttgtattagatgtaagagaattagagaaattatattttcctttaattaaaaaaaaaaaaagcctgggcgcagtggctcacgcctgtaatcccagcactttgagaggccgaggcgggtggatcacctgaggtccgaagtttgagaccaacctgaccaaaatggtgaaaccctgtctctaccgaaaagacaaaaattagctgagtggtggcgtgcacctgtagtcccagctactcgagaggctgagacaggagaattgcttgaacctgggcagcggaggttgcagtgagccaagatcacaccactgctctcaattctgggcgacaagcaagactccatctcaaagaaaagaaaagaaaaaagacaaggtctcattctgttgcccaggctagtgtgcagtgacacagctgtggctcacttacagcctcaacctcccaggctcaagtcctcccaccccagcctcacaagtagctgcaaccacaagtgcatgccaccatgccccactagtttttttatttttttttgtagaggcaggttctcactatgtcaccaggctggtcttgaattcctgggctcaagtgatcctcctgccttggcctcccaaagagctgggattataagcatgaaccaccacactcagcctcctttctaattttcctgatcctctgtctctaggtgtatgttaatagacaagttctagagaaagctgctagttaacctccctacctgaagtcctaattggttttt

SEQ ID NO: 5983 - DNA, 6000 bp, Homo sapiens
tcttgaaatttgcagaggtctactttgcacagtcccagcaaaaggtgaggcctagtcaggctgctgcttgaccagtaggacattgctgctcttggacaatccacgattatggggctagagagtgtgagagtctctccagaaaggcagaacagatgagctctagagaagcatgttccatagtgcacaaggctgcacttgccttgggggtgagtgacagaaagcaatgccagaatccttgttttgccaactaactgatcctgttaaggccctcctggctacttccctccatggtttgccgcaccttcttgtttttagccttatttttcctctgtcccttcctgtgaatttccttcttcctatgctaagctttttgtttgtattctttgttccttaaagccaatataagaactcctgggcagtgaaggaacacggctttgatttgacccgggttaaggatgctaaccaccctggatatccagacccatcatttcttaaattatttttgaacttcaagcccaaacacgtgcatgatgtccaactgcttgaaaggatgtaaagctgatggttttgacattgttttcttttcttatcctggaaggtatttgatgtacgattgaatggccacgtcgtggtgaaggacttggatatctttgatcgtgttgggcatagcacagctcacgatgaaattatacctatgagcatcagaaaggggaagctgagtgtccagggggaggtgtccaccttcacagggaaactctacattgagtttgtcaaggtaattcccctattctgcccattgctgaagagagtgggtacaggggaagttgtttgctgctgtgtggggttgaccactgtttcccttttcctaggggtactatgacaatcccaaggtctgtgcactctacatcatggctgggacagtggatggtaggttgtgttctgacctgcttttttgacttgagtggagggatatggttgaggaagcccttgggaggtaattgagctgatgactattttggaaacacttaaagctaaattgtaggggattcagaatcagttggataaggatgaagcataacatggtactagccacaagctttggagtcaggtctatgtatatcttgttgctgccatttaatcagatgtttgtcttggatggatgcttttaatttccctataaattgggattaataatggtacctattggtgtaccctgacctttgtagtcatttgggatcacctaaaacttgtccttattctgtttgtttgacatctctttcctaggggaaaaaaaggtaaaaggaggagtcctgtaggcttttggtatgctctgaaagattccagcattgctggactgcactgggacaaaacttcacttatttatgtctccttatccttgggatcaagtcttagagtatatttctttctcagggtttagattctcctggctgccagcatctcaggctgatttttgcagagaaagctgcgtctttgtgacatttctcccccattccacctctgtacctttccccaactcaatcttgaatgcactgaggatttcatcctgttgtcttgatgtcccccaaatgctgatattatgacatctaggaggatgaatgtcttaccaccaaacagacctgtgttcaagtccctgaggaggaggcaggacagagggatagtgtgtgctgggaacccagaactctctgggtcaacgtttcttcagttgttgtgtgaatcaaaagggaatgtgggcttgtgggaggaggagggatttgaaaaggctaaagtttaggcattggatcattgtccctgtccagtctggttatcttggggctctgtaaaagtagaacaggaaggtaagatagtgaacctccctatgagcacggctttttctactttctagttaaatctaaagcttttgcagcactctgctgttctgtagaccagaggctatttctgctacttctggtcttttctctggacccgggttcaatcacagcaatctctttattgtggcttatttgctgcttttaagggtctctcttacttaaatgctgtgggtcttaacagtgttttcttccttgtgttagatgtaccaaagcttcagcctcatccgggattggagaagaaagaagaggaagaagaagaagaagaatatgatgaagggtctaatctcaaaaaacagaccaataagaaccgggtgcagtcaggcccccgcacacccaacccctatgcctcggacaacagcagcctcatgtttcccatcctggtggccttcggagtcttcattccaaccctcttctgcctctgccggttgtgagaacaaatgactatcctgaacagggtggaggggtgtgggaaagaaaccagccatattggttttggtttctgtatttttcacaatgattaatgaacaaaaacaaagagaaaaaaacacacatcaattaaaggagacaaaaagaggcagagcgagtagagagcagccctcattcaccacctggtcccagacgtgcttcagtcctcgtcctctctttgtggctggctcccagccttctctttcctcttgaggatacttagggtaaactggatccttcctgctcaaggatcctcatttgtatacctagtggaaaggactctgaactcagaggagtcactgttcctttttttaggttagaaattaacagcagggaaatgccatcttattacctgagacgaccagcactgggagttaggtacggtctgaagttatgtctagataagacttcagacgtcctgggattgaaagaatgtgtgtgaaggggtagaatttgtgcggtaaagacttaaaaaaaaaagtagggagattaaaaaaaaagaaagaaaatgcttccttatctggaagcctttctggattaatccagtgatggtcccacctttagtgtttgagctttgtcattgcttgtctccctggcatgtgccagttatagactgtccagcatccaagacgtttcggttatgtcgggtcctcagatcgcctctgacttgttaccacaacaaatcattttgatttcagtgcctgttggggacttgatttcttctcagttttgtttgtttgtttgtttccttaatctggctcatttgaaatttcttctccctctcaaccatcccactaagttatagccaagaagggaaggagacacggggatttggggttctctgcttgaatgtcttctcctttaccacctcaccttgttggtacctccctccctggatctctgagccagcagccaggaggacctgacccagcagttctttactggcccctttgtagggccttgctgccagggggcagggatgctttccagcctgcagcaacagaacacttgaccttaaaagtctcttctggtctttggattagaaaaggcttatgttagcatagcttaagagcaacctcagagatttgagccctactaagtgactgaccactgtttagagtgtctggtatctgatgttcatttattcccatgttcttgtgtgtcacagttcagccagttttggtttatgcctagagctacttcaaggaactagactaattagctatataggcccagcgatgcttcttattgatcttaatagtatgcccctccttcccctgtcctttcatttctctatccaagtagcagtcaggttcttggtgtgatgggactgaaagaattccagtcagccagagccttggcagctctgaagctaaccttagcatctaagtgtcgatcttgaattccctgaaaaaatttctataggaaatgaagcttccctggtcccctcctttctggccattgtcatccatttcccagttagggcaacaatgaaggaggacccagccaagctagaaggaattttgtggatgggagacagcaggattagcttcagcttgggctggagcagtcaatataggatctcaggccaggcccgcttttctagaatgtgtttaattttgagtttgctttattagatatgttttttaagagctctgtatatttgaactgctccttatgtgacaaaataggtagctcttgggctcatgtcctgggttttggctctttaatgattactccaggccagcatttagtcgtttgagaattgtagcctgttgttttcgctgtgacttgggtctcagtgctagggtattgagtcaggcagctggagggttgtggcccgaggctgcagtcagaggtatacttcccatagtgcttcacacagctcccctgcttctaaaggataaggtactgtagccttggtcctggggaccacctgcctggggcagtggacatcctaactaaacaggcttctggcagtagctttggttcctatcccatcgaaattccccaaagccctgggccactgccattgggttagtcaagatgaaggaggaggactggctgcctccattttgccttgtttgttagtttgcctgggtctgtctgaggaaggagggggtcccgccttccacctcaacacatcccttcagtgactcagagtctcagaaggaaaccctgactcctggggccatttcctaatggtactgtaagccaagcagctttgcttctgcctctgtttccaagcccacccttttcccctgagctcagggttagggatgggcgctttcctctctggttgtgaacgaaaggaaggaacatctttctatggctaacaaaaactaaaggggaagtgaggaaacaggaagaagtatggtgggggctggggtagactcccctggagccaagcctatccagctaacaagagctccctggggctggtcacagctggctcatgatgctgaacttgaaagtttttttgtttttgtttttgttttgtggctcctccaagatataggtacatgaagtttaggttaaaggggtgggattctttatttttatttttgtattgtatgtgtcaagaattactctgttgttcaccttttgctttttgcactgtttgttctcttatctgtattttgagcttagtgctaggactgagaggctgcaccatagggaatgtatgggagatggtgaggggtgccagtgaggggtgcgtggaggagaggcctgggctcctctactggatctacactctgtcccaggtttttagatcccactgagcccagctgactgaaaacaaggacagtcagggtgaaacttcttttgccagaagtgtggcctgagttgaatttctgggaggatgacgcagatgtctgctgcagagctgggctgagagttctgcagtctagctctgacttaggtcaggggcctgttggtctctcattggacgtttttgggtctcactcatgcttactgaaacattgtgccaagaaactctgtgggatttgtgtcccttaaaccagactcacttttctgaaaaatctccattgttgaggagaggctgctcaatcgacaccccgagttctcatgactgggaagatagttttcttcaggtgtcaatggcgttagactcccaggaagactagccctgcccacagggccacctgttggtttgagagcgtgttcgtgttctcttgccctccctgcctaagagctactgggatcacgttagcgggcatttaggctttgatgagagggcacagtttgagttaggtttacctccccctttctgtgcctgggaactgtttggtccagctttagaactgtggttttgacttccttatctcttgggagaagcttctgttttaaggaatttctcttccttcttctcctgcctctagcctctcctggaaaggcctggatatggtttctaaaatctcagctgagaacttcagaaaacagcagcagtattttccttttcctagtgctaaaatccctttccctagaaattggctcaccttgggaaacccagggaaagaatcagcaggttctctgccctccctaggggttggggaaggacccaccccggtcagcacagtgccttttcctctcctgctctgagccagggtggggcattccctct

SEQ ID NO: 5984 - DNA, 6000 bp, Homo sapiens
ggcaagcagtgagagcctgggggcaagttgaacagggagagcagaagcagaggtggcgggagagttacagactatgcccagggctgcgggaaagcagcttgttaggcactgagcccaccaggctgcgcggggcctcagaccttgcccacatgaacacccaggtctcagatccacacacaggcatgcaggcaccagcccctccttatcctcagagacatgtgcacatgtgcacaaactcagagacgccacagccagctgagcattctcctgtagaggggcttgcaggcctggcttggatcctggccctttgacttactaactgtgtgaccttaggcaagctaacctctctgatccttagttttctcttccataaaacaggaatactgctacttacatcagtgttgttagagtccagcagatgctatagggacagctgccctggggacacattcagtcaaacccatcctatttcccatagctgcagccccaccacatcggactgtcagcatcacagaaaagttcaggaagagtttagagatatccttgctgtccccagtctcagactaggttgcactgggctccaggaaggaggctacacatttattgagctaagcattttttttttttttgagacggagtctcgctctgtcgcccgggctggagtgcagcggcaccatctcagctcactgcaagctccgcctcccgggttcacgccattctcctgcctcagcctcccgagtagctgggactacaggtgcccaccaacacgcccagctgattttttctattttttagtagagatggggtttcaccgtgttagccaggatggtctcgatctcctgaccttgtgatctgcccgcctcggcctcccaaagtgctgggattacaggcgtgagccaccgcgtccggccgagctaagcattttcactagaaggcaaggaagacgtagtcctaaaataatcctggtcctgtggcctgagggtgctactccacactcttcaccaagtgacaacacagagcagtactgtccaagataagcaggacctgagtcatctgagccctctgattctggggaaacaatgtcctcccagaaaagggaaaactgtaatcatttttcccccttcaagttccattcatccactcgttcatccatccatccgtccatcctccatccatccatccatccatccgtctgtccatccatccatccgtctgtccatccatccatccatccatccatccatccatccatccatccgtccatccatctgtccatccatccgtctgtccatccatccatccatccatccatccatccatccatctgtccatccatccatccatccatccatcctccatccaatgaacactgagtgcctattctgaggcagaattgtattaaatgctagaggcagaaataaagaattatgaaatgagacccctgacatatagatattcatggtcaggggaacagtatgcttcagtggaacaagcatagatttttggagccaagaggcccaggttcaaatcccagcaccatcacttacttgtgtgtggccttaggacaaatcacttagcttctatttattcaccccagtttcccgtctgtaaaatggggctaataatttttacatttcaaagttcttaaggggatgaaatgaagtaacatgtaaaactcctcgtccgagttagatgctcaggaaataagtcctattccaggccctctgaaagtatggatgagattagaagatgagggtggtgagaacattctgtggtggccagtggttcctactgcagcaaaggtgatagattcattcagctacctgtcgtcttcaccctgcacactcctcagtgtggaaacagcccagtctcagctaggctttccaggatgcctaccttttgcaaagatgagagtctctggcctccaggagtttactaaccagtctgaataccaagtgggtcttggaggctaggagaacttgagtgaggaagggctcaacattagagagtctctggcctccaggggtttactaaccagtctgaacaccaagtgggtcttggaggctaggagaacttgagtgaggaagggctcaacattagagagtctctggcctccagaagtttactaactggtctgaataccaagtgggtcttggaggctaggagaacttgagtgaggaagggctcaacattagagagtctctggcctccaggggtttactaaccggtctgaacaccaagtgggtcttggaggctaggagaacttgagtgaggaagggctcaacattagagagtctctggcctccagaagtttactaaccagtctgaataccaagtgggtcttggaggctaggagaacttgagtgaggaagggctcaacattagagagtctctggcctccagaagtttactaactggtctgaataccaagtgggtcttggaggctaggagaacttgagtgaggaagggctcaacattagagagtctctggcctccagaagtttactaactggtctgaataccaagtgggtcttggaggctaggaaaacttgagtgaggaagggctcaacattaagatggtgggactaaggccagaggcagtcagataaaaacagggagggaccaggtagctcttttgggggaaagtcaaactgtaccccctgggccaggtcaaccaggcagctgttctctgacaaggtgaaggagaggtgacaggactgctgggctgttgctgttcatcctcacagaaagcatgtcacactgtatgtgctaaatataatttttgagggaaccaacaaggaaattcaccatcttggcttgtctgatcctctcccctctttctcctttttatggagaggctggtgttttgttctggagtagctgtagctaggtgatcacatggactttgatgtcccctctgcaataactctgtggtcaatccatggtggacctgacatgcagggacaggccacacctgagcaccggggtagctcaagtatggattctggctgggccatgtcctactgtgccacagctgacccccagcccggcttctgctttcatagaggcaatgggtctgagagctgagacctgctctgccttcctcttcatgtggaaccccacaggagaggctgagaggggcccgagagacatatcgtgggggtgcttgatggaaaactacagactgagagtctcacttcacaccccacccctgctgggaagttctaaaatacacagaggaagcacatgtaaaaggaaatttccctttctccctgcaacttcctctcccttcataccacctagagctgaagaagcacctcctttgtcttgaaggaggcaccagctattctgaatgaagggcggtgggacagtgctgtaccccacaccaggtgggcgtgctcagggacagtgaccaggacgctgttctggaggagctcactgggcacacggcatagggcacatgtattcaaaaaatacccttccccattgatagctggcaggccactccagacaaattctagctaggtgcctggtgctatgcagtgaccagaggtgcctgggaccagacaccccaccatcccagcctctgcttccagaggacacacaacaaacacccacacctccccttaagcacctatgatatccctgcaccctcacagcaaccccgcaaagtagatattgtgttgttacctacctttgacagactgggaaaccaaggctgacccttgcctagctgtcgtgactgatacatgatagaggaggagaagaaactcaggtctgtctggtcccaatcctgggtcctctctacattgcttcttgaggtacgctctgggtgctttctctaggaaaatcccaaggagaagggttgtgaaggtccagggccttgcctagaagccacagagggcaggtacttggtggaaaactccagcgtgtgattcaccctcctcccttgccctcgtcagtgaggtcacctcccctcccaaggttctcagtttatagcctggagtctctggtaagagagggctgtcccctgtgctgcacatacccgtctcctcatccctgggaaggagatggttctggagggggataggggaaaagggggaagggggaagggcaaggaggaggaggaggggagatgaggtcagggtgtgagtctctgagccccttcccctgcccaagggagcagcagctcagcccagctctggaggggccatcatgggactgtgcccacggggagggcaccggtctggagacagtgggttcacagtgggagtgggatgggggtgggagcgctggggacagaggacttgacttcctgaggttggatgttgtaatctcggttcacaaacttttggcctcagtccctcctgctgctcctggtatttctctgtcctttcactccccaacacacacagcccccgccccaacacatacacacacggcttctttctgtctgggagtccctggacaagtcacatgggattctgcgctgggaggaacagggtaaggcgtgaacgtggagggcagtttccctttcaggtcccggctctcttggctttcccataagcagctgccttgggactctcctggagacctgatgcccacagccaagctgaccacaggagccggtgctggggactgaggtgagcgggaagtggaggggctggctctgtctttgcagtctccaactgctgctcagaggggctggagggatagagccctgggaagcgagactctgtggaactgcgtgtctgcagcggggggcaggacctgcaataacctcaggccaaagggcaagtctgatgcccacgactctcaggacaaggggtgccccctagctccgccccatccagcgtgggagcagctcagtgattagcctgtggagcaggaaagtccagcgatgggcagctggtcacggcagtgggtgaaagcaggggtggtcatctgacgaggggaggggaagcaggtggtgcccagcaaggtggaaggagaagtggacaggagaaacctcggggcattcccgagggcccaggaactgcaataaatgatcacaggtgaggggttcctgcccgctgcctgccggctgagcgtgacgagctgggtgccaggcgcctcccaggaggaagctgtcttggctttgggcggtggatgctatgggtgtgcttgtacccgaggggggcactcaggggagttgcaggcagccaccagctgagaccggcactcacggggtgtgaaggactacagagagagccaggttttggtgccatgcacacaggtatgtgtgtgcgaagggacgtgacgggaaatggcaccagtgtgtgtatgggaatgggtgttggtatgtgggtgtggactgaagcaggggctgggtgtcccatccccccgtgtgcagggtctgagctattcctatgctggactggggagcaaaggggacagagctgggatcccagcagcacatgggcagcagcatttctggtctcgtctgcacctctgctagccccagctgggcctctggcgacatgcccagctcctgaaaacagacttaactttggactttctagtctcttgaagatttgctctctgggcagcaccaagcccggtgtggaaattggtgtgtttgcttctggagggcactgaagtatgatgaggcccatcccccacccctcacccccctgtcccggcttagcaaagcaggtgggcggccttggaggagactcgaggggctggagaggcggccagccgaagctggaggtggaagggcacagcgggggtggggtgtgtagtcctttgccttttaaaagtagcccagaaaggagaactcagtacagcttgttttggtgtctaacatcctctgggccatttcttccctgagtctaacttaaatccctcttgctgcagtttaagcgtgttccctcttgagttaccacggctcggggccagctgtccttttcacttgctcttgctttcattctgccgttctggattttcattctgaaccac

SEQ ID NO: 5985 - DNA, 6000 bp, Homo sapiens
attactggcagtgcaggccctaggctgggcctctaggaataattaacataacacattcaactggcttgctaaggttaaatgctatctgtgcctccttcaggaagtctggaaatcaggaagccattatctcaagtgcatgctagaggaacacatcacttgagccaaatctgatgatcaagaatcatagccacaactgttggctccagggctacctgctgctgcagcacctgctagaatggtaccagtaaagtggatgccttgctctggccaccaccactctcccattggtggaatctaaattatatctagaaacctagctgcaagggagtgtgggaaatgtagttttcaactttctgtcctttatagaactggactgaaaagaggtgggaacaaatattgagtggaccaatccaccacaaagtgttagcaattaggctgccagtactgtccttggtacaaggaaagtcttctctctcccccagtctaatattacctattgttagacacagttcaggtcctatctctttattaaattaagacttacctgatctctcctggcctcattgatttctccaccgttctactttcctttcttctttccttccttgcttccttccctccttcatgcatgtatgcactgtgtaggtatgtgtgtctctgaaccagacttattcttcgttctgccatgtagtttagtctatatcatgcaattgttttgaggtacagtgtcattttagatgggttggtcttgcttggttaaataggctctaattgacttaaggccagataagtttctttgtgtatcctctcctttgatctataacgccatgcagtataaatagcaagattatgtattttacattggtactattaataaattgtaccaataagcataacaagaaattgatgccttccttaagtacctcacaaggttgtggtaaggatcagaaatgttctgtgctaaataaattgtaattcgtaacctattataaatgttgacagatagtaattacggttgtgttaacaccaagatcttcacatgatgaccctagtctgccttttaattaatcgtatagcctgatgattatttctatttttcagtgaaactatagttctttgtttcttgaactcaatctgcacttcctgcctctgtgccattgaccatgttctccctccactgtgaagtctcagctcaggccccatctccatctgtcagtcttctctccaccaagcagtctgaatgtccagcaataaccagttagatgtcaatttctggcagagttaaccaagtatcaacagtaatggtgtagacctgtgcttactgacataactcaggataggaaatgatatcttgttaagtgaaaaaaatgttttaaaaactcaatgtttggtatcatttccatttttgtaaatgtgtatatattttttatttgtgctcattctttcatttgacagatatttattgagtgtctactgtgtgccaggcactatatctatgtgcatagaaaaaccctggaaggccatacaacaatatatatagagtgatcgtctctgcttgctgagctaacaggtgaacttttttctttttgctcattttattccatttgaaaaattgtattttctaacttttctaccaaacctatattagttaattaattaattcatttattttttaataaattagtatttattaataaataactaatattttttagaataatcacttctgttcttcaaaatgcttacaatatgatactcaatgaaaaaagtaggctaaaaacaatctaaaatcaccaatgctaaacttaaaaaagagaaggaagaggagctagagctagagaaaggaaaggaaaagagaaaaggaagaaaaatcttaacagtggcccatttgggggtggtagaatttcttttacaatatctgttctaaagattctacagtgagtatgtgttgcttttatttatttttttgagacagggtctcactctgttgcccaggttggagcacagtggcatgatcacatttcagtggagctttgacctccctaggctcagatgatctcccaccacagcctctcaagtagctgggaccacaggcacgtgctacacacccagctaatgttttgttttgattttttgttgttgttttgtttttttgttgttgtttgttttttgtagagacggggttttgccatgttgtctcaaattcttgggcttaagtgatctgcctgcctgggcatcccaaagtgttgagattacaaatatgagccaccatgcccagccattgtattacttttagaattaggaaaaaaaaatttcaaggtccaatccaaatgtgacttttctatgaagctgcctgagatccctgcatttaacattttttaagctttttcaatcccttcatcacttagtgctcaataaatatatgataagttgaactgatactatttttgcaagtgtggccttggtgataggtgtcattaattttgttaatttttctcttcaatttccattttgattttcaagaacaagttaggtttcagagaggttatttaataataataaaaaattattctttgtgattaatttgtactagtatttgcataatattgacctaattttagtgaccaggacttcatctgttgttttcattcttttgccttcttctctgtttcttactagttttacacacgtgcacgcgtgtgtgatatgcatacacacactcacatatatatacatacatatgtatttttaatatgaaaatttaaacagtagactcgggatctattattagtcaatcctttcttaccgcagaaaattttttgtctggtgccctatttccttccattttgtagagagaaaagtctccttaacccagattggaaatgccatccgctgaattaactttctatcagccctgtaatatcacttcagtagcctgggatgtagtcacacaagagggagtcagtgtggcaagacttttagaaattacccagtctagcccatttggacagctttcatcaaagagggccaaggggtaagagtggggttcaaccattttaattcatttcagcttttgcaacataaggcagatggtaaaacatcaccactgcatgaaggtaccagaaacaatcagaaatgggccgtctctagcaccaccactgtggttagaggaatcagcctcagaccaggagtcatgaggtcaaatctccctgtcctggctctcctccttcttgaggaagtgccttgccctgaagacaagacaaggttcctagaatctgagatgttataaacatgtgtatattatggcacattacaggatcctgaaaccagggaagttttattctagataggagactgtgtgaatgaaaagaataatgtgtggcctggctgtggaaagaggaaaagagggggatacctggaaaagttatcattctaaggcactttctgtgggtcttcaaaataatagaaattagtaagatgcttcttgaaatattacttagttgggcgcattgaggtttgacccttaactaggctatagccatcttatggaatttaggatcagacaaaattcaaaacattgtccaaggggatttgctaatgacattttttttaaaaaaaaccagctcattgacattctgcttgattccatggtccccatcactttgctgagagtatcacggtgaggctccccatgcattatacgccttgcttttgaagttgcatttgcctctgtggccatctgctttttagacaagattgggcacattcagggtggcatggccatagacaagccatctgctttttaattcgtgaggctgctgtgcccccaaaattctttttctccctccctacttactatgggtgatccctcagaaacttaaaccacagtcatccatatgggagaaaatgtgaactctggaggtttttcatttctgatgagtaatatagtagcagttggattaaaccaaatcctttgagtatgagtttttaattccctaattccctgacataaagtgatttcattgaagagattgatttaatctcttgcagttgatggatacactacttgcaaaatttcaaaacataaatttgttgtttactggttgactaccagggttgcgtgcttgatcccaggatttgcatttttctttaagctgggattgctaaaccgaaggtgcttttgtgtctgtgcagtctgtaccagctatgtgtgtgctctgcgatctgacacattaaaataactgaatcactttcattttaaaagcactgcttcaggccgggtgcggtggctcacgcctgtaatttgaacactttgggaggctgaggagggcggatcacctgaggtcagtagtttgagaccagcctgaccaacatggagaaacctgtctctactaaaaatacaaaaatttgccaggcgtggtggcgcatgcctgtaatcacagctacttgggaggctgaggcaggagaatcgcttgaaccagggaagcagaggttgcagtgagccgagactgtgccattacactccagcctgggcaacaagagcgagactccatctcaaagaacaacaacaacactgcttcatatcataaaagggggtctctgttacctacagctaacatgatattcttataaacctgatcagtaagattatggggcatgattcactgtatagttaaaaatggaaggaaatctataaaaggcataaaatttagatacacctccataacttgatagacaaagattgctttaatgcatctagtagcaacatgtaaaattgtataatcagtaaattaactacttgtttatttgtggtaatttatttttaatcagtagcgtttcatatgtttagttatttttttattttgctatattttaggggtgtcaagcttccattttggtatctacttctaaatacactcagaacaggagaaatttggactaattttcaaactacagacactttctaatcatgatgcatttcaaaagtggactcgaattaactgagttgcaaaacatgacagtgcccgaggatgataacattagcaatgactccaatgatttcaccgaagtagaaaatggtcagataaataggtgagtatttttccactaacatttctatccagtgaaagaaatggctcgtggctcacacctgtaatcccatcactttgggaggccgaggtgggtggatcatttgaggtcaggaattcgagaccagcctgaccaacatggtgaaacccaccaacatggtgaaaccccgtctctactaaaaatacaaaaaattagccaggcatgtggtgcatgcctgtagtcccagctacttgggaggctgaggcaggagaatcgcttgaacctgagaggcggaggttgcagtgagccgagatcatgccactgcactacagcctggatgacagagtgaaactctgtctcagaaaaaaaaaaaaaaagtaaagaaaaagaaatggttttaaaaattattctggtttttagttattctgttgaattattcattactaaagttatgttccatttgaagatataatttgaatttcttatgtgacatctgttgggcatagtctgcaatagcaaatgaagcaaataggaaagtaatttattcatcttttaaaatctttcaattgagactaataaaaatgtatgaatacattgaaccccaaccaagctctgtgttatgaattaaacagactactggaatttcactgcatcccatatccaaatgtgtactacagtcatctgtacatattttaatcaagaaatggtcaaagttgcatttgctaatgaatctgtgttaaactacaagtgtgtcatccttataagcatcatttgtagtatggattttaaataataataatggttgagcccaaatgactctgtgaggaactataatagagacatagtacataaaagaaaaagagaaggaaagcgaccacaactgaggagagaagcaatggggaagaagtagagggtcagggtaggaagagtgct

SEQ ID NO: 5986 - DNA, 6000 bp, Homo sapiens
ctggaaatgcgaatttaggaaagacaggcagtctaccaccctcctcttctcgcccgcttctcctatttctccccactccttcccctccctttcaggagctcagggccataaaaatgcagatggaggatcggtgtgaaataacgggcccatataaatccctctgccgcccgcctgcaagatggattggccgcattgaaattcctccgcgaggataattaaactcggggcctcatccgggcaaaattacattcctgtaatggcgtcgctcggggtcccgggaaattgctccgtgggctttcagcggcggtttttatcgccggccggggtgtgcctgtctgcggctcgcctctcctccgggaccgtaaagctgctgccgtgatttatcctccccttctcccaaatccgattaaatggaggagctcggggccggggcgccgcggggcccgggagccgggagggggcggcgggaaggacggggccaaggaggggaggacaaacggcccctcagagagtggcggatttgcctttatttacagccgcggctttctttttattttttattttttatggggtttggtgagcttttcccgtctttctcgtgctgcgttcaagcacgatgcagggacggcaggggtttggaactggataggccttgtcgccctgttccaaagggcagggcaggtcctgtctgggagacaaggaggcctaggaaagatgagggccaggaagcctcccccacctccttccatcaggggaagggcgagcgaaaggggagagaaaacccacgttcaggagagcatgggggcgggaggggagggcgctgcttatcccaactcgcgtagttgaaacctgagcagaggctcgggcaagcctggagtgacctcgcaaccttacagcgggtcgcaggtgcccgttattcctagactgtcccaggagccaggaaagagggattcggatcatatttaaccctatcttctggctcgctgatgctgcttctctcatggtttatcaccggaatggaaaggaggaaacggggagtgggggaaagggcgaagccaccagaagcagctgcggcattttgctgactattcgcccatggagccggtttgccatccagtgatgccagagtcccggcgcgacagaaagcaggactcccaagatcttcctcctgctgcattttaggcactgaaccccaatcccgaccgtatgttaacactgaattctgagtaggagttttgttttggcagtgtgacgactgcgcatgctcggaaaggggacgcaagtccgagatcccaaacgcggtacagaccaaaccgcagtccacgttacggatcggcttactccgcggagttggcctcatttctgcagtcggcgctccctgtagtttctcctctcgaacgccaggtggagcaaccggccggataccgccacagccctggcaggcggcgctgtgatgcctgagctgatcctgtatgttgcaatcactctatccgtggctgagcgactcgttggcccgggtcacgcatgcgctgagccttcctttcgctcttcccgctgctccgcccctctctgtcttctctgcagtgggagcaggtaaggccttgggacctagagccctctgtgcgctgcgcacgcgcgcgggacacctcaccttgcgcggatgctttgaggcgcttaccttgcgtgctcccaccctggtcctctcgccctttcttgcttccgctatcccttagccttagagttggctcttccgcgtgccggtgacctccaaccgcgcgggcctggcgccatcttggatgtctcgcagggggaggataccttggagctggccaaagttagatcctggagtgctgcttttcacctgttccacccagtccctgcaaacactcttttctcgccctctggccctttcagattgtgacaacccccaggctctcccctcctatctctgctttctcttctcatcctgacttgtgccttctttattctgaaatctccagactttaggccccagaacctcaggtgctccgagcaatggagatagtggatcgtctaaagtcaccaatccctctagtcagcacccctcaatttaaaaagtaaaccttgaacatggtagaagtgggaaaaaaagccaaaacatcgcctcccgttaggttgtggcttgggatagctaaggcagaagagagaggctggttgctttggaatcactagttatttaccagtacctttctcgcatcccggcacgctggtgaagttgtaaaagtcacaaatggtgggctagagatgagggtttctgttgaggcagcaggcccagaaaggtggggtaaggccaagctagtggggccagcatgagaccctgcctgccagctttcctgtgaaggattaattaacctccccagattctgctgttacaaggaaaagaaggtttaaggaaaggaatagttaagttactacccctgtgactcatctacactgaggaaaaagcccgtgatgattttggagtcctgattctggatagtgcctttgcccaagttgtaggctaacaattgcagagttgccatggttagatagccaatggtgggatcacttaattgccaccccttgttgtgggtttattatatgccagcaccacattaaactctttatgtatgttaatttgtaaatgaacatacttaatccccctaagagctgcattttacaaagaagataataaggtataattcccttagaaaagaaccaccccttctttttctaaaagccttaaagaactattggattttgacccaagaaaacctgaatagtacggcagcaaaattgggttagagttacatataggcaaaaatcagagttctagataggacaagagttgaagacatccattaacttaaaagtaattaaggctgggtgtggtggctcacacctgtaatcccaacactgggaggccaaggtgggaagatcttttgatgccaggagttccacaatagcctgggcaaaaaataaattaagagcaattaagatgttggattcagaagtgttttaacctgggacaatctgagttcagttcatttaatgaagtggtatttaatagccctaagcattcactgagtatttcagcctgtgacatattagaaagcatgtaacttaaaagatccaagttcaagtctatcctctaccactaccacagtttcaagactgggtttagggtcacgctcttgcgttaagtatacctaataatcatctgggaaacttgtttgaaatacagggcacttgagccttattcccagagatcttttttgtttgtttatagacagggtttcacgttgttgcccatactggacaactggcgtgatcatagctcactgaagcctccagctcctgggttcaagcagtcctcctgcctcagcttctggagtagctgggactacaggtgcacttccacctcacctggctaattttatgttttgtagagatgaggtcttgatgtttgcccaggctggtctcaaactcctggcttcaagttatctttccgccccagcttctcagtgttgggattacaggaatgagccactgaacctagctcccccagagatcttgaccaggaaggtccaagttgcgcccaagaatatgcattttttaatacgtacaccacccagataattctagttcagatgggcttctcacttcacttggagaaaccctgcctttaggtttttaactcaccttctgtttgaggtaagttcacttctaccaacttagatacctatagggtgtcagatcttctttagatcttggggagacacaatttaatacttttttttttttttttgagacagtttccctcttgttgcccaggctggagtacaatggcgcaatcttggctcaccgtagcctctgcctcctggattcaagcaattctcctgcctcagcctcctgagtagctgggattacaggcatgcaccaccatgcccgactaattttgtattttcagtagagacggggtttctccatgttggtcagcctggtctcgaactcctgacctcgtgatctacccgcctcagcctcctaaagtgctaggattacaggcgtgagccactgcgcccagccactaataccttttggatagactaataacagagttcctccttgatcttcctcatcttattaatacaggaaattgaagtattttcaggaatcagatacttccagggatcagcaaagagattgttggagaccttccagtgtcttggccttcaacaaatatctcccaaaactacaaagactctaaagggcaactttttgtttgtttgtttgtttgtttgtttgttttgagatggggtctcgctctgtcacccaggctggagtgcagtggcgtggtctcgtctcactgcaacctccgcctcctgggttcaagcaattctcctgcctcagcctcctgagtagctgggattacaggcgcgtgctaccacacctggctaatttttgtatttttagtagaggtggggtttcaccatgttggtcaggctggtctcgaactcctgacctcgtgatccgcccgcctcggcctcccaaagtgctgggattacaggtgtgaaccacgtgcccagcctaaacggcaacttttaaaggtccagatgatgaagtcttgagaagcgttccttttgaataaaaactaaggaaaacttaggcaaaagacactctgggaaaattcctgtggcaactgcaaatcatgaggctatggaaatgggtaacaggtcttacctgaacccaagtgttcacttgttcagaccaggggaagtcacttcattataaggaaatcttgggagctgtgtggggtttctggaagaagtcatgacttcagggttttaattctatttctgccaatgacttaaggtcagtcactgttttctgggccagttaagctttctagggccccttttctgctaataaggatatagtttagtgaataaggagcgtttacaatactgcttctgtaattccagctctcctgccacagctcctcaccccctgaaaatgttcgcctgctccaagtttgtctccactccctccttggtgagtacctgcttttctgggagagttttaaaggagagacatcttgtctctctctttccatcagaccttgttcttcacagcaaggctgggggagaggaggtccaggcgggcagatcacttgaggccaggagttcaaaaccagcctggccaacatggcgaaaccccatctctactaaaaaaacgaaaaccagttgggcatggtggcgggcgcctgtaatcccagctactcaggaggctgaggcaacagaatagcttgaacccaggaggtagaggttgcagtgagccaagatcgcaccactgcactccagcctgggcgtcagagcaagactctgtctcaaaaaataaataaataagtaaataagtaagaaagattcttggggagggaaggccctctgctatgattgcgtaacaggatagagtgaatgcttgctagatactctcctgccccatatcccttggcggccagttaattttttttttttttttttttttgagacagagtttcgctcttgttgcccaggctgcaatggcgcgatccaccacaacctccgcctcccgggttcaagcagttcacctgcctcagactcccaagtagctggggttacaggcacctgccaccatacccagctaatttttgtatttttagtagagatggggttacaccatgttggccgggctggtctcaaactcctgacctcgtgatccgagtagagacagggtttctccatgttggtcaggctggtcttgaactcctgacctcaggtgatccgccgtcctcggcctcctaaattgctgatattataggcatgagccaccgtgcctggctgtgcccagttaattcttacccagccatcttaggagaagaatagagatgagaatctagaccaagatcaagttattcctactcctgaaactatatgtcgtgtaagc

SEQ ID NO: 5987 - DNA, 6000 bp, Homo sapiens
gtgcatagatacatgtgtttatctgaaaaggggagtcatatcatcttcagcaacatacagctgaatttttgtcagttttccacctgtctagctgtcactatcaaatattgggtattggttttctagaattgagttagcagattaataaaagctttttactttgaacattttagttttcttagaaaacaaaagaaaaaatactttcaagaagtggagtttattaccagcaaggtccaggacaaatctttttggaattcaaactgcttcctttgtaagatgtagtgacaggtcctttcctaaatttgttaaaggagatacaggtattaaaatccaactgagaagataatctagagctgtcggtgttctaaggcccttttaaaagagtcagagttcactagaagttcttaatgaaacatataaagatttttttgctccatggtgaaaagttatttagtatttgcattttttattttttatttttattatatatataaaataaaatatgtatattgagacagatatatatataaaatatatagagagagactatatatatattgagacagagtctcactgtgtcgcccaggctggagtgcagtggcactatctcggctcactgcaacctccatctccaaggttcaagcgattctgctgcctcagcctcctgagtagctgggactataggcatgtgccaccatgcctggctaatttttgtatttttagtagacacggggtttcaccatgttggccaggctggtctcaaacccctgacctcaggttatctgcccgcctcggcctcccaaagtgctcagattacaggcatgagccaccgtgcccagccttgcattttttaaaatcattattagtacactacatgtatctttttgtctcgttacatctcaacactgaggtgtggtaacttgcttaaaaggaatctatttgtaaatctacagtcatagaaatctaaatgatcaaaatgtcttcctaatattacttgatgtgaaaatatatgctatagcccaaaccataaataaatctatagttactggtatctgcacttaacaggagttctcaaactttttggtctcgagacctctttaaactcttcaagtattgaggactccaaagagcttttgattatgtgaattattcctataaatatttagtatattctaaataaaaatggaaaaatttttgaatattaatgtgttctcaccacaaaagtaactatatgaggtgatggatatattaactgattgtggcaatcttttcacagcatatacatatatcaaaatattttgctgtatatcctaactatatgcagttttatcaatcatactgcagtaaagctggacaaaatatttatcagtgcatttttaaataataatctattgtatattcacatagatagcattttgatgaaaaatgttccctcaataatgaatttttaaatgaaataatgtaaagagtggtgtcatatctctttaatgcccagctttattgaagatagctcggttctcctgtctgcttctgtatttattatgtcacattatcacatgcagtgtaatctttggaaaattatgttacacattaatgaaatatgagaccaataattatgtcttcaaattatgaaaataggaatccctctcaggtttcacgacagcactttgagaactacttctctgtactgttaatgtacaaacttggtacatcacccaatgaatagctcaactaggaggttttaaaatggaatatttgccttgtggtagagagtattgactgaatttagattgtgcatgtctctcagttgaatatatttacaagagaatacctttgataatacaggtttttattattatatttgagcttggactttactgaaaacattgttaaaattctttatatatttatacatatatataactgtaagctgtagtcattttgtaactttgatcctttttcccctataacttctctaaaaatttgtaatcattgtcagtaggaaaggatttatattttgtactatttcaagattattttggtcttatctgtatgatgtagagtagaactatatatgaaatgatatatgtcattaatttgcttcaagttctcttttgaaatattcagtagtttagtgatggatatccatgtcagattcagagctgaaaattgtataattgtccgtaattctttcccctccttaacctctgttgtgttggtctttaaacttttttggttatttactctatcaggaaaaaaatgagcacatacctccaaatgatgcatttattaattatatttataactatataatttgtatattttcagcatatagaaaaaatagaaattgaaagtaaaagataaagctgggcacagtggctcatgcctgtaatcccagcactttgggaggctgaggtgggaggattgcttgaggccaggagttcgaggccaatctgggcaatgtggcgagatcccatctctacagaaaattttaaaatgagctgggcgtggtggcatgcgccttgtggtctaagctacttgggaggctgaggtaggaagattgcttgagcatgcagtgagccacattggcaccactgcactccagcctgagcaacaaagtgagactctgtctcaaaaaagaaaaaattaaaatttaatgtttgctttcttcttgtagccataaaacattattgttaacctgatttaggtctaagtttaatttcagaagttggctttaatgtctcgcagctaaaagaaacacaacattatataaatccaagtgggaaaagtgtagttactaaatcatactcattttcatgatacctacccaccagttatgcaaaggtatttgttaaaatatgactggtaaattccattgtctgatgtcaatctgttgtttttatatgctgttataaagtattgcattttttgtgtaataaatgacatcaaaacccagtaaaatgcttcacttggataatatgttagctgtgtttccaagttggtgaaagtggtcagcatggtgttctatcatctgattctgagtccagagttgctctaattcagagttaatctcctgtcttctggctagagggaggaatggagcggggagagtcattcttacagccttgactgttaaacagaatgtaaatcataaaatcactttaactggttattatacacaatgacacatggtgatttcttgagcttgaaaataattaaaatagaaattctggtatttgtgttggagggggttctgttggattatcctgcttgtacctcacagttgaatcctgctggtggttctcaggatattttttgtaactgttcacgtcaagtcttccatttcatccccaattgattttacttcattccctgtcttccctcccagattgctttttagtcagcaccctcacacctcagattttttcttcagtctgtactcaccatgctagaacacgctttagtcatttctagtgtcatttatttactcattcttttcttctgaataatcctcctgctttgtctgtttgagagaaccaatggctttcagacatttcaattcaatttaaaaagaaataacttcacatagcaacccagaagcctgtattccttcatgcgaatttataagtaatcagcgtttcaggaaataatacttatccttactacatacatatcctttctattttgttttgttccatttttcagaatgctggtcatgagccactgaattgattttggactcacaactagattacagcccgaagtcaaaaagcactgttctgttattcttcaccattattgactatagagttttggctcattctctcccccctccccacctcccaccccacatccttttctgatctctattctgccatttgtactgattttaatctctccctggattttttttttcttagatggctggttctctaccaatatttggtagctcaaatgtcatgcatacctcaatggggccttctctgctcactgaacctcagttatccctcttttttcatttaatagcacatcactatgtttttcttcatggcacttgtcgatatgtgaaattaattatttgtgtattattatctgaattcttcatataccgtccccagtctgagtatggattccatgaggagagagagcttgtgtgtcttactcactactgtatttctagcccctaaaatagtgtctggcacctagcctgtgctcaaatggttggaataacaagtagcagtttgcttaacttttcatgttataaaagccaagttttaatcacatttcagtaaaaatgacatagtaaataagcatgattcatgggtttcacgtaatactaacttctcatgtatatcttgtctatcatatgtaataattaatatggttagctcttggttgagtgcgaagaaagccttagccactgctgtacctactttaccagtatcctcacatttaatcctcacaataactctggaatagctggtggtatcataatttgacgatgaagaaaccaagtctcaaaaattaagtaacttgccttaggactgatatttcatctccttcagtgtccttactcttaactagtaccctacctagactgcctccctctactgagattaagaattacagaagcagggaacttgaaagtgacatagagttcttatggaatactttgaatttaataaagtatttattgctataagtaaaattgataaacataattaacacaaaaatatgatttagacgtactatatgtatgttgtcatcaattcagaatctttttgataagcattttctttctttccaaatagtttgtggagaagtttctgttggggaggaagaaggtgaaggtgaaactggttggattgaaggagctgcaatcctcttgtctgtagtgtgtgtggtgttagtaacagctttcaatgactggagtaaggaaaaacagtttagaggtttgcagagccgaattgaacaagaacagaagttcactgtcatcaggggtggtcaggtcattcagatacctgtagctgacattactgttggagatattgctcaagtgaaatatggtaagtaagtaaaaagagcagtacatctgacactaaacataaaattactgtaatcttgtttataagtttagtatatcatgctttttattttaggtgatcttcttccagctgacggcatacttattcaaggcaacgatcttaaaattgatgaaagctcattgactggtgaatcagatcatgttaaaaagtctttagataaggatcccttacttctatcaggtaaaaatttcatttatatctttgaacactttcctctttcgcaactatgtaccattgtcagcaaacaccattttcctaagagtcaataatataaagaggaatctgtattttatgctaccttctactgttgtaatccttgcagactttttttggtaagctgacaaaaacattagaaaactttgaatgcagagctatattttacaaatgagggaccagagtccaaaaaatcaagagatttgagattcagcattcatgctagtgtaatgataaaactgaaatataggcctaatgatatctcttgagttggtctgttattctgtatcatgactatttttaatgcctattgaagtataaaattaaagaatgaatatatgtttaaagcaaattaatgaattctctgtgatgctctacaaaggacaggttgttttttcttaagaactggtaaaatccttaaagtttacctaatccaactcctttaactgctgaagaatgagtttgagatataaactatttagtattatatgattaaccaagagtaggtctagcagtcacacctccatctagtcagaattgaatttgcaaatggttaagatatgttctgggattggagaagggaaggataggtgaggatactgtttgaaatggagggtgacagcttgggaggctcttgtagtaacctcattgtgatagcttgaactaagttgaactaagtaaa

SEQ ID NO: 5988 - DNA, 6000 bp, Homo sapiens
cccaacaaaagtttgctattaattttaatattattttattaggcttttattttgtgccgggagcagttgctcacgcctgtaatgccagcactttggaaggctgatgcaggaggatcacatgaggccaggagttcaagaccagcctggctaacatggtgtaaccccatctctattaaaaatacaaaaaattgagccgggtgtggtggcacaggcctgtaatctcagctactcaggaggctgaggcaggagaatcacttgaacccagaaggcagaggttgcagtgagctgagatcgtgccattgcactccagcctgggtgacagagcgagaccctgtctccaaaaagaaaacaaaaaacaaaaaaccccaaaaagactttattttgtgctcattgtagtggtcatcattcttgtcgagacttcactgctttgtgtatagcatcaaactgtgccccacagaaagggatacaagtaaataattgtttagcaccctgtagtttacaaaatattttcatgggcattatcaactgataccacctgaggatatggatgtgttagccaaaatttaaaggagggtgtagcgttagctcatatcatacagtcaatttaatgaagtggcatcaaaatgtaaaaccatttcatgttcacaatatgaacagtaggccttccttatcccgtcccccatgccatctctgggtcttacccatccctcaagttcacattagaagggcagggatgctactgagcacttatcttaggactgcaaaaacaagtagaaatgtgtttatgcattcatttattgattgcgacagagcaagaccatccctactatcaccattgtcatcatcaccatcaccatttctatcataatcaccaccatcatcctcctcctcctcatcatgtccagtgtaagctggagtgtagtggcgtgatctcggcttactgcaacctccgcctcctggattcaagcgattctcctgcttctgcctcccgagtagctggaattacaggtgtgtgccaccacacccagctaatgttttgtatttttagtagaggcggggtttctccatgttggccaggctgatctcgaactcctgacctcaggtgatccacctctctcagcgtcccgaagtgctggaattacaggtgtgagccactgtgcttggtctatttttaaagtagtatcaaaatgtgcccacatgaaaatgtcacatactcattcctcaaccaagaggtgccccagctgggcccttcctcttctgcatggacttacaatatctggaggtaggcagctcctgaggatgtgcacccctgaggctgggaaaggtggtcctagctctccagagtcaaactataaagaatggcccccatccctaacacgtactcaatttgcagggcatccaggctcatgccttggccactgggggccttgccaacctggaacagacaagaggcaatcaacattaacagaggctttctatttaggcattctaaccaacatgcaaaaagccaagagggctgcaggcttacaaagcttgaccttataatttatggtgcatgtggtatgagggagttctgaggcatttttacacaagctggatgaaaggatgagatgtctccagctccccctcttctccgcccacattcctgaccatccaacacactttagcaaggaaaagggatagaggaaacaaaactaggaggaaaagcagaagagaaactcctctagattcatgctgtgctcagaaactggggtaggagaatggaagtctccaggaagagctgttgatcccttcctgctctggaagatgcacttctatgactgcccaccagcctcctcctctgggtgtaaccgaacaccatggtggagccacacttcagagaaacacactgcttgcttttaacgttaaacacatcctagcctgtggtttgtgagccacatatggtcctgggagccccacgaaataatgatgaaagaaaatcgttgaaatctggacacagaagctctctgaagctatacttttcctcagtgactctgcaaattgtattagctgtccaatattcactgagcattgccatatgcccagtatcatatggtgtctcttgtctaatccgcataacagcaaggttgttctttttttttgggtggagtgcaatggtgaacagggctcactgcagccttgactttccaggcccaagtgatcctctcacctcagctccccaagtagctgggactacagtcacactccaccatgcctggataatttttttttgtattttttgtagggacagggttttgccttgttgcccaggcttgttttgaactcttgggctcaagcagtccatctgcctcggcctccccaagtactgggattataggtgtgagccaccacacctggcctagtgaggtagcaattactcctgtcttatagctgaagatactgaggttcagagaggtcacactccaaagtcagtcatggagctgaatttgaacccaagtcagtctattctatagcctgtgtcttaaccattgtatgtactatctcccagaggaaaagaatgagagggaaatgctgaaaatattaacagtcccatcgtcctactctctattcattcattcagtgctcagtagaggtaaaaattgagaaaccgtccattctcatatctggcctacagtctgcttttttttttttcctgagacagggtcttgctctgttgcccaggctggagtacagtggtgccatcatagctcactataaccttgaactcccaggctcaagcgatcctcctgtctcagcctcctgagtgccaccacatccagctaaattttttttggtggagtcagggtcttgctgttatctaggctggtcttgaactcctggcctcaagtgatcttcctgccttggcctcccatagcgttgggattacaggtgtgaggcactgtacttggcctggatcaatttttaaaaatttaaatatcatttaattatttttgataaggatcagatgactatttctctaagaaacggattaataataagacaggtccttaaagatgcaccttacagaaagggtgaccctgaaatctagaggagtttagggatacttctcaaggtcacacactttggtagcactaaaggagtagggctcttgctttcaaggccagatcttggcagcaagctgctttaccagttatcactgcctctgcccctaacatggagaactgcttgaagggggataacctctttttgcgcgctagagattttaacaacacaacccgaactcagctgaatagtttttaaacaaggttcctgtgatgagtgtcttctgatttcttctgctgtctccccgcgccacaggtcagagacctgtgccctgttgaacctagaggctcctacaatagctcctggtatttagctgaagtagggtgttcctctctgtctggggcagatggttgtatttctagtccagaacctgctataatttactctgtcctcccacactaatagcgattcttctatctgccagcttggcttctatagccttctgcaatctggacccgctccacccagttcatctctttcttctctacatgtagaacacaccctcatggccaacaggtgtcctgggctcaccccatttccgccacagaaatatcctccctgctctcctcatatgcaaatcattcttcaaggcactgctcaaggtctttctgcccccaaagcctgcccatgtacaggccaatggtttgctttccaaatctctttacatttatgttcccaatttacctaagttagccctcaacaggtttctgtatatatctccaagtgtagtgcaggctccttgagggcaggcacacaagtgttcattcattcactggaggcttttagcaacaccttataaagcgagaaagaaggagaaatataaactatggttgcttccagtcctcagggaggggagacatacctggcacacagtgggccctcaacaaaggtttgctatattgaactaacatatatgcctctcgttgcaattacttgctaagtcccatgagaggtatcaaatggtgttatagggaaagcatcatcaaagaggtggcatttgaaccctataggctttaagggcagggcatggttttgtctttgtttacagaactgggaggaggttacagacagaagaaacagcattcctactacacacagtgccaggtgcacacagtgccaggcacacatcactcaccagaaactggggaaagcagtggaattgagtgagttctgtccctgccccggcaccaattagactgagtgagtgggcaagttgcttaacttccctgggcccccgtttccttcccattctgaagtgattaagctgcacagacttcagaaagaagcagactgagtgaggttcgaatgatgactatatgtgaccttgagccaatccgaagccggctcgctcagtctcaatttccttcctataaaatgggtaaaataatttctacctcacagggcttttgtgagatttcgagaacatatgtgagtcgctaaccacacagcctggcaataccagatttccttttacaaaagtaggggtgacaacgctgatctgcctctttctgtgtggctgctgctgcctccgcagcacccatcccagaggctgtcaggagtaggggccgtggacaaacttcatgaccccgaaagagaaaacagagctgaaggggcttcggggggaaaaagtaaagagctggccacagcaggctaacttggctaacggggacacttggtgaatgcgtccccttgaacagacttaccacagtcgagaatctttgctaactcgcatcaaccatgcctcccaagctggctggattttggacagccttttttgtctccgccttcaaacccaaggcaaaggacaaggcccaaccccatggcgggctgggagagtgaaagcagggggagtcccccaattcccagcggaaaggaagggcgatctgttcccacccgctgactcccactcccggggccagggctccttgggcgccccccttcatttctctcctctccgcacaggtcgggaagggagggggtcgcgcttggcccgcggcgcaggttcaccccggctttcgtccctccgaccccgcctggccgcccatccccgacccccgtggaccctgctcggccgccccggctggggtcgatctggccctccgcccccagcctgcgtggaacccgccgggccgccagccccacctcggccgcgtcccctcccctccgctccgctcttctcccctcccctcgcggccacctcggtgcccaccccggcctccgcagaccccgccgggaccccgccccgcgcccagccacccccgcgccggcttcccggcccccgtagaccccgcccggccctccctctccggggtcgtggcggcggggaggaggggccgccgggccggcgtgcgtggcaagctctcccggctcggctcgctcggcctcccttaccgggaggcggggtcggcgccgcggcggcggaggcaggccccctcctcccgcctcctcggcccggcctccttccccggccgcgcgtcctctcgccgctccgacgccagcagcgcccgcgtgccgctcgcccagtcccgggggagcccctgcaagtttcccgggccgcgcgccgcgctcgctcgcctcccagcccgcggcccgagccgccgccgcgcccgccatgccctcggccaaacaaaggggctccaagggcggccacggcgccgcgagcccctcggagaagggtgcccacccgtcgggcggcgcggatgacgtggcgaagaagccgccgccggcgccgcagcagccgccgccgccgcccgcgccgcacccgcagcagcacccgcagcagcacccgcagaaccaggcgcacggcaagggcggccaccgcggcggcggcggcggcggcggcaagtcctcctcctcctcctccgcctccgccgccgctgccgccgccgccgcctcgtc

SEQ ID NO: 5989 - DNA, 6000 bp, Homo sapiens
tactccagccactgcctaagggaggagagaaaccaggcagggtctctggccagggaatggctctggcaaagctagcagggctttagagctccagccaagcacgttgggccctgagccctcaagagagccagagcgggctagaacatgaagccaagcagattacacagtgaggacaaagcagaccctcgagtcctatgttctcgggtgagtgggggatttgggcagggagaggggtactatattgtggaagcgaccaccctgaggcttcatgacaccgggggctcccttatgccactgcagcaatagggtcagtttgctgcaggacatagtcccagtcccaccattcatggagggtagagatatcgacatcctttttcccatcactcctgaccagccgcaggagaagggtaggttagtcctttgccttctctgatttcttttctctcaacatcccaagcagttgctccatgtccacaagaatcccaggtggtagggaggtcagatatacacccatttgccgggtgaggaaaggaaccacggagaggcacaaacatgcacaacaggcctaggttcagcccccacaacttgacttctctaaactccagttcactccttaggcaaaaataataataaaaccaagcacacaagttcctaggaggattactgaagtaacatacggaaaatcactctgcaagctgctattcaaatgctagtaattttttactgtcacaattaggactagtttgaatatcttttgtctcttaacccaatgccccccaccttttttccttcaacattgctcattcatccatccattcattgagtaatgattctgaatgtttgtgaggagtcaaatgctccgctatatcctggaaataggaagctaaaatagacaacgaagagaaggaatgcatacgctggaggtgagccgggccctccgcaggtgcaaggcagccagcatgggtgtcaccaaaataggtgtatgagcaaggaccaagggagtggggagggcgagcgaagggctttgctgcagtggggttggcaggggggtcagggggcttcataggctcataatatgttcccatgcctgtgaccctcatgcctcctcttgtgtggcacaggacctgctctctgaaagagtgaggacctaaaaatgatcactaacttcagatcctacgggcatcagctgaccctgatggatgcactggaggctcaaatgaggttgagctggcctgatttgtttaaaaacaaaaatgaccattaatgagaatgactagatttctgtaagaaccactcaaaccaaaaagaaaaaattccactcaaaaccatttttaaaaatctggatgtctcacttacaaacttgaagctacaggagaagttttcccaatttagagtctattgctccctgctgtgcatttagttctgattaatcattctgtaatttaccagccagagtcctgtcatagttcgttgaacaaactttccatcatccttctggaataaaaacatggatccggacggtgacctcagtgcaaccttgagttgatgcagttttagtgacttggggtccagattgggcatggagctctgcagcctacggctgctcggaatcttaatatcaatagcttagacccccttgaaaatcctttgcatggaggagaagggaagactgctgctgtgtgtgcccacacacttccttgagccagcctaatgccctatgttggccaatagcccctagtaagttggcatatgccccaccatgacaggtagcattttgtagattggaaaattgaatctggaagtttaagtggttgctggtggtgactacagactgcaggaagaatattcatggtgattcagctggacagttgtatttggctgcacagaaagaatgtgacctcttaaaaataaaaaataaaaggacccaggaagtgttgaaaatgacagtcaaactggaacttggaggcaccatctttttttattgatgccagctgtctccaccagtgaatcttgcagaatgccttacacataacaagtgctcagtacacatttgaagaaccgcagctttctggcactgcaaagaatttcagattcaacctcccttctttttttttttcctaatgaggaaaataaaagagaggagatgtttgattgagattagctgtcacctggaacaagagcgtaagttgctgccttttaggattccagcataaagttgtgcaggttgagcacaaaagcaccggagaaaggggataaatggagtctaaaagccagtccagcactggattgaagggagatgggtccttttcctttgacaaagggctcatctcctcaccaagccaactgtggggccatgtccacactgagaaatgtctgcacttgaatagatgtagaagggtgatgttaagagaacagaagtccagactgttgaggattttatagggttaactgattccttctgcctttttgcaagcagagattgtgatttttgctattctgtgaccccctatatctagctatcatctatctgtcttctatatcgtctgtctatctatcaatcatctcttgtaatccatattgatgaggttacagcaactaattgataagagggctaacacagagaacatgagcagcagtaactctctttgggggacacctgaggaatatttcatacatacctgtttgttagacttgatgatggattactccttgtctgtttcctgcagctcctaatagagtcctgtccacaaaaattgtcatgggtggagccttgtactaaacactcagggtagaggtcatgaggccccggaggcaggagaaaacatcttctagggctacagagaggtcatgatataaatgcaggaggaggaactgacccatagccacacagacacaggcagacattagggaagaaccttcaagaaacgtgcaaagaaaaaaaagtaagggaggccattaaagacaatttttaagtttacaaaactaaggcaagccaggctttgcatgcaaatgattaggcaggtgagtcatgcatatatttgtcagttctctttcaaaataagaaataaattaggcacaatgtttgcattttaaaaaatcctttactttgccactctatgaattttcttagtgcaccctgggccctgctctcagttgagttcctgccctggggtctctgagacccagagaaacttcaacacctacccctcccactcccaccaaaacttttggagaatagctcttcctgctcatactttttaatggtaggggcttttgagcagtaaccagtcaggagggccacccaagactgaacctcactgtagagtgaccagggtcaatgcatgtgtacaaagtgtcttactccttgtagagcaggctgtatccaattaaagcttgattaaataccacatagtggagagtaaactgttattagaagctgctaatggacactccatcacctgcattattcactgtgaagaaactaaataaagccagcaaacggtgtgctctttgccatccaggagcctcagtccaaattaattttcatgaaactcagattctaggcagatgtggttcttttgatttttactcctaagtacaggccattgtttgtttttcccagcaaagctcaggcattgtgtgagtttttttcagaggatattgcagaatgagagtttcagagcatgaatatatgtaacctttcaaaggaaatgttcagaaagaacaaaccaaccaatacatcagcctgccaatttaacagtggtatctaaactagcttgctcagatctttacagcaacaaatacaaaaagggactccaaaattatgtgtatgtctatgtcagtttatcaaaaactcaactaagaagtgtctcctcccacagaggaaactgaagttcttgaaggtgactcataagaagaagccactggggacaggggctttgaccctggccctatctgcttcccctctccatctgtggatcaacaagcaggaatatgtcagataatgtccaccttctgttgagctttagctatgggcctggcactccacatgtgttatttcatttgatcaatacaatcaccctctaaattgatattgcttttcatggttgttcacttgggaattggagtttagttaggtcaagtaacttgtctaaagtcgtacagctaatggtgagaagatctggcacttaaacctaggtttccctgactgcagagcccatgctctcatcaaaatatcaatttcctccctcacaaacactagaagggcacccatttggtattgagcctggctgtgaacaaatgcaaaagcaatagaggaggcatctatgctttctttgagtttgaattgtcatggtaacctaacataggggtgggggccttgagaagagttttagagtcatgtcatatcagatctgggctctgtttccactgctgctactcaacctctctaagcctcggtttccttagttgtaaacaaaaataacagttgaccccgactaccacaggggttaggggtgccaatcccccacacagttgaaaatccaagcataatttttgactcccacaaaagtaagctactatcagcctactgttgaccagcagtcttgctgataacttggtcaattaacacacattggctggctgtggtggctcatgcctgtaatcccagcactttgggaggccgaggcgggtagatcacctgaggtcaggagtttgagaccactctggccaacatggtgaaaccccgtctctactaaaaatacaaaattagccgggcgtggtggcacatgcctgtaatcccagctacttggaggctgaggcaggagaatcgcttgaacctgggaggcggaggttgtggtgagcagagatcacgccactgcactccagcctgggcaacaagagtgaaactccgtctcaaaaaaaaaaaaaaaattaacacatatctggtatatgtattatatactatattcttaccataaagtaatccagagaaaaggaaattgttaagaaaatcctaaggaagaggaaatatatttaccactcactgagtggagtggatcagcatgaaggtctctgtcctcattgccttcacatggaataggctgaggaggagggagaggaagggctggccttgctgtctcaggggtggctggaagaggtggaaggggaggcaggcacacttggtgtaaataaaaaaaaaaaatctgcgtgttcgtggacctgtgcagttcaaagccaggttgttaagggtcagttgtaatgtgcttacctcacagggctgttggaaggatgacgtgataccacgcatataacgggcttagcgctatgccaggcacatagtaatggctcaatttattttacagggaaaacatgcaggtagttttcaattatgttggtataaactagtttggtaaagggtgagctacatcatatcctaaaagtagaatcagaatagggctgaaacctggagatctggccctgaagtgaggtgcttgtggttcctgggtggggtccctgcaaagtatggccctggggttcttattttccagtcatcaccatatttaagggtaaagtggaagaggtggagctgcctgtggagaaggtggacatcatcatcagcgagtggatgggctactgtctgttctatgagtccatgctcaacacggtgatctttgccagggacaagtggctggtaagtgtcctgcatgctgtccccgcgttggccggctggctgtcctgctcctctacccaaggcctgcagcctaggaggcatacgaagacttcagagaagactgaggccaggaggtcactgccccaagcccctctctctagagcagatctgtatcagggaacagaatggttgccccgggtccagcatgtgtaaccatcagagtggacttccgtgggtctcaccgcagcctcttttgcaataacagacatccgttctctcttgtcgagttaaaggtccgtttcggtcagcaagtacttaggacttgcatg

SEQ ID NO: 5990 - DNA, 6000 bp, Homo sapiens
tgatcgccattctaactggtgtgagatggtatctcattgtggttttgatttgcatttctctgatggccagtgatgatgagcattttttcatgtgttttttggctgcataaatgtcttcttttgagaagtgtctgttcatatcctttgcccactttttgatggggttgtttgtttttttcttgtaaatttgtttgagttcattgtagattctggatattagccctttgtcagatgagtaggttgcaaaaattttctgccattctgtaggttgcctgttcactctgatggtattttcttttgctgtgcagaagctctttcatttaattagatcccatttgtcaattttggcttttgttgccattgctttttgtgttttagacatgaagtccttgcccatgcctatgtcctgaatggtattgcctaggttttcttccagggtttttatggttttaggtctaacatgtaagtctttaatccatcttgaattaatttttgtataaggtgtaaggaagggatccagtttcagctttctacatatggctagccagttttcccagcaccatttattaaatagggaatcctttcccaatttcttgtttttgtcaggtttgtcaaagatcagatagttgtagatatgtggcattatttctgagggctctgttctgttccattggtctatatttctgttttggtaccagtaccatgctgttttggttactgtagccttgtagtatagtttgaagtcaggtagcatgatgcctccagctttgttcttttggcttaggattgacttggcgatgcgggctcttttttggttccatatgaactttaaagtagttttttccaattctgtgaagaaaggcattggtagcttgatggggatggcattgaatctataaattaccttgggcagtatggccattttcacgatattgattcttcctacccatgagcatggaatgttcttccatttgtttgtctcctcttttatttcattgagcagtggtttgtagttctccttgaagaggtccttcacatcccttgtaagttggattcctaggtgttttattctctttgaagcaattgtgaatgggagttcactcatgatttggctctctgtttgtctgttattcgtgtataagaatgcttgtgatttttgcacattgattttgtatcctgagactttgctgaagttgcttatcagcttaaggaaattttgggctgaggcaatggggttttctagatatacaatcatgtcatctgcaaacagggacaatttgacttcctcttttcctaattgaataccctttatttccttttcctgcctgattgtcctggccagaacttccaacactatgttgaataggagtggtgagagaagtcatccttgtcttgtgccagttttcaaagggaatgcttccagtttttgtccattcagtatgatattcgctgtgggtttgtcatagatagctcttattattttgagatacatcccatcaatacctaatttactgagagtttttagcatgaagagttgtcgaattttgtcaaaggccttttctacatctattgagaaaatcatgtggtttttgtctttggttctgtttatatgctggattacatttattgatttgcatatattgaaccagccttgcatcccagggatgaagcccacttgatcatggtggataagtttttgatgtgctgctggattctgtttgccagtattttattgaggatttttgcatcaatgttcaccaaggatactggtctaaaattctcttttttggttgtgtctctgcctggctttggtatcaggatgatgctggcctcataaaatgagttagggaggattccctcttttgctattgattggaatagtttcagaaggaatggtaccagctcctctttgtatctctggtagaattcggctgtggatccatctggtcctggactgtttttggctggtaagctattgattattgcctcaatttcagagcctgttattggtctgttcagagattcaacttcttcctggtttagtcttgggaggatgtatgtgtcaaggaatttatccatttcttctagattgtctagtttatttgcatagaggtgtttgtagtattctctgatggtagtttgtatttctgtgggatcggtggtgatatcccctttatcattttttattgcatctatttgattcttttttcttctttattagtcttgctagcggtctatcaattttgttgatcttttcaaaaaaccagctcctggattcattaatttttgaagggttttttgtgtctctatttccttcagttctgctctgatcttagttatttcttgccttctgctagcttttgaatgtgtttgctcttgcttttctagttcttttaattgtgatgttagggtgtcaattttaggtctttcctgctttctcttgtgggcatttagtgctataaatttccctctacacactgctttgaatgtgtgccagagattctggtatgttgtgtgtttgttctcattggtttcaaagaacatctttatttctgccttcatttcattatttacccagtagtcattcaggagcaggttgttcagtttccatgtggttgagcggttttgagtgagtttttttaatcctgagttctagtttgattgcactggggtctgagagacagtttgttataatttctgttcttttacatttgctgaggggtgctttacttccaactatgtggtcgattttggagtaggtgtggtatggtgctgaaaagaatgtatattctgttgatttggggtggagagttctgtagatgtctattaggtctgcttggtgcagagctgagttcaattcctgggtatccttgttaactttctgtcttgttgatctgtctaatgttgacagtagggtgttaaagtctcccattattattgtgtgggagtctaagtctctttgtaggtcactgatgacttgctttatgaatctgggtgctcctgtattgggtgcatatatatttaggatagttagctcttcttgttgaattgatccctttaccattatgtagtggccttctttgtctcttttgatctttgttggtttaaagtctgttttatctgagactaggattgcaatccctgccttttttcttttccattcgcttggtagctcttcctccatccctttattttgagcctatgtgtgtctctgcatgtgagatgcacctgaatacagcacactgatgtgtcttgactctttatccaatttgccggtctgtgtcttttaattggagcatttagcccatttacatttaaagttaatattgttatgtgtgaattttttcctgtcattatgatgttagctggttattttgctcgttagttgatgcagtttcttcctagcattgacagtctttacaatttggcatgtttttgcagtggctggtaccggttcttcctttccatatttagtgcttccttcaggagctctttcagggcaggcctggtggtgacaaaatctctcagcatttgcttgtctgtaaagtattttatttctctttcacttatgaagcttagtttggctggatatgaaattctgggttgaaaattcttttctttaagaatgttgaatattggtccccactctcttctggcttgtagagtttctgccgagagatcagctattagtctgatgggcttccctttgtgggtaacccgacctttctctctggctgctcttaacattttttccttcatttcaactttggtgaatctcacaattatgtgtcttggggttgctctcgaggagtatctttgtggcattctctgtatttcctgaatttgaatgttggcctgccttgctagattggggaagttctcctggataatatcctgcagagtgttttccaccttggttccattctccccatcactttcaggtacaccaatcagatgtagatttggtcttttcacatagtcccatatttcttggaggctttgttcatttctttttattcttttttctctaaacttctcttctcgcttcgtttcattcatttcatcttccatcactgataccctttcttccagttgatcgcatcagctactgaggcttctgcattcttcacatagctctcgtgccttggttttcagctccatcaggtcctttaagtacttctctgcattggttattctagttatccattcatctaatttttttttcaaagcttttaacttctttgccattggttcgaatttcctcctgtagctcggagtagtttgatcatctgaagccttcttctctcaactcatcaaagtcattctctgtcccgctttgttccgttgctggtgaggagctgcattccttttgaggaggagaggcgctctgatttttagagtttctagtttttctgctctgtttttttcccatctttgtggttttatctacctttggtctttgatgatggtgacatacagatgggtttttggtatggatgtcctttctgtttgttagttttccttctaacagacaggaccctcagctgcaggtctgttggagtttgctggaggtccactccagaccctgtttgcctgggtatcagcagcagtggctgtagaacagtgtgtattggtgaaccgcaaatgctgctgcctgatcgttcctctggaggttttgtctcagaggagtacccggccgtgtgaggtgtcagtccgcccctactgggggggtgcctcccagttaggctattcggggatcagggacccacttgaggaggcagtctgcccgttctcagatctcaagctgtgtgctgggagaaccactactctcttcaaagctgtcagacagggacttttaagtctgcagaggttactgcggtctttttgtttgtctgtgccctgcccgcagaagtggagcctacagaggcaggcaggcctccttgagctgtggtgggctccacccagttccagcttcccagccgctttgtttacctaatcaaacaactaactcagcaatggtgggcgcccctcccccagcctcgctgctgccttgcagtttgatctcggactgctgtgctagcaatgagcgagactccgtgggcatgggaccctccgagccaggtgcgagatataatctcctggtgtgccttgttttaagcccattggaaaagcacagtattagagtgggagagacctgattttccaggtgccgtctctcacccctttctttgactaggaaagggaattccctgaccccttgcacttcctgggtgaggcgatgcctcgccttgctttggctcgtgcacggtgcactgcacccactgacctgcgcctactgtctggcactccccagcgagatgaacctggtacctcagttggaaatgcagaaatcacccgttttctgcctcactcacgctgggagctgtagaccggagctgttcctattcggccatcttggcttctctctgagctaatacttttaaaatattttgcactccacagaggaaggttttatatgtaagtctgagttttgtttttctgagttgttttcagttggtccatgtgattacatttttatacatggtaaaaatttatatatttttttccaagtctttttctttttcttttcttttcttttttctttttatttttgagacggagttttgttcttgttgtccaggatggagtgcaatggcatgatctcagctcaccgcaacctctgcctcccggattcaagtgattctcctgcctcagcctcttgagtagctgggattacaggtatgtgccactacacctggttaattttgtatttttagtagagatggggtttctcaatgctggtcaggctggtctcaaacttctgacctcaggtgatccatccgccttggcctcccaaagtgctgggattacaggcgtgagccaccatacccggacctgagtttctttcttaaagtttgtgttaagatgttgccatgtggggacaatatcataatataacat

SEQ ID NO: 5991 - DNA, 6000 bp, Homo sapiens; identical to SEQ ID NO: 621

SEQ ID NO: 5992 - DNA, 6000 bp, Homo sapiens
ggcacaaagaaagcattcaataaatggtgactgttaggattattatgagtttgattttgcttgaaatgtcctagtctgctgtgaaaataaggctttgcttttaagtccaggaaggaaattagtccctttaattcacttttttttttaatttttcttcaggttttggccttggtctttgtcaggaaagtcatggatctctgtttctctaagcgagagctgagctggctagatgatctcatgcctgaaagcaaaaagaagaagttggatgatgccaaaaagaaggccaaggaggaagaggtcatagtccttgcaccaactgtatacctgggggcctcaaattacagaacataggaagggtcatgtgaaaagtcagcatgtctggaatcccgagggttatatttaggagctgggaagattacccccaaagatgttctcagctaagaatggattagggattcttgcttctgtctgttcttaatttttgggtttgacaaccacttattttttcctttgtttacaatctactcaccaggctcatacctacaatgtgaacatacagtatgcccttattagcagattcaatggctcacattctttcaaaaggtctaatttgacaaatacataagacccattatttcctagaatgtttgtaatatatctaattgcaaatggtgctgtggttggcaccatgcaaagataacttgcataggactttctgtcttttttcatttccctcagcacttggcatcttgtcatctacacaatggaccctcaataaatggcctatatgtgcaaagaaagaatgtgtagcaaatgaaaataccagaccaagaaatgagtgagctgggaagtgtttccaaatacagttagtgcctaaaatagtgtcctttgaaaaaacttttaaaagacttttttttaggccaggcataatgggttatccctgtaattccagggcttttgggagttgaagctggaggattacttgaggccagaagtttgagactagcctaggcaatataatgagaccctgtctctacaaaaaaaaaaagaaaagaaaagaaaaaaaatcaaaataattagctggatgtggtggcacatacctgtagtcagctacttgggaggctgaggtgggaggataccttgagcccaggaggttgaggctgcagtgagctgtgatcatgccactgcactccagcctaggctgagtgagatcctatctcaagaaaaaaaaaaaagatgacttttttttcccctaatatcttgaactttaaaaatcttgtatttctaaataagcttcaacaattataaaatataaagtcaatggaagaaaactttaaagagaatattgatagaattcactacataaaatgtgatgctttcaggcatccaaaactctaatcaaaattttaaaataacagataagttgagacatgttaatatccttactattcaaataattcttataaattaataagaataatatgaaattgaaatgagcaatggacatatataatttacgaaaaagaagtacaaatgaccagttgccttatgacaaaaatttcattctcactaataatcaaagaaatgattgtgcagcatctggattttatgaaatgaaaataaatattaaaaaataaaaaagaaatgaaaatttaagcaaggagaatacttttttacttgtcgaattggcaaagatttttaaaagataaaaacaagtgttggcaagactgtaattgaaattggcttctcatacactaaaaatagtaatataggctgggcgcggtggctcatgcctataatcccagcactttgggaggccgaggtggttggatcacctgaggtcaggaatttgggaccagccgggccaacatggtgaaaccccgtctctactaaaaatacaaaaattagctgggcgtggtggcaggcgcctataatctagctattccggaggctgaggcaggaggatcgcttgaatctgggaggcggatattgcagtgagccgagataacaccactgcactccagcctgggtgacagagagagatcctgtctcaaaaaaaaaaaaaaaaaaaagaggctggatgtggtggctcacgcctgtaatcccagcactttggaaggctgaggcaggcagatcacctgaggtcaggagtttgagacctgaccaacatggtaaaaccctgtctttactaaaaatacaaaaaagtagccaagtatgttggcgcatgcctataatcccagctactcaggaggctgagacaggagaatcacttgaacccgggaggcagaggttgtagtgagctgagatcatgccactgcactccagcctgggcgaaagaacaagactttgtctcaaaaaaataaaaataagaaagatatgtggacgtgtttctgacattttatgtgaaaaacatagggaatataaaatggagcatacagtaagactgtcaaagaatctcacttttactaaaacatatacatatacacatactgtacacacacacacgtgcatgtgtgcaccccccacacacgtgaaaaagattggaagaaaatacaccaaaatgtttattgtgttgctctatgtctctctagttggtaagattatacattttttgattaattttcttcctccatatttattgaatccttactctgttggtcactgttccagatacagtagtatacaggacacagacagtccctgaccgaccacatggagcttacattctcttggaggagacactgtcaacaagcaaacaagtctatatttgttttcttggttatagtgctataattctacacacacacacacacacacacacacacacacacgtatataattttaggtagtgatatgttttaagaaggtagggagtgagggagttactttatttaggatgattagagatgacttctgaggagacatctgagtagagacctgaatcaagtgagaagcaaattatgagaatatctgggagtaagaacattccagggcaggggtacagaaaatgcaaaggtcttgaggaggaatgagcttggtgtgtttgaggaacaccaagaaagccagtaagactggaagggacagagtggtagcagggagaccagctaggaggctggcagcagctcaggcaataggggagggtggcttatgctaaggtagaggtgatgaaagtggctgaattgggtacttattttgaagatagagctgacaggttttgctaatgatggtgggcatgggtgaaagaggaatcaagtatgactcttagatttttggactgaacaactgaatgaatggttgtgctatttattaagatggggaagaccaaggagaacagcaggtttaggaggaaaatcaagagatctcctttggatgttaagttcgaggtggctggtagacattatattccttattttccaaaattcctgaagtaagtacatatttgttaacacgtgttactttataaaattattttaaaagctaaatgaaataaaagaaaaaagtgaagactttttctccacctcatagccaacattcatgttcatttctttatgttgttttcaattttttaacatagttttcatataactatgataattatataattgtgagtttgtatttatatatatagcacatatatattctgatttttcccctcaacctgatttcataagacactttcatgtttctatttgtatcatgatattttttaaatggatgtataatgttctatagtattatctcatacttaatttaaatatttttcctttgttaaaatttttagttgttttatattactttgaacatctttgtacagatagttttttctctgtaattattttctttaaattagtgggattattttcttttctttttttttgagatggagtctcgctctttcgcccaggctggagtgcagtggcgctatctcggctcactgcaagctccgcctcccgggttcacgccattctcctgcctcagcctcccgagtagtcgggactacaggctctcgcccctgcgcctggctttttttttttttctttctttctttctttatttttattattattatactttaagttttagggtacatgtgcacaacgtgcaggtttgttacatatgtatacatgtgccatgttggcgtgctgcacccattaactcatcatttagcattaggtatatttttagtagagaccgggtttcacggtgatagccaggatggtctcgatctcctgacctcgtgatccgcccgcctcggcctcccaaagtgctgggattataggcgtgagccaccgtgcccggccagattattttctaagaaaacattttattatggatttctaaaaaaagttattttagattcagggcatgtgcaggtttgttacatgggtgtagtgagttatgctgagctttgggcttctaatgatcctgtcacccaagtagtgaacatagtaccccataggtagttttccaacccttcccctgtcttccgccttttggagtccccagtgttttttgttcccatctttgtgtccatgtgtacccaatgtttagcctccacttataaatgagaacatgcattatttggttttttgttcctgcgtcagttcacttagggtactggcctccagctgcatccatgttgctgcaaaggacatagttttgttctctttgtggctgcgtagtattccatggtgtatacatactacagtttctttattcaatccaccattgatgggcacctgggttgattccatttctttgctattgttaatagtgctgcaataaatatatgagtgcagatgtctttttgacagaacaatttattttcctttgggtatataccaagtaatgggattgttgggtctaatgctagttctatttttagttctttgagaaatctccaaactgctttccacaggggctgaactaatttgcattcccaccaacagtgtagaagtgttcacttttctccacaaccatgccaaagtctgttattttttgactttttaataatagtcgttctgactgatgtgaaatggagtctctttgtggttctgatttgcatctctgatgatgcatgatgttgaccagtttttaatatgtttgttgactgcttgtatgtcttcttttaagaagtgtctgttcatatcctttgccctttcgcttctatgcaccaataacacccaggctgagagtcaaaccaagaacacaatcctgactacagtagccataaagaaaatgaaatacctgggaatacacctaatcaaaaacatgaaagcactctctagagggagaactacaaaacattgctgaaagaaatcagagatgattctctgaaaaagaagtcagattagaaatgattctctgaaaaagaaatcatctctgatttctttcagcagtgtgttttttgtttgtttgtttgttttgagacagagtcttgctctgtcgccaaggctggagggcaatggcatgatttcagctcactacaacctcctgctcctgggttcgagcgattctcctacctcagcctcccgagtagctgggattacaggtacctgccatcacgcctgggctaatttttgtatttttagtagagacaaggttttgccatgttgaccagtctggtctcgaactcctgacctcaagtgatctgcctgccttggcctcccaaagtgctgggattaaggcatgagccactgtgcctgacctctttttttttttgagatggagtctcgctctgtcgcccaggctggagtgcagtggtgttaaaaactggtcaacatcatgcatcatcagacatgcaaatcagaaccacaaagagactccatttcacatcagtcagaattactattattaaaaaatcaaaaagtaacagacgttggcatggttgtggagtgcagtggtgtgatctcggccgactgcaacctctgcctcccaggttcaagcgattctcctgcctcagccttcctagtagctggaactacaggcatgcaccaccac

SEQ ID NO: 5993 - DNA, 6000 bp, Homo sapiens
attgttaactatagccatcctgtagtggtacagaacactagaattcattcctcctatgtagctgtgattttatatccttaaacaaatctctccctaccttccccttcccagtctttagtatcctttgttctaccttttatttctatgatatcaacttttctttagcttccacatgagtaagaacatacagtgtttactttctgttcctggcttatttcacttaacataatgtctgccagttccatccattgccacaaatgacaggattcattcttttttatggccgaatagtattccattgtgtatatgtaccacattttatttatccattcatctgttgttggacacctaggttaattctgtatgttggctgttgtgaatagtgccataccactcttaatatgccaaattgtgtcttcatttacctttaatctattcttagaagacagtatcttatgaattaatcacagctttattccaagaagaaagctaatataatagctacacttattttatatatataaaatatatattttatatatataataagtatagctatataatatatacatatataaaataagtatagctattatgttagctttcttcatggaaacattaatccaaagacatatatatatatatatatatatatatatatatatatatatatattatgcctaggtccaagttaaccactttatgtatgtaatctcatttcatacttagaagaactttatgagaaaagtactattgttattatcctaattttatatgtgaaaaaactgaggcttagaatttctttacatgtaaaataagaatgataacagtccttgtcaaagtgacattatgcatataaaagcacttggaacagcgcccaatacataggaacacacagtaaatggtcctgtcatcatcatcattattattcacatgctaatgtcctctctttttcaagttaacattttattagaaaatagatctaacaataagattaaatcagtatataaatcagtgctgtctaatagaactttgtgatgattgaaatattctatcatccatgctgtccaataatatgatagccacagctggccaatgagcacctcagtcactaatttgaccaaggaacgttatttaacttccatgtatttaaatttaaattgatatagctagatgtggctggtagctactctgtagtatagggcagtcttaaatgaccaaaaataaccaataactctaccatctttgtattggttgatagttttaaatacaacctttatcatataaattttcacatggtgtcaaattatacatacttatttactttcaacatctgttacataagtaaatgcagaggacactggttccctgttcccaataactttttcactagcctgaaccagcgggccccctgctttggacccactcacaaaccctcaagacatcaattttttccaacgatttattttgcaatatttattcagtgaacttttttgagttctaagaccttattcctatggaaactaacacctcctggcatttaatttttttaattccacaaaataaatataaagcaaggcattgagatgaaaactcccattgagctacaattctatgcctttaaaataaatatccttttcaactacaaactgcagaaaatgcaggtatattgaaagtgaagcacattaaaaataagacacatgctaggtttctggggcagcatttcagaggcaatagcgttttgtcaggacagacagaaactatgcccaatatagaatacattagacatggaaataatgagcattcctttgactgtatccctctttctctgctccttgagtcactttgttcttttttttttcctttttttataggaggcaacttttctagtcttcacctttttctagaaaaaaataattgagtatttcacatgctaaaatagggtcttaagtttgccttatcctgaggttataagacaatctgcctgtccttctgtctttctctatccctatgaaatgtattatgaaagaagcaaaatatgctaatttccaaatgcatgtgagaatgtaagcccttctcccccaaatgtagaaataaactacatatgcagctggaaacattaatccaaaggcttcacaaggatattttgtcttgaatgctactaatcaatgcattcctaagtggaataatcaaactctaaaaacttctgttacctttgtgtgtcatgtcccccaccccattcattacaatatgattgcttcctgataaatttgcttagaacaagctctaagaatcagtatagccctcttctttgttccagaaactatccagtggatagttaattcctttcacaatggaatcactccaagggaagattgtccgttttattgacaatgtgttgcatttcacattctaaattccacttgcagaagtgattgttttctctgctctgaagctgtatatcaatgacatttctcatttcattaatataataaaccagtctccagcatataaagtccactaaagggccctaactcagctggttcttaatctggccctagcttttataattacattttctgctactttcaactctggcaataaatgttacatattccatttattttaaactcttacctttacactcagctgctagattgaaaccatcacatattctgctaagtaaattcattacttaggaagtagaactgaaatttgcttttaaaaagtatatattttataccataatggtataggtttgctttcatcagttcaatcattcagaaaaggaagtcatcaaataaactttcaaaatctgatggaatcattgaataaatcccgtgtagcctaaactgatatttccatttgatatcaatgccagatacattgtagttactcagtaaatgtttactaagagaacgtatggatgagaaaaaaatatctttattactactttttaaccatacttttcactatactatcatgttttatgctcacaatcatatgattagttgaaattctatattaattctatattaatttttttgtaacatgctgtccccccacccttaaaatcagattattgcacatggttgccttgggaattgtaatcaaatagagtgggctgaacaccaatgccagaactttcactgataagacaactgaagcaaatgaatttagaggttagcacaagttgacacagactccatggcatggaggttcacagcataggctctgaaaaccaaacaactcattccttaaacaacctcagacaggttatataacttctcagagcttcaagcatccttacctgtataatggcaatattaataggatctattatgagaagtaactgagttcattcatgtaaaagacttagtgcaaagtatataataaaaattaacgtttgagtattaagattcaagtcattttcatcctcatcctagtgcttggagattgattcttctatttccaattctttagcgctcaaggacgctttatagtcgggccttatctctagagctagatgattcatattcatttcatggcttctttcagaaagtgcaggtggtggtaactgttttggactatgacaagattggcaagaacgatgccatcggcaaagtctttgtgggctacaacagcaccggcgcggagctgcgacactggtcagacatgctggccaaccccaggcgacctattgcccagtggcacaccctgcaggtagaggaggaagttgatgccatgctggccgtcaagaagtaaaggaaagaagaagcctttctgcatttgcccatatagtgctctttagccagtatctgtaaatacctcagtaatatgggtcctttcatttttccagccatgcattcctaacacaattcagtggtacttggaatcctgttttaatttgcacaaatttaaatgtagagagcccctaagtccttcatcataccactgccctccaaatctactcttcttttaagcaatatgatgtgtagatagagcatgaatgaaattatttattgtatcacactgttgtatataccagtatgctaaagatttatttctagtttgtgtatttgtatgttgtaagcgtttcctaatctgtgtatatctagatgtttttaataagatgttctattttaaactatgtaaattgactgagatataggagagctgataatatattatacggtaaatatagtatcgtctgcattccagcaaaaatatcaactcgtaaggcactagtacagttaaactgacatcttaaaggacaacttaaacctgagctttctattgaatcatttgagtaccaagataaacttacaccacatacttggtgggtgaatccaattttgtagaattcctacacaggcaaaatagcatgatctgagcagcagcatccaggctgacctcaaggaagcatagccacaaaacagaatagcacctgtctgtacatatttacaaagctaaaataatggcttcactcttatatttgaggaagcaactgaacaggagtcaatgatttcatattactgcatatagaataacaacaaggtgttccgtgtgtgtgtgtgtgtgtgtgtgtgtgtgtgtgtgcacatttgtttggggatgggggagaagaagctaaggggagaagtcaacatttatgaaatattgcctgactatttaaaaagaaaaaagtagctctccattatcacctttatacaaaatgtacatcctgtgaattctgttccagatttcacacctacaataattccaaaaggtttgcacattagagtttgtaacaaaatattttattatataaaaccaggttagaaggaatgcaggatatttttaacacaacaatctgtgcttattacacaaaattactttgtggtaaacagacagtattgtaatcccatcaaaagatgaaagaaaaacaaaaacaaaaaccaacaacaattagccatagttctgaatgcacttcaattaagccaaaacagacagctagtgatctttttatatgctctttttacttaagttttaatttgtcctttaaaaaaaggtgaaacaaaccaagaacaagttctagaaaactgaagcaacctcttatgtatactagatgcttgatttaggaggagtttttaaacgttttcaatgttattatgtagtaaatgacactattatgaagctactagtcattccataagagtcttaaaggactgctctgtgtaacactgtgactgccgtgtgtgcttagacccgtagtttcctcagtggatagcactcaatttattccgtagtgatattgtaacaatactgccattcccttctactgcactgcccaaggtgtgtgtagcacaaacagttctcattacaaaggaccaattcagaactgaaaagctatgcataggacaaggaagatacatagaatggggtggaacacagcattttgtcaagcactgtgcaatattccatatttttccccactatggtagacaaccatttcgtggaagggcagcctattatcccacactgcatctagccttttgtcccattcacttctgtgatccattttaatttccaggccacaagacagtagtgatgctctgaaatgaaagtttgtcttcacaaatatcaaaacaaaatggaggaaaactaagcattggcctcatgttcagtcttcaggatatcacaccacgtcttttcaaaaactaaagagaattcaaaaagggctgatggtaggctttgaacatggggttggctgtttcccagtaaaactggaattcctgtcgttactgtttccttatcaaagaaggggcaagctcttttgccttttaggccagacatagcaaacgctttataattggcatagacataaaggataaaaggaaaataaccgtctgccgatggtccgtacttcttaaaaaacataggtaatagaaaatatacacaagtcagaatgtgaaattaaataatggtttgaacagaaaattcaaacaagactctttccaa

SEQ ID NO: 5994 - DNA, 6000 bp, Homo sapiens
caggttcaagcgattctcctgccttagcctccctagtagctgggattacaggcacacgccaccacgcctggctaattttttgtatttttcgtagaaaggggtttcaccatgctagccaggctggtctcgaactcctgacctcaggtgatccgcccacctcggcctcccaaagtgctgggattacaggcatgagccaccgcgcctgggcatcaaacatttcttaactcatttgatgagaccagcataaccaaataccaaaggtcaatgtggtgatggtggtggcagtggcagtggcagtggcagagggcacccacattgttcatgtatacactgaacaaataagtggcctctgagcctttttctgcctgtcagagtctttgagacagggctcattcgaccagcatcactatgacaagggccagtagcaaggatggggagtctccacagtgagttggacctgagtgaggttcctctcaaagagctgctgctccctcctgccaagaccaccatactggacctgtcctgcagtactgcccttagatttctgtggcctcacaagcccggggagcctagacctcagtagaaacactttgcaacggctgctggtgaagaatggccatccattgagtctctagcacctgggtctcctcaaaagactggtccccctgcctgtcacttggctcagcttaagaacttgaagtggaccaggcgcagtggctcacacctgtaatcccaacactttgggaagctgaggcgggagagtcacttgaggcctagagtttaggttgcagcatcactgcacttgagcctgggcaacagagtcagaccccatctcaaaaaaaaattaaggcctgaagtggctaaacttgaaggataactccctttatcttatcctggccaaagtggtagatgattgcttggatgagaagtgatatgcagataagatgttgcaatacacaaagtctgtgtgggtcagtcggtcacgtgggtgccaaggacaggtgggagagaagaagcaagctacagaagcagctcaagaatgggaactgcggaagctgattgtattggaggaaggagtgtgatgctctcagagcagccagggaggagcagaaggagcttagggacgtaagtcaggctctcaaagtctatgtctggttcctgcccccacaaaccaccacccaggaaacatcattcctgagctgtgtggcagcagcagcagctgctccttttatatggcagacagggtgattgcttgttgggcaagagccctcctacactatcttagagtgaataccctctatctgcagtccagggtctgcacagccacatggtcctctaataggtccaccagaccatttgcctgcaaacagcctcatcctcagtgcccactgtctcctagctgtggagcttggattcctatggaattgggttctgctgaacatacctctttttagcatcagacctacctgtctgtcatcaccatggggctgccagtcagtacttttgcagcctctttataggacattgttgtaacttagggttccctggtagaataaggagcgatgggaaggggagaggttctgcctgcctgaaggaacaggtctgggggaggagagaggtaaaactcagccttttctagttgtcatacacagctgtataaaggcaagcctcatttagcaaaatgattagttgtcaccacgtttaatgctttttgtatgtcataagccctttcatcccttcctggataataagggcaaatgaggaggcattgtgtcattggggggtagtacagcctgagttgggagggagcagtatacctgttttcttaataacctcaaatatcaggcattttagtgaccacacaaaatctcagggtgaaaagttctagaccatcatgtccagcctgcagttagggacacctagcccttccatgacctgtatggcgtggtcttccggttagtgtgaggcagcattttgtctcctttatactgtcctgagaaaacaaaactcacactggaattgagactgtctcagctgaaatatagattccttttcagtaaactgatgcacaattcacaaatagcagtctcaaagccatgaaggccttggaccactcctttggcttcttccctctacccatgtgtcttccatgaacccgaagcagtccaggcttattcactctgccagtaagcaaggagttggatcctggcagagccacgctgcctgtgatctattagttggtgtaactaaaaatctgaggcagcctgaaaacagcttcacagattgagggtttgagtcgtttgattctagacctctgactactccactgagtgatgggaaacaagtcatgtaatggggctgaaccagcactggctcactagccagtgaccacacaagtacgggcaatactgtcatccttgtgtctccctgctccagagctcccttgtcccatctttttcacatcccttggccaagggatcggaaacagctgtcatgctgctcattcactaaggagttccaaacacaagctctttgcctcccttcccacttgagacagcaggaacccatgtgtagtttagaagcagagagagcaggtccagcattttggccccatggcttgtttggtgaggtctgtggttcttggccagcctagtactgaaagggatttccctcccccactcccagcccaagacctcttacctgggtaggtccacgccttcctcagaatcattgcgtgttcctttagtcatcccagtgccattggcgcaaatgcttaattgaaactaaacacacgtgtgattgagatgatacagaatctagcgtagcactcatacccattcctttgctgcctgagacggttcagtggctggcaggccagcaggatcgctgcagggccctgagccccatctagtcagttcatcagccttcagtcctcccgtagcttcctaggttagatgctgatgttcttggggatttctatgatgatttttaaatgtgtgtcagtgggagcaaatataattaactcaccacattaaccaaattaaggtggaaaaaacaataaggtcacctcagtaggtgcatatgatgaaacgcatcttatcacaccaaactaagactataaaagtgtgtctttaacgctgacagtgtgtttacacagagaccatgctaacataacagaattctcaccatttctatgcagtattatactggcattcctggtctgtgtaataggcaagaaaagtacaaaaactggaagagaaggggtatctttagttgtaggtaacgatataaagccaaaggtttattctcagtcttcgtcttcctattttgttggtgctgtcactcgctccctctttgaagcacctcttcacttggcttccacgatcccatacttgctctccctccctggcctctcattcgaggtctttgtagctgggtctttcacaaggcaccaggaggtgaaggctccatagtcctcagccatttctgtctatagttactcccatgatctcttctggtctcattactataatcagtagccactagctatctaaaactacttagaatacctaaaaacacttccttagatgccctagccatattcacttaaagtgcttatccatcacgtgtgacagccacatgaacagtggccacagagcattgccatctttcacagagttctggtggacagctctgcttggggccatctcttcacctccaacgttccctagtttaagtcagtgtcattatactgaatggtattccttgtctcccttcagccaatgcttttgttttttgagatggagtttgctctttcgtccagggtggagtgaagtggcgcaatctcatctcactggaatctctgcccccctggctttaagcagttctcctgcctcggcctcctgagtagctgggattacaggtgcctgccaccacacctagctaatttttgtagacagggtttcaccatgttggccaggctggtcatgaactgctgacctcaggtgatccactgcacccgaccaccttcagccaattcttgacaactggagcttgagaccctccgttgtcttctgttttacttgtcttaaaagccaaatgccccataatgacttttgaggtcttaatgacctgcttctaccatcctctgccattacctgcctcaccttttgctcatgtaaactctattccagccacgttggcactcctttaccattccaggacttgccaggttgcacttccgttctctgcctggtgggtcttcaccaccacccactgggttcacacacatcttttcaggccccatggggccatctttattcaaatgtcaccgccttctggccactttatgtaacagttcatatgtatgtatgcaaattttctatcccccttccctttttctctatagcacttgtgttacttttgcatcttagtctgtctctcccaaaataggggacaagtttcatgagggcaaaaacctgtctgttttgtttattgctatattcctagcatctgtcatgtaataggtgtgcttactgcttgttaggtaaaaaagttcagaaattgccacccagtagtatccatatttgttccctttgtaggtcattaaacagctgatgaaaaaggaattcactctagagttttcacgtgacagaaagtcaatgtcggtttactgtacaccaaataaaccaagcaggacatcaatgagcaagatgtttgtgaaggcaagtatggcagattgcaattgagatgttcttgccagggttaagatcccggtgaaccaataaaacaaaattgtttatctaaatctgtaacatttccagggtgctcctgaaggtgtcattgacaggtgcacccacattcgagttggaagtactaaggttcctatgacctctggagtcaaacagaagatcatgtctgtcattcgagagtggggtagtggcagcgacacactgcgatgcctggccctggccactcatgacaacccactgagaagagaagaaatgcaccttgaggactctgccaactttattaaatatgaggttagctaatgaaaagtttctttgtccacaccctgcacgattcattgtgtttaaacagtactccttcaagcaaaaggtcaaacagttctcacttttgccaagaaagaggtgtggttatttgtttttctgcctgccagctgtgtcacccttaaaatttgctgcttcaaacatacatagttaataatttcataaaagtgttattttcaaagtagaatattttcaaagtagaataatcaagatgagcttaagcttgtaaaccccattttgcctctcatctaaatcatgattttttttaaattggtgacatttctagaatattcattagttactgaaggtcaaaagatccaagttggagattacttccacttttctactcagagtagaattcttttatatcaaggatgtgacatcctaaagctatgaacaaaatgaagaagctttggtactgtgggctcagaatagcacaagagttaaagaatggtttgataacgggtgtagtggtatttttttttctcataagaaaatgcaaaaaccgccaggcacggtggctcaaatgcctgtaatctcagcactttgggaggccgaggctggcagatcacctggggttgggggtttgagaccagcctgaccaacatggagaaaccacatctctactaaaaatacaaaattagccaggtgtggtggcgcatacctgtagtcccagctaccctggaggctgaggcagaagagtctcttgaacctgggaggcggaggtcgcagtgagctgagattgcgccatggcactccagcctgggcaacaagagcgaaactccgcctcaaaaaaaaaaaaagaaaaaaaatgcagaaacctgtctcaatgtttaactgggcatttttcaaactaggggacaaaaactagaacttgccacttttatttaaagtgatgctcttattttagaccaatctgaccttcgttggc

SEQ ID NO: 5995 - DNA, 6000 bp, Homo sapiens
cttcatcttgtatggagttcctggccatcccccttgttttaggaggtttctctgaagccctccctcttggggaaccaggcagctgcaacacagcactttcttctggtaatgagttagacttgttctccgtacagtcagggggaaaaagtcattttaatgtgcttttagaaagttccgctctgaggtttacaggggctgttggcctgattagtgtttagtttctttcattttactcttccatagtaatggctgtatgattcctgcctttgttggagctctgtttggagccaggtgcagagtgggtggccccttttatggagagggttattagcattgccctggaaatgcctctggctgttctggggtctttgcttttcttttgtgtcttgcctctgatgtgctttctctttgtcttttgtcctcagcctcagactatggcatgaaactgccaatcctgcgttccaaccctgaggaccagatcctgtatcaaactgagcggtacaatgaggagacctttggctacgaagtgcccatcaaagaggagggggactacgtgctggtcttgaaatttgcagaggtctactttgcacagtcccagcaaaaggtgaggcctagtcaggctgctgcttgaccagtaggacattgctgctcttggacaatccacgattatggggctagagagtgtgagagtctctccagaaaggcagaacagatgagctctagagaagcatgttccatagtgcacaaggctgcacttgccttgggggtgagtgacagaaagcaatgccagaatccttgttttgccaactaactgatcctgttaaggccctcctggctacttccctccatggtttgccgcaccttcttgtttttagccttatttttcctctgtcccttcctgtgaatttccttcttcctatgctaagctttttgtttgtattctttgttccttaaagccaatataagaactcctgggcagtgaaggaacacggctttgatttgacccgggttaaggatgctaaccaccctggatatccagacccatcatttcttaaattatttttgaacttcaagcccaaacacgtgcatgatgtccaactgcttgaaaggatgtaaagctgatggttttgacattgttttcttttcttatcctggaaggtatttgatgtacgattgaatggccacgtcgtggtgaaggacttggatatctttgatcgtgttgggcatagcacagctcacgatgaaattatacctatgagcatcagaaaggggaagctgagtgtccagggggaggtgtccaccttcacagggaaactctacattgagtttgtcaaggtaattcccctattctgcccattgctgaagagagtgggtacaggggaagttgtttgctgctgtgtggggttgaccactgtttcccttttcctaggggtactatgacaatcccaaggtctgtgcactctacatcatggctgggacagtggatggtaggttgtgttctgacctgcttttttgacttgagtggagggatatggttgaggaagcccttgggaggtaattgagctgatgactattttggaaacacttaaagctaaattgtaggggattcagaatcagttggataaggatgaagcataacatggtactagccacaagctttggagtcaggtctatgtatatcttgttgctgccatttaatcagatgtttgtcttggatggatgcttttaatttccctataaattgggattaataatggtacctattggtgtaccctgacctttgtagtcatttgggatcacctaaaacttgtccttattctgtttgtttgacatctctttcctaggggaaaaaaaggtaaaaggaggagtcctgtaggcttttggtatgctctgaaagattccagcattgctggactgcactgggacaaaacttcacttatttatgtctccttatccttgggatcaagtcttagagtatatttctttctcagggtttagattctcctggctgccagcatctcaggctgatttttgcagagaaagctgcgtctttgtgacatttctcccccattccacctctgtacctttccccaactcaatcttgaatgcactgaggatttcatcctgttgtcttgatgtcccccaaatgctgatattatgacatctaggaggatgaatgtcttaccaccaaacagacctgtgttcaagtccctgaggaggaggcaggacagagggatagtgtgtgctgggaacccagaactctctgggtcaacgtttcttcagttgttgtgtgaatcaaaagggaatgtgggcttgtgggaggaggagggatttgaaaaggctaaagtttaggcattggatcattgtccctgtccagtctggttatcttggggctctgtaaaagtagaacaggaaggtaagatagtgaacctccctatgagcacggctttttctactttctagttaaatctaaagcttttgcagcactctgctgttctgtagaccagaggctatttctgctacttctggtcttttctctggacccgggttcaatcacagcaatctctttattgtggcttatttgctgcttttaagggtctctcttacttaaatgctgtgggtcttaacagtgttttcttccttgtgttagatgtaccaaagcttcagcctcatccgggattggagaagaaagaagaggaagaagaagaagaagaatatgatgaagggtctaatctcaaaaaacagaccaataagaaccgggtgcagtcaggcccccgcacacccaacccctatgcctcggacaacagcagcctcatgtttcccatcctggtggccttcggagtcttcattccaaccctcttctgcctctgccggttgtgagaacaaatgactatcctgaacagggtggaggggtgtgggaaagaaaccagccatattggttttggtttctgtatttttcacaatgattaatgaacaaaaacaaagagaaaaaaacacacatcaattaaaggagacaaaaagaggcagagcgagtagagagcagccctcattcaccacctggtcccagacgtgcttcagtcctcgtcctctctttgtggctggctcccagccttctctttcctcttgaggatacttagggtaaactggatccttcctgctcaaggatcctcatttgtatacctagtggaaaggactctgaactcagaggagtcactgttcctttttttaggttagaaattaacagcagggaaatgccatcttattacctgagacgaccagcactgggagttaggtacggtctgaagttatgtctagataagacttcagacgtcctgggattgaaagaatgtgtgtgaaggggtagaatttgtgcggtaaagacttaaaaaaaaaagtagggagattaaaaaaaaagaaagaaaatgcttccttatctggaagcctttctggattaatccagtgatggtcccacctttagtgtttgagctttgtcattgcttgtctccctggcatgtgccagttatagactgtccagcatccaagacgtttcggttatgtcgggtcctcagatcgcctctgacttgttaccacaacaaatcattttgatttcagtgcctgttggggacttgatttcttctcagttttgtttgtttgtttgtttccttaatctggctcatttgaaatttcttctccctctcaaccatcccactaagttatagccaagaagggaaggagacacggggatttggggttctctgcttgaatgtcttctcctttaccacctcaccttgttggtacctccctccctggatctctgagccagcagccaggaggacctgacccagcagttctttactggcccctttgtagggccttgctgccagggggcagggatgctttccagcctgcagcaacagaacacttgaccttaaaagtctcttctggtctttggattagaaaaggcttatgttagcatagcttaagagcaacctcagagatttgagccctactaagtgactgaccactgtttagagtgtctggtatctgatgttcatttattcccatgttcttgtgtgtcacagttcagccagttttggtttatgcctagagctacttcaaggaactagactaattagctatataggcccagcgatgcttcttattgatcttaatagtatgcccctccttcccctgtcctttcatttctctatccaagtagcagtcaggttcttggtgtgatgggactgaaagaattccagtcagccagagccttggcagctctgaagctaaccttagcatctaagtgtcgatcttgaattccctgaaaaaatttctataggaaatgaagcttccctggtcccctcctttctggccattgtcatccatttcccagttagggcaacaatgaaggaggacccagccaagctagaaggaattttgtggatgggagacagcaggattagcttcagcttgggctggagcagtcaatataggatctcaggccaggcccgcttttctagaatgtgtttaattttgagtttgctttattagatatgttttttaagagctctgtatatttgaactgctccttatgtgacaaaataggtagctcttgggctcatgtcctgggttttggctctttaatgattactccaggccagcatttagtcgtttgagaattgtagcctgttgttttcgctgtgacttgggtctcagtgctagggtattgagtcaggcagctggagggttgtggcccgaggctgcagtcagaggtatacttcccatagtgcttcacacagctcccctgcttctaaaggataaggtactgtagccttggtcctggggaccacctgcctggggcagtggacatcctaactaaacaggcttctggcagtagctttggttcctatcccatcgaaattccccaaagccctgggccactgccattgggttagtcaagatgaaggaggaggactggctgcctccattttgccttgtttgttagtttgcctgggtctgtctgaggaaggagggggtcccgccttccacctcaacacatcccttcagtgactcagagtctcagaaggaaaccctgactcctggggccatttcctaatggtactgtaagccaagcagctttgcttctgcctctgtttccaagcccacccttttcccctgagctcagggttagggatgggcgctttcctctctggttgtgaacgaaaggaaggaacatctttctatggctaacaaaaactaaaggggaagtgaggaaacaggaagaagtatggtgggggctggggtagactcccctggagccaagcctatccagctaacaagagctccctggggctggtcacagctggctcatgatgctgaacttgaaagtttttttgtttttgtttttgttttgtggctcctccaagatataggtacatgaagtttaggttaaaggggtgggattctttatttttatttttgtattgtatgtgtcaagaattactctgttgttcaccttttgctttttgcactgtttgttctcttatctgtattttgagcttagtgctaggactgagaggctgcaccatagggaatgtatgggagatggtgaggggtgccagtgaggggtgcgtggaggagaggcctgggctcctctactggatctacactctgtcccaggtttttagatcccactgagcccagctgactgaaaacaaggacagtcagggtgaaacttcttttgccagaagtgtggcctgagttgaatttctgggaggatgacgcagatgtctgctgcagagctgggctgagagttctgcagtctagctctgacttaggtcaggggcctgttggtctctcattggacgtttttgggtctcactcatgcttactgaaacattgtgccaagaaactctgtgggatttgtgtcccttaaaccagactcacttttctgaaaaatctccattgttgaggagaggctgctcaatcgacaccccgagt

SEQ ID NO: 5996 - DNA, 6000 bp, Homo sapiens
agctctggatgcaagatttggatgtgccacttagggctgtgtggacttgggataaattccctaacctttgagtcagggattaggataggctgccctatcaggaatgtcatgagaattaaacgagagaccatctgtgaagtgtttaacctgctgtttgtctctcagtaagcacacagtgaatagaggaatcatctagacatccctggcctcaatttgagaaaacagcagcctccatgttgatgtttactctggttctaggttgtcaactaaaatccagagaaggggtgaagatccttctaactctaggcccaagaatgtctgattgcaaatggttgtagcaccactgtgaagactgagcacggattttgaattcagacctgaaagggaatcgcttccccttcactaattactgtcttaggtgaacatggccaattcaactttgtacttgttttcttaaagaggataatacccaactgagggattgaaagctttaaatgagatatttacatgtaaagtccttagcacaatagctgccatatcataggagctcagttcataactgttgattccaattcaaaaagtgctaaataactgcagtcgttttgatatacagaaactagcaagtaagttaaaattggaaccaaaagacaagcttggttcagataatctccaaacagcgatgaatacacattctgcctttaataaggtaaatattccaacaggcctattaagctatggctcacagttcatctactttacctattcagatttcttaccttattgataagaattatttgtgccaggcaaggtgcacactacttaaaatcattaatttcacaataaattagcttcctctagtaaggtagaaagaaccaactttttgatgacctatagaatattgctatgttgtgtgtactcttctcccctttttcacaaatttagaaaacaggattaggacaaaagtaaagcagatgagggaagcagtaagtgtcagaggaagaaattgaatgcaggtctgtctgagctaggctgcccatgtgtttgcccttttggtttgctctgaactttctgtttttcagtatttctcaagagcatgccttctaaataggattctcaggaagccactgttgaactaataaaggccatttactgccattcgaagggaataagaagtttagtccgtgatgagtttcaaatttggttatcatcttgcttttccagtggtgatgaaaaagcaaaattcacccaaatacaatgactactgtctacttgaaacgctccaggtagttaatttttgaattatgattcaccttccctttcctgttttgatgaaccatgaacaggagactgaaccttccctatcaataaaaagctcgcgtttccaccctgcaaattcgcgctatgacagtctaattggctgaggcgcaggtgggatttcctgtcgccattttaagacacaactcctctgcaagcaagtgcccagccagtgaaagggggctgtgtctgaaacaaagagtaagcgggaaaaaagggaaccaggcccagttgcccctgctcccctccatgccgctccctcgtcccccggacttggagcgccccagctccgttaacctggacgcaccaggtccttcggtcgggaccacgtggggtctccaggccctccaagagctggcccccggctctttgcgcctaggccggtgctttctcggtgctcagcaaatccttctggttcacctcacacccagtccccaaagcagagctccacagggcagatctcaggaagggctgaccaggtctgcgggtgctggatccggaagaggggaggtgcctcccgcttcaggttagggacaaagggtttttaaaggtgcccgagctccccgccgcccctgccacttcggtccccttcccgccaacccgggccatctgcaggctgtgcccagggccagccctccgctccaacgctgcccgtagtcccaggcgctgcccgcggctctccgggctgcgctcggacctgccactcccgcggccatcctcatgctgcgcccttcccacaatgcaactccctcgctccttcggccccggcggggctctggcgtacccaaaatgcaggccccagcggaacgcacagccctcctgtcctccgccggtgcccctttagccgccccacccccatccctaagggctctcattctccagctgcagccgcagctgggttccgaacacgccgccgggccccgggagggagaggggcaggtgccagggcggcgcgcagcctctgctcccggtgccagcttcagtgcgccgggcacacgcgcgccccgcaacccctccctcaccctttccccgttgctcaatctccgccagccgcggtcgctgcatcgtcagagagctgcaagagggaggcagcaaggtgcggccgccagcagtgacaccatgtgaccggcacggctcactgacacgcagctttggttaaagagcgggcgcacaggaggggaggagaccgcgcgcgggacggggaggaatggcctgtccgcgttaaaccatcacaagccatggttgcggaagggccacgcgtcccccagtaggagaatgactccgattcgtgaccctcagcgccggtgcatgtcgatgtaagtgcgaggccggcgagcagagtgtgagtgggggttggtggtgaggggagattctgatgcaatcggcccggaaaggaggagagccaggcgagcgcggactggggcggccacgccactccgccagaaggtcgccaggagcctccgcccttcaccttcctccgaaatccgccaggccacgccaagctccctgcccaacccttactgacgggggccacattttcccggcctccgcagccagaccttgacacaaaggacatcaaactgccgagggtaaaaaccccggaagggcggacacctccacatcgccttttgccacctttccctttatttccggaggtaaggtgattatccgttcccggggagggctgggcgagcggcaaggggagatttagatgtcggaggaggaggtaacgtagaaatcatctctgcgggcgtgaaagcagagagagctcggctgtgcccgatgctttcggatgttgcttttaggagaggaaaagtccaggtctcctgtgcttcccgaacgcacgcggcagcgggaggaagcgccagggcccccgagttcacctttgcgtgggctgtggcttactttttggtttgttttcctgtgactttggtgtgttttcctgtggctgtggcagagtgtggtaccagatctggttccatttttacgagagccaggaaccacgcacgtctggagggagagcgcagctgacccgagggcgcgaccgtgttctgggagtgtttgaatccccggcctttggtgaaaatttcctgtgtccgcaaggcccagaggagatcgtgtgatgtccggggggtgctgcgtgcggccggctgggtagcggccgcggaccaccactaaaccggggcatgtttgccgtccttcctggtgctctgcccctctgtaacgcggggaagtaggagggcgcggggagaaattactaaaggatgcttgcagtgactcactgtcctttcctgccctgaagaggattttctaaaatgcagagggtggcaggggacagaggtagtgttttttcgagagccgggatgtgctggagccagcgaacaaaaggccacctcttgcgcggtcttgggcgcagactgctctcgcttccagtcccacctcctccccaacccccggcacctagttcgcgtccctaaacgttgccgcagaggcctttaaacgcgtgggtcggtgccgggaggagagcgcatcttcgcccttgtgcgagccccttgccccctaaattatccacctcctggcgcatggggctccccagcacccactgggacccagtaggttacccggctgcctgggcaccgtttgcctgccaaatcgcccgcctgaggtttgtgctgaactgtagttagagaaggcacaagtgcatatggcagcaaaaggaatttcgcggtacccgcgtcacgccgctcccagtgcctttcacaggctgccttgggctggggaaggtggtgctacaattcagagtcctttgtcttgctctgcggcgcggacccggggtttgtacaaaccctcgttctctgttagaaacctaactgccgccaggatcacgtactttctcggacgaatccgcggtgatgtgtgtagcaaaagtgaaaaaagacgcctctgctagaaaacggtatttatttgcgtttggaaggggttttgacctctctgcagtgggtttttacatttttcaatataagggggaggaggaaaataaatttatggtttgcagaatgcagggcccagcgagggtgtaatttgtcaccttgataaaagaaactgtgcagcaactcgtgctttttctgacgtcagaaggacaacggaaataaaacctgagctcggtgcatggctggcctcgttgtcaaatgtctcatgccaatttggtactcccgaaatcttgcaaaacagccaattccggggtactgacctggtgtggaccccctggattttggttcgaccccagcctcaaaatggcctttctcttgagagtcactcgatttctcagtatgtcgctgtaagcaattggaaactggaatagtttggtttgaggtcttaatcttgaggtttattcgctttttaaaaaaatgtggccaataaacattttctacagagggcttactgtgcgactggcagcaactaacaagatttgtttcaccttctatgaagcttccgttctcagggggaaatagactatataaatgtaggcatatacatttcaggtattcttagtgcaatgaagaaataaaacaggatcatgtgatgggggaggatgcttgaaatagagtgactcaccgggaggggcggtgtgagggtataacatttgtcctcagacccgaatgatgaaaagggatcagctatttccataattgagggaagaaggccagcggaaggaacaggaagaaggaacagcaagtacttattgcactcttctttgactgtaatataattgaacagatagatgaatagattttaaaggtgttttggagctttaaacctatatgtatgttgtttatgtatattttttatgatgcttcatgaattaaggccatttaatgaaaggagcaccatgtttctgatatctgactattgctactcttttctttactctgggtgatgcttgtggacaaaaaccgattttactcattgttcctctaatgtccagcacatagtacctgcttaataaatacttgttggatcgagaccttgagaccttgatcaggccatcttgttcatctctttgtgatattattggccatcccttccgttctatatctcatctgttccccttctcctaagtttgaaaatgagagtctttttcttctctgcttctccttctcgtactgcccttcccactttgagcagtgaccaggcccttgaaaatacccctcacacttgtcctcttgtctccatttccactgcccaagttcaggtccctgtcaccttacctagacttggagacatatgaaacagatatagaggtgccttgaacaacctaggggcagtgggagtgggcggtggagaaaaatgcaagcacaacatatggttaagagtgaaacagccagttactgaggtggaacagctttcctgttggtctctcctccatatcaagttatgctcccctaattaaatctccattctttcatgaggtttatatttctaaaattcagttcacattttgttaaaggaccttgcttttaaaaacctctgagggtttccattgcacacaaatacagtctaaattccttagccatacacttaggacccttcacaatctgccttctcatctctttccaattttttctcttgatattttctttctcacagttcaccctattccctccctatcacttttctgcttcaata

SEQ ID NO: 5997 - DNA, 6000 bp, Homo sapiens; identical to SEQ ID NO: 623

SEQ ID NO: 5998 - DNA, 6000 bp, Homo sapiens
aattaaaaccaaaatgagataccaccttacagtcagaatggccattaataaaaagtaaaaaaaaaaaaaatagatactggcatggatgctgtgaaaatggaactcttactcactgttgatgtattaggtaaattagtacaacttctatgcagaacagtatggagagttctcaaagaactaaaaacagttctaccatttgatccagcaatcccactaatggatatctacccaaagaaaaagaagccattatatcaaaaagacacctgcacttatatgtttattgcagcacaattcacaaacgcagaggtatggaatcaacctaagtgctcatcaatggatgagtggataaagaaaatgtcagatacggatatagagatatagatagatatagatagatagatcatggaatactactcagttataataaaagaacaaaataatgtctttttgcagcaacttggttagaattggaggctattatcctaagtgaagtaactcagaaacagaaaaccaaaaactgcatattctcacttataagtgaaagctaagctatgggtatgcatgggcatatagaatggtataatgaacactggagactcaaaagtgggaaggggatgagagattaaatattacctattggatacaatgtacaccattcaggtgatgggtacactaaaagcccagacgttactactatacaattcatccatttaaccaaacccctagagctactaaaataaataaataaatgaaaagacagcagaaaatacatgactagcccacatgaatattactaatgtatagttacctatatacagcatatattacaaatctcttgaggtcttctttgtatcacttgagttcctattgttgctataatgaattattccaagtttactgtcataaaagccacacacatttattattttcccattctggaggtcagaaatctgaaattggtttcactgagctgaaatcaaggcgtcagcagggccaattctctcttgaaggtgtaggggagaatccatttccctgccttttccagcttcaagaggcacctgcattccttggctcatggtccctttctttatctacaaaaccagcaacagagactcttcaaatctccctctctctcttggactctgacatttctgcctgcctctttcacttataaaaactctggtaattgcattgagtctacactcagataattcaggataatttccccatctcaagatccttaatctaatcacacttgcaaagtccctcttaccaggcagggtaaggtattcacagcttccagaaaataggatgtggtcatcttggaggggccattatcatgtctaccacaaggtattaattaaaacatcagaagcagttttaaattaatttgccttgtacttaattattatgtatcaatttacctttgggtcagataatatatgtgagattgattcattaactagaaaatgaaaataaaatttttaatagagtttttatactagtcaattattttctgctgaaaggcctttaagttgaatgttaaaattgttattataaacttccatgtaatggtagttgggtagcaataacaataaactgatagttttctgcctgtagcagtattttgatgagactatttttgactgaaactcttattttgtatttaaaaaatcactgcattttatgctgttatttgcttcactgaattatttaatttaatatgttctattaaagagactttaaagctagatacaaattttttctccgtatacatttttaatattcacatttttaacctaacgacctaaagataaatttgaatttctcaaactattcaacctatagtttttcctctgtaaaactgcagtgatactgaacaaaactgctgcaaagaataaataagataatgtatctataactgtagccaaattgctgggccataacaggtaggtaggtcttcaataaacttttagcctgatccaaaatatattccacaagatttgctgaccaatattgaaacatgtttctacaaatactgcagatgaataatactgtgggtgttgtttcttagtaaacttgccaaattttaaatatttggttactctacacaattaaataaaattttaacatgagcatccaagtaactctatttactaaaaatggctgtttctttacatgatatatgactaatgagtgaagctatcctatagctatacaaaatgataacgttaagcattttttattttgtctatctaaaggtgccaatacattgtgaagaaaattctgttaatttcattatatttaatacagcatattccaacttaaagttattcagaagatcaactgaaggcaaatctaaaagacagcagtgctttaagaaataaaagtcataaaacaaaagtttttcagtggttataaattactttcaagttgcattatttcaaatttcttcctgtaatctcatgttcctagctctttaactccctttgattaaatgatgttcctttgctttcactattttctttttgtgaacttgtcaaatcatctttgtcttgtcttgtacaatttaagagacttttatgtagctctctgagcgactatcaccacacaagtccaactgggagaataatttatgaggttcaaaatgaagggtcattatgaatgctgtctttcccgcaatgaatacatacactctcttgttcatgcatgacaggattttaactaaatcaatggagatagatgcttttaaatgaagtattatgaatgatatcattggttacataaaataatttactttttatgtaatctttaccttgtttaataaatttagagaactggaagaaaacttctttaggtgtgggtttatctgtaactgtcacataagtatttctttggtagaaaacacaatttcaaaagttgtagttttatgtccttaggttaacatctagtatccagtcataagccagaatattatgcatagtaagtattctgcacaatgatactaaatgcagaggaaaagcaaagagagtagattttctcaattttgaagagaggttaatttttaagtgtttttactttatcaaagtattcctgactggtgttcagcaatcattggttctagtaatgtttatttggctttttcttatcatttcagtgcccagtatcttttttttttattacaacagacaaatctaattacttctgattaatctcaatagctgtgatttggattatgaatacttcccttccaatctaactgaaatcataaatgtttccatgtcaccttattttttataagcacatggtgtaaggcataccaaataagaaaatatattaacttttatcagagagacaactgtaatagaaaactcaatgtttattttagtatatttatgtatatatgttctattattttaaacagcctgtaaacctaagcctctcctcttatctaaaaatcatccgtcctcctctcattgcctttgcattttcactaaactcccctctgtgtatttatcttgctttttaggtatttacttgtgtgagtagtttatgttttttcatatgtcctgagctctctgccttacccaccatgccttgactataaagaaatgatagctaactttggccaggtgtggtggttcacgcctgtaatcccagcactttgcaaggccgaggcaggtggatcataaggtcaggagatcgagaccatcctggccaacatggtgaaaccccgtatctactaaaaaaaatataaaaattagctgggcatggtggcgtgtgcctgaagtcccagctactcgggacgctgaggcaggggaattgcttgaacccaggaggcagagtttgcagtgagccgagatcgtgccactacactccagcctggcaagagagcgagactccatctcaaaaaaaaaaaaaaaagaattgatagctaacattaattgagctcttgctatgttccagatgcattaaaagctttttaacatattaatccctttcatctttaagccagatgaaatgggtaccactgtaatcttcactgtatagaggaggaaacagaaactcagaacagtgaagcaatctgagtagagtcacacagcctctaagtggccgaagccaaaatctaaacctgggttaagagccaccgaacacatgagcatcacccacatctggagaacttcagtgcatacattttccccatgcttgattttcaaatcaccaagtacttttaattaaccttcactattgttatgatttgacatttgttgttctatatatacaactaatatctgccccataccatgccagaacataagaatacaacacctagtattttatagatgagtaatagcagctgccatttattaagcttttgccatgtgccaggcactgcatcttattatttaatactcagaaagatctatggggtacctaccaatttatttccactttagagatgaggaaagtgaggcagagagaggttagatgacttgcccaagatcacacagctagtaaatggtgaagccaggatttaaactcaatggctgaactccaaagcttggctctgaatgagtgaagagatgtgttcctagaaatctagcttggagagtcaagaaaagtaatagggaggagatgacatttgacatatctggaagggcaaagtgggaaagaaaggaaacaatacactcaagggagacaacaacatggataaagtactgaggaatggtgtacctgcagcataacaggtgctcaaaaatgcaaatgaaaaaaatgaatatctttatagcccatgagttaaaaggttttccacatctaagtgttgtatgactagtgctctctgtgtgtttctttcagtgccaccgtgggccttaattgcaatagccatagtcgcagtccttttagtcctgacctgctgcttttgtatctgtaagaaatgtttgttcaaaaagaaaaacaagaagaagggaaaggaaaaaggagggaagaatgccattaacatgaaagatgtaaaagacttagggaagacgatgaaagatcaggtaatgtattctttctacatttcttcttattttgtttaaaaaagataaacaaatgtattattttatgccatataattacagaaataaacaacttctggacccatatcgtttttgagatgctttgcaaacctttcagtcattgttcaagatcccaaagcataatggaagcatttggcagggttttccaatctcctgagcatatagaacagaaaagggcatccatgatcatcaggcccatcttgatgggtttggcatatgagaatgatgcctgaatattttgattacatctgtttaaccagtcttcattgcgtttagagttagaaaaatcagataaaaagtgcctgagtgttttgcatttgggcaggggatctttctaatttctactgttcatagtcactgttaaataactgagttttacggctgttcatcaaactggatgaaagctgcttttcctacatgtccatccagctgaaaaattaattctcaagaataatgagttacatgggagaagggagagaaatatgagccagttctaaagaacacgacaggatagaatttttgccttatgaaaaagttttctttcttatttcttataagacaaaattctcatttcaatttaataaggacaattacaaccataacactggttataaaatccatctggctgggttatctttccaagcccaaaaaagctatttggatgttctttatgttgctatctgtttttggctaaattaattggacaacttggttcaagataatgtttactattattaatgataattattaaatgcctcttcatttttgaaataatatccatgttgaatatctctaaagaatatttaattcatattttaaaattaaaatgtaaatgtacagattttttatagaattaacattttcaattatcaatgttttcatcaaatacaaaagttttatttattcccaaatagcaaaa

SEQ ID NO: 5999 - DNA, 6000 bp, Homo sapiens
ttcctgcttgtcagatccttccatatccggacatgcgtagtgcctcatccttgcagccagcggccttcatgctccactgtaattcgtgggttagtgggtatatgcacttgttgtttttgatgctaccacatggggatatttgcctcgtctgaactctgtgtattctctgctgcaccttgttgcttctttgcaataaacttcctgaactcaaagctaatactggggggaatcccagaagctgctgagggcagggccatgctgctcagtgttccaccctagctcctgacagcatttccctagaaaactgctgctgggcctctaatggagcaaataaatctgtgtacaactaggcagcaatagtttgtccaaaagtcctggtgtaatctagtccctcaaactgtgcagccttacatggagtacacacacacttgcagccttgaagtactacccactgaggggagaaggcacggcaaggggaaaggttggcacaggatggagcaagtgctttttctcacacattctggaggaaaagttatccagttcttctgttctagaaacacccctgtccttcagaaaccagggtctagttgctctggctaccaggcgtgagcaggtggtggtagcaccacaggccccggttaccatcactgtcccatgtctttgatcttcgtccttgtggggactggcctgcatggcctcggtggcagcgagccctgcagaggcaagtgcatcagcatcactgtgtttgttcccaggttacgtcggcgctgctaccgtgggtgctgctgcatggtggttcattgctgctgacggtggtccaagagtgtccttctaccagctggtactcagtcacctttctttctgtaccttacatgagaagtgttgtgaggccttgacctttctgtggtttcggtatctatcaaatcatcttaagactcagacaataaacagttacatctaagatgattctgaaggaccagggcttctccgagaaattggggtaaacctcttggctggctctgcattcaggctggtctgtgctaggcttggtatggggttggagcctggacttgggaaatatactgggctgataggaatttgattggattttcttgcagagtcatttcctacagtgtaaagaggacaacccggactttgaaggcgtggattgtgcaatctttgaatccccatacccgatgacaatggcgctctctgttctagtaactatagaaatgtgtaacgccctcaacaggttagtgcaccttcacggcaggctgaggcgagcatggtgactgccagggcaccggggaattgtgtgtagtcacggttgattgaggatcacaggacagttcttcccttcccaaaagaaaggagaacaggcaataccagttttaaaagcatgagctgtcgtcacctccaggaagtagtgggagtgcttagccctgtgtttcttaggagctcttccttaaaagaaaccgtgggggccaaaaataggaactttggtacccctgtatgccagcacccacagggaaggaacctcaccctttcacacagacaaatggtaccatccagttaagcccgtgacaaaaatggaaatttctaaatagcccaagtctccagggcaattgggaacagctttgaacccactaagatggggtctgctatgccaaaacatagatacagaattcacagtttgtcctgcattaggacattctcttcaactttgccactgtagaaagtggaggtaggtcagcggatggtgccacattaacagccgccttactgaagtgtagtccaacagggtcttactgccactgtgacacgtgccttgccttgggggtgcgtttccccacctctccttgctctgcagcttgtccgaaaaccagtccttgctgaggatgcccccctgggagaacatctggctcgtgggctccatctgcctgtccatgtcactccacttcctgatcctctatgtcgaacccttgccagtaagtggttgggtggggcttgggaccagccacctccttccaggggaggctggaggcgtgacacgtcttccctgtgtgtcagctcatcttccagatcacaccgctgaacgtgacccagtggctgatggtgctgaaaatctccttgcccgtgattctcatggatgagacgctcaagtttgtggcccgcaactacctggaacctggtaaagagtgtgtgcagcctgccaccaaatcctgctcgttctcggcatgcaccgatgggatttcctggccgtttgtgctgctcataatgcccctggtgatctgggtctatagcacagacactaactttagcgatatgttctggtcttgactgacagttttccataaagaagatgtttaacttaatcaattaatttttttattgtttaaagcaactgtctatttctgctgaattttcacatgaacatactggctggtgatggaggtttcatactctagattttgttttgctttttctgactccagtggggcaagattttccttttttatacacataattaaagtgtccattgacatgtacagagaactaacactattttatgcaaatatttttttgtagatgaaaaagcatgtacagtgttctgtttaatactcatccttgtataaaaaaaatagttgagccagcagacattgtcagcaaattaattggcagcagattttaggaaatgaatgtgtgtggttttttttctaaaactaaatagcatgtattgtgtcttttgcatgatgatccggatttaatttgatatcacagtctaatttttattcataagccaatttttctgcactgagcagagtcttgctacctcagtcagtattgttttggtttgctacttccctcacccactttggcctccgttcaccccaccccaccccacctctccccaccttacccccgccccgcttggcttcttctttaggattgtgatggttcgttctgtttacatcagttttaacgagaggtatgcctgtactcgcttgtgcagaaaacattgttccagattcaatcgactgggtttatgtcccttcacatagtttttaaggttatttatttaaatgtctaatgtattttattgtaacagacattgttttgccaacattgcctatttcagtggcacgtcatctagttttaaaaaaataaaacattttaaatggacagagaaaaataactgtcttgtctttaactcgtaagtggcttacctgggactaacagacatgtccaactttctctccagttcttagctcagaactttagttgtactctgcttgaggggaagaaggctcctgctctgctgtgtaggtagtcataggaattgtattcttaatgtacaggcactaattgtcatctgtgatgtacattttatgcaagtttctgctggcctggtatagagaacataagggcaagtgtgtatgtgtgtgtatgtgtgtgttttgtaaaatctgtaaatagcacatgaccaaatgaacatattgtatagaactatttttatttgaatgtggcactaaccaccaccaccgttactacgatcaatgtttgcgcatgttcgagatgagtctcaccaacagtgtgtaagtcattaacagtcctaactgtggtgttttcctccaatgccttccaacatccatcaactaacgtgagtattttcttcctgggatttggatgctttagcctaaaggtgactgccaccaagtgagataactgtatgtcactaacttataagccgcctccatggcagatgctgctgtgctccctgatgccctgtgagcaccggggttgcctgtggcgcctgccatgtgactcgggcgcagcatcagctggctggaggtgtggctttcatagacctccacaggctgcctaggacaagatgaccaggagggcccaagccagacaaaagccggagtggggagagaggcatttcagccagaccaacaggctgaaggagctgtgcagactattgctaaaatgagggttcgcagctgccaggagtcatcccagaacattgctacttatttattaaaaagctaaaaactagtgaaagcaagtaactgaaccagtgaactctgggtatcgataggttcgtcttaaataggccacttccccactcccccacccccccttgcttggtcttgtccttggtggctaagacttagctctgcaggggatgttaaagcacagttagtaggacgtggctctgcacagcccaaaaaccagcttactccttagccagggtgtgaggcctcgactatattcttcaaaatgtacttaggctctggttactgggatggccagtagatgtaatgcagatggttggagtttggggagggttaggaggcatcaagcaggacaaggtgctgctgagttcagagggcccacgttcaagggatggaggtggaacctggagaccgactcttaaaagcacagtccgtggttgggtgtggtggctcatgcctgtaagtaagtctcagccctttggaggccacagcagaaggattgcttgagcccaggtactcaaaccagcctgggcaacagagtgaggccctgtcaaaaaaaaatcagccttactgtgaagcctccaaggctgctcgcaggcagctgtggctctcgggaagggaggctgctttgcccagcagggaacatttggggcagggggtaaattttgccagtttgagcatcatgaggtgtaacaagaaatgggttgaatgggccaaatgcaaggagtgcatctctgggctgcaaactgacttgagtgctgcactattgctattccgtgcaaacaaaactcagcttttcctgactcagttccttgacttagtggcctttacaaaaaaagttgagtagtgtgtggcctgctgtcgcacagcccctagttagcttcatggtttctcagcttcagacccctccagcccacagaggagcccatggagggacccacttcccttggtccagacagctgggagtgggttaggcccactgctgttttgagcagggccacttgctccatttcactgaaggctttgctgggtgaaaacacttcagcatctcctcctcaggtcaacccataaagaccaggtccagcaccgtggtcttggcacatccctggcctcaggccctcacctaacagtgaggcagcagctgcccagccccgcaatgtgcctgctgtcaggcagctcttgcctgaaacttacttccacattctttcctgatgggcaggtggctgaaggcccagccatcagtgtcgcttgttgccaccccgtgcctcccttggcctctctgagctttgcccagaagaccaacaatcatacataccctaactgggacaccactctgcagaatgcagatgatccattctggaggaagctgtcccttgagctcagtgagctcccaggcaagcagggcatctggccgacttccctcacaacagctgctcccacatcccctcggactggagcttcagccctgactgaggtgggcagacctaagacctgagaccacaagattagctcagtgtctaccaagcatctagccactgtccagggccagagcataccacgtctgcagtgcctgtgagcagagccagcagttgccctgtgactgtaaccaccaaattgtccaaacacccgctgcagttagcaagaagggtaggcttcaccctcctttactgaggagaatgatgcggaggagtttcctctccagggctaggcaaggcaggcgagcagccagaagccgggtgcccacagggcagggacaggaaggctgtgctgctactggctgctcacttctccatcaacctcaccctctgcaccactaaccaagaccttgtcctcttgcctgtctcgctgctttcacagctgcaacgattgtgtctgcctcatggggttttcctccagagcctttattctgtagccagacgacacgaggagtctgtgtcactgagccagtgcttctagatgctaccctgtgtgggcggcacct

SEQ ID NO: 6000 - DNA, 6000 bp, Homo sapiens
gatagctagtgcttacagcctgggaaaggctttttcagcctgtgtgcttccacagatgggagcaccactacagaaagtggtttagaagcgttcaccttggggttttggtatgaggcacattccagggtttttatttatttattgaaaatttttaattttttttttattgtagacacaggggtctcactatgttgcccaggctggtcttgaacttctgtcctcaagtgatcttcccaccttggcctcccaaactgctgggattacaggcatgaaccatcacgcctgaccatgttccagatttgtaacttggtcattttgagttcctcttcactctgactaggaaaagacctggttatttgacctgagggcacagaattttgcttgagtttagggaaggctatttcctcttcagagaaagatacctgctaaagtcgcaggtcctcgagaaacttgctttacgtctctgagccttgttttccttttcaaaaaatctctcatgctttagaaatttctgataagactgtaaactctcctgtccagagtagcttgaagtgtctctgtcactttttttttccttgatgaccttttacatggaattaaaaatagggcagaacatagctccagaggggaaaaaagttggttggggaccagagcctatcaggttgctaatgctgtaaccttaaggaataccctttcctgggctgccttcctttcacctggggaaggatttggctttggggaggtaagagcttgaaacatgggatgagagaggagtcactgctacctctgatttgctcaaagccatggcagttgtttagaattctctacctctactgtcacctaacaggcaggcttcatctgcaggccttccaaatagtggaagttcacaggtagaaaatttaggtccctgaatccgtgggttcgctgtctcagcccattcagaacaattctttaggtactggcctcactggagaaagaagtgatccagaagaacagtctagtgaccaggagatctgagggtagggtgggagtgacgctagagcaccaaggggggctttacagctgtgttctcatggaggacaggcttctgctcattctggctttcccactcttgtggttcccagttgcagttttccagttagttttattacttccttttcttttgatccattccctaaactgccttgagtggaggcatttgtttagtgcttatcgtgtgcatatccttgcctggctagcatacccatgtttctgtgtctctctccgtgtgaggcattgtattgagctatttatacagattgttttatccttaccacaatgctgtgggataggtggtgtccccattttataggtgagaaaacagacctagagaaaacaacttgttcagtgacacttcgtgtatgtcttttcctgaaccctgtgctgaattttccaaggagcctagttactacattgtctaaaactaagaaagagcagacataatgtaggcccttcggcccccttcctttttggttaactgagttatgccaatttcagcagtatgctgactgtacacttcattgtattttagagaaatctgtttcgctgtgaatgcataaaggctaaggagggaggaacaacccttgtttgctgctgcatctcttgggacttgggcaaattcaactttgcacgtggcagatctcttgggaaagccacttgggttttaaagggaaatattttaaaggtaattccaaggttgttaagtaatttttgttcacatggttgagttttcttcactgtgggactgagactgccgcagattacgttactgtcagttcctcactttttccacttggcaagaaaaaaaaaaagattcggcctggtgtggtggctcacgcctataatcctagcactttgggaggccgatgcgggcagatcacctgaggttggagttggagaccagcttggctaacatagtgaaagcccgtttctactaaaaatacaaaaaattagccgggcgtggtgatgcgtgcctgtaatcccagctacttgggaggctgaggcaggagaatcgcttgaccctgggaggtggaggttgcagtgagctgagattgcgccattgcactccagcttgggcaacaagagcgaaactccgtctccaaaaaacaaaaacaaaaacaaaaaaacaattccccacccatgcacaaaattttctgtgtatccgtaaatcaaatgtagtcgatgttccagatttgtaatgatcacagtcctcatggaagaaggaaattcttagagctcagttggaagagaaacagcagtctttcagtcttcataggtttgtatcccggggcaatggttttttgaggctggaaaggagggggagcatgttagcagtacatcctttgtatgcattgctcagctactctttgatttcttgaggagaaatagaaagaaaaaagtctgaagacaaaagtgcaatgagtttcctcttccattgtctcatcagtccctctgatctcgtggctaatgtcacttacaggaactgttaacagttatgtttatttttttgaggtcttgacctcaaccactgggtctttttgttaatcttttaccttttgccatgtcttctcccttgttgatgattcagaagataaagctctggggatgacagcccctggccttctcccaaaggatctagttgccagatgtcttcagggtcaccacgtgagattggaaggcagtcttgaaatcttaatttcatgcgggaggagagactacatgacggctacatctgtagttggaacagtatatttatggagcactggaaagccttactgtgtttataggataaaggagtcaggctactctctggaggaagcagaactatttacctctgagactgaaatgtgatatcttatatttgcacaaaaaagattcggcctggcgcggtggctcacgcctgtaatcctagcactttgggaggccgatgcgggtggatcacctgcggtcaggagtttagtgtgttgtgcgagaggaagaaaaaaacatatatacaactgtcttacaccaaggttgggagagggccagggccaagagaggttttctgctcttctgatactgacccgaggtaagtaactttttacttttatcctctctcattccttgtcagtttgtgaaatgtgaaaggtgattcccctaggacttggacatcttaggcagattgccttgccctgcaggatgctccagccttgtggacagagtggcatggcttcactgctttgcaggcacctccttcattgtcatttattcattcagcaaactgtatgagtggcgactatgtgccaggtcccgtgctaggcactggaggtgcagtggtgactttttttttctgctgttggtttatctgagtgaatgttcaagtaagtaggtgaggtggagttttgtgagtctgtgggaaggaaggaaattagcatcacacctttcttttatgagcctgtttttgtttacagctttggaactttttgaatgaaaattataaaaaaaacacacaacaactaaagctggaattttattcgtaaggacaatgaagaatgactttccaaagcagatatcctgtttgttttagactctgggcttttctgaatgagagaaaacattctttgaacttcatcttgtatggagttcctggccatcccccttgttttaggaggtttctctgaagccctccctcttggggaaccaggcagctgcaacacagcactttcttctggtaatgagttagacttgttctccgtacagtcagggggaaaaagtcattttaatgtgcttttagaaagttccgctctgaggtttacaggggctgttggcctgattagtgtttagtttctttcattttactcttccatagtaatggctgtatgattcctgcctttgttggagctctgtttggagccaggtgcagagtgggtggccccttttatggagagggttattagcattgccctggaaatgcctctggctgttctggggtctttgcttttcttttgtgtcttgcctctgatgtgctttctctttgtcttttgtcctcagcctcagactatggcatgaaactgccaatcctgcgttccaaccctgaggaccagatcctgtatcaaactgagcggtacaatgaggagacctttggctacgaagtgcccatcaaagaggagggggactacgtgctggtcttgaaatttgcagaggtctactttgcacagtcccagcaaaaggtgaggcctagtcaggctgctgcttgaccagtaggacattgctgctcttggacaatccacgattatggggctagagagtgtgagagtctctccagaaaggcagaacagatgagctctagagaagcatgttccatagtgcacaaggctgcacttgccttgggggtgagtgacagaaagcaatgccagaatccttgttttgccaactaactgatcctgttaaggccctcctggctacttccctccatggtttgccgcaccttcttgtttttagccttatttttcctctgtcccttcctgtgaatttccttcttcctatgctaagctttttgtttgtattctttgttccttaaagccaatataagaactcctgggcagtgaaggaacacggctttgatttgacccgggttaaggatgctaaccaccctggatatccagacccatcatttcttaaattatttttgaacttcaagcccaaacacgtgcatgatgtccaactgcttgaaaggatgtaaagctgatggttttgacattgttttcttttcttatcctggaaggtatttgatgtacgattgaatggccacgtcgtggtgaaggacttggatatctttgatcgtgttgggcatagcacagctcacgatgaaattatacctatgagcatcagaaaggggaagctgagtgtccagggggaggtgtccaccttcacagggaaactctacattgagtttgtcaaggtaattcccctattctgcccattgctgaagagagtgggtacaggggaagttgtttgctgctgtgtggggttgaccactgtttcccttttcctaggggtactatgacaatcccaaggtctgtgcactctacatcatggctgggacagtggatggtaggttgtgttctgacctgcttttttgacttgagtggagggatatggttgaggaagcccttgggaggtaattgagctgatgactattttggaaacacttaaagctaaattgtaggggattcagaatcagttggataaggatgaagcataacatggtactagccacaagctttggagtcaggtctatgtatatcttgttgctgccatttaatcagatgtttgtcttggatggatgcttttaatttccctataaattgggattaataatggtacctattggtgtaccctgacctttgtagtcatttgggatcacctaaaacttgtccttattctgtttgtttgacatctctttcctaggggaaaaaaaggtaaaaggaggagtcctgtaggcttttggtatgctctgaaagattccagcattgctggactgcactgggacaaaacttcacttatttatgtctccttatccttgggatcaagtcttagagtatatttctttctcagggtttagattctcctggctgccagcatctcaggctgatttttgcagagaaagctgcgtctttgtgacatttctcccccattccacctctgtacctttccccaactcaatcttgaatgcactgaggatttcatcctgttgtcttgatgtcccccaaatgctgatattatgacatctaggaggatgaatgtcttaccaccaaacagacctgtgttcaagtccctgaggaggaggcaggacagagggatagtgtgtgctgggaacccagaactctctgggtcaacgtttcttcagttgttgtgtgaatcaaaagggaatgtgggcttgtgggaggaggagggatttgaaaaggctaaagtttaggcatt

SEQ ID NO: 6001 - DNA, 6000 bp, Homo sapiens; identical to SEQ ID NO: 625

SEQ ID NO: 6002 - DNA, 6000 bp, Homo sapiens
attgcataaaatattgaagcaaacccatatggtccgctctgcaaaaagccatccagaagtgtcccggaaaggatcaaatgtatttttcagcccttatcagaacactaagaaccactgcagaatcaaatttcaaagtagaggttttgattgtctaccatccttctcttcacaattgtattattaaaatagttttattttgttgaaaacacagactcttctcccactcacactcaaccctctatggcttttggtaactcgattagtctctctggacacacttttcaaataagttgaatgaagcagctgaactataattctctgtgtgttcaattagatagaaatccttcctctgatttcaaagggaattaatgtaaactttaatgttgcccttgctttattagcaaactagttttcaccacggtatattccttttatcatagagtatttgaaacatatatcatttgtttcctttctaagacctttagctaacattagctcaaactacttttattttgcccctgagatagattcacctaaatgatattttccttgctaacctcaacagcctgacacagtatattactttttgagtaactgtcctccttttcatttccaatactttcttagccacatctttaagaaaaggcttttgtaaagccacatagaaaactactagctctttgttttcctttctttggaaattgtgaagtttcatcgttcaattatggggctctaactctctgctccagagacttgactcccatcagtattcattttttttcttctcccatttctagagtctctttattaaattccatggatgttcagtataaaaatcaacacagctaatttctaatctaattctgatacaaggagccttcatgttttttctttaccaattggttacaaaatcactagcagtaatcccaggacaaatgatcttgagaaagatgaatggaagagaaataaaaatgatggctctactgtcttcaagagcattttctagaaaacaaaacaaaacaaaacaaaatagtgttcatcatttttttttttgccaccagaattggatatttcttaatttgaaagaataatataaacaaatgtttttatgaaaaaaaagcttaagtatccatccctaaaaactaaattattcatctcgtagatgattacagtgtaagactactacatgcaagacagatgactgttgtcattttacgtattaaaaaagttctgtatccaggcgcggtgactcatacgtgtaatctcagcactttgggaggtcaaggtggaaggatcacttgagcccaggagttcaagaccagcctgggcaatatggcaaaaaaaaaaaaaaaaaaagaaagaaagaaaaaaaaaattagcccaacattgtggcatgcacctgtagtcccagctactaaagagactaagctgagagaatcacctgagcctaggaattggaggatgcagtgagccatgattgagtcactgcgctctagcatgggctacagagttagacactgactcctcccatcaaaaaataaataaaagttcttataacatgaattaacacccttctacctttaatgctcataggtgaggagtctatggctcactattggcttaaatggatgagatgatgggaggaaacccaataacccagaaatctggaaaaaaaaaatagtagtagcagaagtagcagcaatgataatgataaaatgataataatagtcattaagttcttgctatgtgcttggaactagcactttatgtgcactgctttttttaatccagaaaaaaaacctaatgataaatgttgtattcttatgtacatattttagatgacaaaactgagacttggaggggttttgtacatttttcaaggtggcatagccaattagtggtgaagctggaattctacccaaattctgacaccagaaaacatttaattaattatctgtcctgcaaagagaccaaaaagtcagtatcttgagaaacacagatataaagtgaaaagaatagtaagatctgcatctatataaaaaataaacaaaaaaatagaaaaatttagagaagtcaattatttttcttttttaaagaaacaatcctgggtaatgatatttataaatagcttttaccagacaactactgtggctactaaagatataaagtttaatgatgtatgagtcttaattaaatgtaactctttttttattatttatttattttgagacagtctcgcacttgtcaccctggctgaagtgcagtggcgggatctcggctcactgcaagctccgcctctcgggttcacgccattctcctgcctcagcctcctgagtagctgggactacaggcgcccgccaccacgacgggctaattttttgtatttttagtagagacggggtttcactgtgttagccagatggtctccatctcctgacctcgtgatccgcccacctcggcctcccaaagtgctgggattacaggcgtgagccaccgcgcccagccggattaaatgtaactctttagtatcattgatcaaccaggtaattctggcctttccaacaacctgcagaattttcttgatacctctctcacgttaagtattctttctgtggtttacagaaaccttggctaagtttccacttaatgaatttctagttctaatgtccctaattcccactcttgccataagacacactttcctcctcagtgccccaatccaatttagtttctattctgatcctgtagcctaaaatagatggcaaaggaagcatgaaagtagtaaatagatgaatccaataaaaaaggaataaagaaaatattgaaaatgagatcttgatcagagcaaaatgtgaagaaaaattaataacacttttttaacgaagaaagaggaaacaaaacattaaacagattttgtaaaagttctgaaaataatatttttaaaataccatacaatcaggggataagttaattctcaacagcaaaagtactctagatgtaaaagtacttaagaaatggaatgataagagtgacaaagagctctctctttgtctctacagaacaattgacccgatcttccttttaataaaaatgagtctgcttcaataggcaaagagatgatacacacttgcggcaaagtataatgttgtgtcagcccagtagatccaggaggacgtcttcaacacattcccaagagcttggagagaatttaggaataggagggagagttaaaatcttagtatagctacagtcaccatataaatagagtcttcttattatttatgtacagaaaatgttatcaattctaaagttaagcacaatatacatgtaaagcccatttcttattttaacctgcagtctccctcaaggaacattgggttacaaacttctgataccattcatgttgccaaggattctggccactgaaatagaaagattgctaggtaagatgtgaagtaaacaggaaaagaaattgactaaaatattaatgacaaaatcagtgtctggagcaaaaattttaaaatctgtatttgtattctattgactaatttattctaaaataagcatactttttttctacatgcagctattggtaaataggataaatgtgccagttttaatcactggaatctagaaagtatgctaggcatatatttagaataaagatctatattaagtggatattataataatcttctcatccaaagatatttattggacaacaaaattacagggttacttaattcttcttcgtcttctcttcctccttcttctccttttcctccacctcaccatcctccttctcctccccttcctcctcctccaacttcttctactttttatcctgtcgtttttcttccttctctgtcttctcctcctcctctccttcactaaataactgaaataaaatttagaccaaattcttttatcttatttctccaactatgaaatgattttaaaataaggtttggagactattttggaaaatggaaagtgaatatttacatgaagtcacaagtctggggtgcattattttcacacttctacctctaatgttaaacttcctattattcaagcatagcccaaatacaagtgtttgtcacttagaaggatatatttatatcacgttgccttcttttcccgtatacttagaataaggatcttaatcttaaacattacataagtagaagagatttaattaaaaacttgaagaaatgtgttactgttaattgaattcttgctacatttacctttgcacaccaatgttaataaaactccagttcaaagtggatgggtttggggaattgagatagctatttatttccctacctgagatgccaagataatcttctcagtaaaataaagaacccaattaggagagttctcatttgtagctattgatcaagtttacacaaaatgctaggatttctaaataaaacaaataagaggttcaaaggcctttaaacgaggttgagggagggagaaagggaaatagttctctccgttttgaaatcctttcacctgtggagcagataatggacgggcccctctcccagctgggctccgctcccgcccctagcctggcgcgcggtcccttcccccacccgctgagccttcctgttcggtatttcggtattaccaagctataaattgcctgagagcttagagacaatcaggtcaccaccgccctcacaagagaaaagcttcttacttccgagcagaacggttcagctgggaagagaggaagcagggagagaatctatgctttagtcgtcactgctctggcaaggggtcgagagagatgggggagggaggtggcaaaaaataaaaatgaaaaaataaaaaagcatctccaacaatgttgcacttgacccaagtgtacaaacttattggtcgctgcaatggaaactcccagtgcactctccacggcctggcagccgccgctgatgggtggagtcgcgctcccggccccacctatgggacggagctgcttctcccgcatctcggctccaccgcacccttcgcgggaagtccccaggcttccagcaaagctcagcttatcccgcccccgcttccaacccggaaccccagaagaacagcatgatgagcctccggcagccaggtgggccacctccccgcggctcagtttgaggacacttgtgcggaaccctttcacatccccaccctacccagctttcacaactccgccgggttaaatggccaaagacaaacttctacctctcctgtccccggtcccagcttttcaaaaacccacagctggcgaacccacacacatcgaaactcctaggtcgctgttgcagtctgggcatgctcagtatcagggtaggttttgattgagagtaaaaaaaaaaaaaaaaaagctttgtattatgctctctttctcctgtgcatactgcttgctgaacagcttgtggggcattcctgagtctacctagaggttttatcagacgcccttgattgtgtctccttgggatctgttcccctcttacttcaccccctcccccaacccgcctccaccccgcttcccaggtccctgtccgctgtggggatggagagacactaacagaactgggatgggcgatgttggctgaacggatccacctattattagtgcgcggggattggctccttggcgcagcgtacccgaggtggagccaatcaggatgctggggctcggagatgatgggcggccgcctcctcactggagggattcctggagaagctgcagtgtggggatgctctagaccgagtactgcccccagtgtctttccacctcctcctgcagcagcggcagcggcagcagcagttagcagcggcaacttgaggctgcaccccgggcaagtccccagggtggtgctcagccgagaggggggcttggcgccccgaaggggtgtgtgtagggtgggggcgaccacgtgggaccagctggtggccctggaaaacctcccacacacccacacccacacaccccttttgtgt

SEQ ID NO: 6003 - DNA, 6000 bp, Homo sapiens
cctctatctgcagtccagggtctgcacagccacatggtcctctaataggtccaccagaccatttgcctgcaaacagcctcatcctcagtgcccactgtctcctagctgtggagcttggattcctatggaattgggttctgctgaacatacctctttttagcatcagacctacctgtctgtcatcaccatggggctgccagtcagtacttttgcagcctctttataggacattgttgtaacttagggttccctggtagaataaggagcgatgggaaggggagaggttctgcctgcctgaaggaacaggtctgggggaggagagaggtaaaactcagccttttctagttgtcatacacagctgtataaaggcaagcctcatttagcaaaatgattagttgtcaccacgtttaatgctttttgtatgtcataagccctttcatcccttcctggataataagggcaaatgaggaggcattgtgtcattggggggtagtacagcctgagttgggagggagcagtatacctgttttcttaataacctcaaatatcaggcattttagtgaccacacaaaatctcagggtgaaaagttctagaccatcatgtccagcctgcagttagggacacctagcccttccatgacctgtatggcgtggtcttccggttagtgtgaggcagcattttgtctcctttatactgtcctgagaaaacaaaactcacactggaattgagactgtctcagctgaaatatagattccttttcagtaaactgatgcacaattcacaaatagcagtctcaaagccatgaaggccttggaccactcctttggcttcttccctctacccatgtgtcttccatgaacccgaagcagtccaggcttattcactctgccagtaagcaaggagttggatcctggcagagccacgctgcctgtgatctattagttggtgtaactaaaaatctgaggcagcctgaaaacagcttcacagattgagggtttgagtcgtttgattctagacctctgactactccactgagtgatgggaaacaagtcatgtaatggggctgaaccagcactggctcactagccagtgaccacacaagtacgggcaatactgtcatccttgtgtctccctgctccagagctcccttgtcccatctttttcacatcccttggccaagggatcggaaacagctgtcatgctgctcattcactaaggagttccaaacacaagctctttgcctcccttcccacttgagacagcaggaacccatgtgtagtttagaagcagagagagcaggtccagcattttggccccatggcttgtttggtgaggtctgtggttcttggccagcctagtactgaaagggatttccctcccccactcccagcccaagacctcttacctgggtaggtccacgccttcctcagaatcattgcgtgttcctttagtcatcccagtgccattggcgcaaatgcttaattgaaactaaacacacgtgtgattgagatgatacagaatctagcgtagcactcatacccattcctttgctgcctgagacggttcagtggctggcaggccagcaggatcgctgcagggccctgagccccatctagtcagttcatcagccttcagtcctcccgtagcttcctaggttagatgctgatgttcttggggatttctatgatgatttttaaatgtgtgtcagtgggagcaaatataattaactcaccacattaaccaaattaaggtggaaaaaacaataaggtcacctcagtaggtgcatatgatgaaacgcatcttatcacaccaaactaagactataaaagtgtgtctttaacgctgacagtgtgtttacacagagaccatgctaacataacagaattctcaccatttctatgcagtattatactggcattcctggtctgtgtaataggcaagaaaagtacaaaaactggaagagaaggggtatctttagttgtaggtaacgatataaagccaaaggtttattctcagtcttcgtcttcctattttgttggtgctgtcactcgctccctctttgaagcacctcttcacttggcttccacgatcccatacttgctctccctccctggcctctcattcgaggtctttgtagctgggtctttcacaaggcaccaggaggtgaaggctccatagtcctcagccatttctgtctatagttactcccatgatctcttctggtctcattactataatcagtagccactagctatctaaaactacttagaatacctaaaaacacttccttagatgccctagccatattcacttaaagtgcttatccatcacgtgtgacagccacatgaacagtggccacagagcattgccatctttcacagagttctggtggacagctctgcttggggccatctcttcacctccaacgttccctagtttaagtcagtgtcattatactgaatggtattccttgtctcccttcagccaatgcttttgttttttgagatggagtttgctctttcgtccagggtggagtgaagtggcgcaatctcatctcactggaatctctgcccccctggctttaagcagttctcctgcctcggcctcctgagtagctgggattacaggtgcctgccaccacacctagctaatttttgtagacagggtttcaccatgttggccaggctggtcatgaactgctgacctcaggtgatccactgcacccgaccaccttcagccaattcttgacaactggagcttgagaccctccgttgtcttctgttttacttgtcttaaaagccaaatgccccataatgacttttgaggtcttaatgacctgcttctaccatcctctgccattacctgcctcaccttttgctcatgtaaactctattccagccacgttggcactcctttaccattccaggacttgccaggttgcacttccgttctctgcctggtgggtcttcaccaccacccactgggttcacacacatcttttcaggccccatggggccatctttattcaaatgtcaccgccttctggccactttatgtaacagttcatatgtatgtatgcaaattttctatcccccttccctttttctctatagcacttgtgttacttttgcatcttagtctgtctctcccaaaataggggacaagtttcatgagggcaaaaacctgtctgttttgtttattgctatattcctagcatctgtcatgtaataggtgtgcttactgcttgttaggtaaaaaagttcagaaattgccacccagtagtatccatatttgttccctttgtaggtcattaaacagctgatgaaaaaggaattcactctagagttttcacgtgacagaaagtcaatgtcggtttactgtacaccaaataaaccaagcaggacatcaatgagcaagatgtttgtgaaggcaagtatggcagattgcaattgagatgttcttgccagggttaagatcccggtgaaccaataaaacaaaattgtttatctaaatctgtaacatttccagggtgctcctgaaggtgtcattgacaggtgcacccacattcgagttggaagtactaaggttcctatgacctctggagtcaaacagaagatcatgtctgtcattcgagagtggggtagtggcagcgacacactgcgatgcctggccctggccactcatgacaacccactgagaagagaagaaatgcaccttgaggactctgccaactttattaaatatgaggttagctaatgaaaagtttctttgtccacaccctgcacgattcattgtgtttaaacagtactccttcaagcaaaaggtcaaacagttctcacttttgccaagaaagaggtgtggttatttgtttttctgcctgccagctgtgtcacccttaaaatttgctgcttcaaacatacatagttaataatttcataaaagtgttattttcaaagtagaatattttcaaagtagaataatcaagatgagcttaagcttgtaaaccccattttgcctctcatctaaatcatgattttttttaaattggtgacatttctagaatattcattagttactgaaggtcaaaagatccaagttggagattacttccacttttctactcagagtagaattcttttatatcaaggatgtgacatcctaaagctatgaacaaaatgaagaagctttggtactgtgggctcagaatagcacaagagttaaagaatggtttgataacgggtgtagtggtatttttttttctcataagaaaatgcaaaaaccgccaggcacggtggctcaaatgcctgtaatctcagcactttgggaggccgaggctggcagatcacctggggttgggggtttgagaccagcctgaccaacatggagaaaccacatctctactaaaaatacaaaattagccaggtgtggtggcgcatacctgtagtcccagctaccctggaggctgaggcagaagagtctcttgaacctgggaggcggaggtcgcagtgagctgagattgcgccatggcactccagcctgggcaacaagagcgaaactccgcctcaaaaaaaaaaaaagaaaaaaaatgcagaaacctgtctcaatgtttaactgggcatttttcaaactaggggacaaaaactagaacttgccacttttatttaaagtgatgctcttattttagaccaatctgaccttcgttggctgcgtgggcatgctggatcctccgagaatcgaggtggcctcctccgtgaagctgtgccggcaagcaggcatccgggtcatcatgatcactggggacaacaagggcactgctgtggccatctgtcgccgcatcggcatcttcgggcaggatgaggacgtgacgtcaaaagctttcacaggccgggagtttgatgaactcaacccctccgcccagcgagacgcctgcctgaacgcccgctgttttgctcgagttgaaccctcccacaagtctaaaatcgtagaatttcttcagtcttttgatgagattacagctatggtgagcatgtttgaacatgtacaggtgactcaggctacacaagcacatagtagcctctaattttgaccactgaatttttttgtcatagctccctaatttggaatttgtcatgatttgggtcttttctctagaattcggtgaatcagtggttagcatgttgtgtgctacttgcagggaagatcctagagtcgtttaaaacccagaagggccttccagatcagtcccagaggaacaatctggtgatctagtctcttttttaaatgagacgtgtttttattgtaagttttctgaaaattgaggatgtaatcagtcagttgtttggatcaccctgcttttaagttctttaagagctggctattgatgaagcatttccagtattcttcccctcacctgattttcacccagatacattatgttaaatttactttcttctcttttaaaaaaaaatcttagttttgaaacatactataagtgtactctcctctcccccagaggtaactgaagttggaatttagcaaaaatattaaaaacatgggagtgctgtttttgtgtctgtagacagtattatttttgcatgcttttgaaggcatattttttggccgagtgcagtggctcatgcctgtaaccccaacacttgggaggccgaggcaggtgaatcacttggggtcaggagttcaagaccagcctggccaacatggtgaaaccccgtctgtactaaaaatacaaaaaattgctgggtgtggtggtgggcgcctgtaatcccagctactcgggagattgaggcaggagaatcgcttgaacccaggaggcgtgcagtgagccgagactgcgccactgcactacagcctgggcgacagagcgggactccatctcagaaaaataaaaatttgcatatttttgcaatctgcatctttctacttgaaatttatccatgtggatacaagtgcttcctcttgactgccacataggttgtgttttt

SEQ ID NO: 6004 - DNA, 6000 bp, Homo sapiens
ggagtgcagtggcatgatcttggctcactgcaacctccacctcctgggttcaagcgattctcctgcctcagcctcccaagtagctgggactacaaacgcatgctaccacgcctggctaatttttatatttttgtagaggtggggtctcgacatgttggccaggctagtcttgaactcctgacctcaggtgattcacctgccttggccccccaaagtgctgggattacaggcgtgagccaccacgcccagccaagaattgaggtgctgtagactcgtacagatttgtggctacaaacaattttatcaagagttcctaaaagcgtatatctgggaccaggtgcagtggcttatgcctgtaataccagcactctgggaggccgaggtgtgaggactgcttgagcccaggagttcgaaccagcttgggcaacatcgcaaaagaccccatctctacaaaaaaataaaaaaattagtggggcatggtggcacatgcctctagttccagttacttgggtggctgaggtaggagtatcccttgagcctgggagatcgaggctgcagtgacccatgattgtgccactgtactccagactgggcaatggaacgagaccctgtctcataaaaaaaaaaaaaaaccaaaaaaaaaacatagatctagcagcttcttacagtacaaggtggggggtacaagttcagaaggcaagaactcaagagactttctttctttcttttttttttttttttttgagacggagtttcgcttttgttgcccaggctggagtgcaatggcacaatatcggctcaccacaacttacgcctcccgggttcaagcgattctcctgcctcaccttcctgaatagctgggattacaggcatgcaccaccatgcccggctaattttgtatttttagtagagatgcggtttctccatgttggtcaggctggtcttgaactcccaacctcaggtgatccactcacctcggccttccaaagtgctaggattacaggcgtgagccaccgtgcccggccgagactttcatttcagagtagcaatcggttgagtgccttggcttgtgccaggcatgaatctgtcaaaaataaaatcagatcaagttaaaatttcaggagttgattgtgcatacaaaggaagagtctgtgaatcgggagattacaagattggcaagaagtctgaattgacagcagttgtagcacaagaggaagtattttgaccctttacatgattggctgatatatattttttcaaaggcaaatagagctgcttaagctggtttgtctatggctgattggtttaattctgtggaatcatgctaataagggaagaaaacttattcttgtgctttgtttatgtttagagttagcattttggaaaatcaggtgctaaaattttggttatgtggctatggtggttggtctcggagtatctaaacaattgtttcagctctttatcaattctaatgactttattatatgcattaccaccttctcctcctcttcttcatgcggttttattaccttctttaatcctcacgtctgccctctgaaatagaaactattccaggccaggtgcggttgttcacacctgtaatcccagcactttgggaggccaaggcaggtggatcacttgaggccagaagttcaagaccaggctggccaacatggagaaaccctgtctctactaaaaatacaaaaattagccaggcatggtggtgcatgcctataatcccagctatctgggaggctgagacacgagaattgcttgaacccaggaggcagaggctgaagtgagccgagatcatgccactgcactccagcctgggcaagagtgagactctgtctcaaaaaataaataagtaaaataaagtattccagtcatgtgctacataacatttcagccaatgacgaaccacatacacgatgatggtcccgtgagattataatattggctgggtgcaggggcttaggcctgtaatcccaggactttggaaggtcaaggcgggaggaccgcttgaggccacaagttagaggccagcctggacaacatagtgagaatctgtctccacaataaataaataaataaataaataaataaaattttgtgtgtgtgtgtgtgtgtgtgtgtgtgtgtatatatatatatattttttttttgagactggatctcactctgtcacccaggctagagtgcagtggtgcgatctcggctcactgtaacctctgcctcccgggttcaagcgagtctcctgcctcggccttccgaatagctgggattacaggtgcgccccaccatgcccagctaatttttgtatttttagtagagacagggtttttccatgttggtcaggctggtctcgaactcctggcctcaagtgatccacccacctcagcctcccaaagtgctggaattacaggcatgggccactaggctggccaatactgtgtttatactgtatctgtgtttagatacgcaaatacttaccattgtgttcaactgtctacagtattcagtaaggtaacatgctgtagaggtttgtagtgtaggagctatcagctataccatatagcctaggtgtatagcaggctatccccatctaggtttgtgtaagtacactctgtgatctctgcacaatgacaaaatcgcttaatgatgcatttttcagaacgcatccctgtcattaagtgactcatgactgtatctctatttcacaactgaggaaactgaaactcagcgaagtacatcacttgcccaaggccacacagtgggtaaatgggactaggcatgggatgcaggcagcctgtcttagatcccacgctcggatcccataccctgcctccagggtctcagactttacgttttactgaaaagacagcctaattcatgagcagctggatctcagaaagggagccaagctccttggtacacagatggcccaaccacgaatggtatctgaagggctcaataacaggagccagccgggtatcttcttcaccctctggggtgaccaaagacacgaaggactgagagaaagcctttagaggcctcccccaaaatttaatccgtttttgtgattgtttctcctggactagactgccttgaggataaaataaacatgagcgcctggtggcagtgcaatacctgagtggtacgtgggctctgcaggccaactgcctggagggaggaagccccatcaccactacttgtgtttctgttccccatttgcaccacacccctcctttgagggtaactgaagcctctgagttgtcaagatccttaaaagatgacagtttgagagagagaatagtagaattagaaaccccaagaggccaggtgtggtggctcacacctgtaatcccagcactttgggaggccgcggaccccgaggtcaggagatcgagatcatcctggccaacatggtgaaactcggtctctaataaaaataaaaaaaactagttgggtgtggtggcgcgcgcctgtagtcccagctactcaggaggctgaggcagcagaatcgcctaaacccgggaggtggaggttgccatgagccgagattgcaccactgcactccagcctggcgacagagcaagactctgtctccaaaaaagacagaaaaaaaaaaaaaaagaaacaccttggacaggaaacatgtctatgggaggaagtaaggccagatgcttgcaaaataggggggaaagtgagaccgggagggaacacttccaaaagttacccccatggggtctgaatttggggcctgggaaggaatttgggtgcatttagatccaccactgatagtctctattttggcaccctgttttgttcccgtatagcacttaccactgttctaactaaacaattaatttcattatgggttgtgcaaagtctatgattctcatgcgggaccccaggtgtgttttttgttcatgtagcacaaagctcattgcctaagtagtaggtaggattggtagataaaatacaagaagtccagttgtttaaattttaataaacaatgcatttttttttttagtataagtgggtcccatttgcttatctgaaattcaaatataactgggcttctcctattttatctgccaaatctgacaaccctggtagcagggacttgatacatttttttccttttagggagaatttctaaatcgaccagtatttatggaaaatgcataagcgtttttttgttttttttgtttttgccttgactctgccctacacttgcggtgcgaccctttggcaaaattcagtccctttctatgcctcagtttccccatcggaaaaatgggagtttgaacagcgaccgaagcgcagggatcgccagtgtgggagagcgccaggtgaactgtgaaggagcagggagggagttcgggccgtgcccgtgcgggacaaccccggtatccactctgggcaccgccggcggcgactcccgccagcgcctagggtgcctcggtcccgcccctacgcagcggaggccggccagaggccgtcgccatggagacgcgagcagcctggcacccactcgctctcaaagccacgcgtttccgctgcgttggagccttctcattggacggccgtctggacgctaccacccgccccgagcccgctaaggggagggggcggggccttattctcatgggattcgttccctggagacctgtgtccgcggcctctctgggaaagcatgggtcctctccctcacgcggggaaaaggactgcgtctcttaggtctggagagtgtccattgcttctcctactagaatttatgctcatgctgctccctgagaaaagaagagggggcgggaaagtcggccacgccccctccagagcctatttggtctcaggagctagagcaccggaagtgctggcgacatgtcagtgcgccctaccctaaaccttccccccccaggccacctttcccattcagctgtgggattccggggccgcctgggcgctgcacccgccacttccgcatcgaaccgccgcttcaaccgaactcactccctctgcgcgcgctccatctggtgcccgactgctgggccggcgcctgggagaagccacgccctttcccgcgcctgacagccaatgagcgggcgcctcccggcggggtggtgggtaattaatgagggccgggcgctgattggctgcagcgtcgtggccgggggcagggcggcggggtaggttgttcctgaggtgggaggcggtacccgtggctgagaagaaggaggcctgagagcgacatgtccccggcggctcaggcggagcggcccgtggcgctgtttttctgagtccggggtggcctggcagccggccgaggacgagggtcggcgggggctgcccccgtggtggtggccgccatgctgggagcctgggcggttgagggaaccgctgtggcgctcctgcgactgctgctgctgctgctgccgccggcgatccggggacccgggctcggcgtggccggcgtggccggcgcggcgggggccgggctgcccgagagcgtcatttgggcggtcaacgcgggtggagaggcgcatgtggacgtgcacgggatccacttccgcaaggaccctttggaaggccgggtgggccgaggtgagagtccccctgccgagccgcgggatccagggcctgctgtgctgggcgcagccggccgggggctgcgggccccgagcccctttcgaccctggggccgcgtctctggagcgaagtttctctctgcagcttcttcgggggcccgctctgagctcagggcctggcactggctccaaggtacctagagtcatacaggcagagagttggccagaagttagttatatttggatttctcatcctgcattttctcaacccctcactcccatccaagctgggagagaaatgacgaaggcggccttttgctacctccaggcctcgcgggttgtaggtcatgggtgcccctgcttctcctgtcgagacagttcttgggagattctcgtcgacccagga

SEQ ID NO: 6005 - DNA, 6000 bp, Homo sapiens; identical to SEQ ID NO: 624

SEQ ID NO: 6006 - DNA, 6000 bp, Homo sapiens
aaaaaaagaaaattgcctgtgctggactttcttttagaagataatttaattttctattcaataatatttttcttgataatttaattgtctattcaataatatttttcttggtatatttcaggatgctgaattccactttaacaaactaaatgactgtgtctctaaaattaagtactatgtttcctttcagtaagatgacttgtgtcttccatttactggcaaatagattcaaaagaaaatcataaatacttcttcagtactgatttaattgtttaatgatgcttaaatgttattagtagagtagaccagtagaaggaaccttggatcaggctaaatctgtgtaggaccaatcacttaatcctgggaaagccacactccagttacttctgtaaaataagattgagttacttttcagggttgtaataggaattgagaattttctccttaaatatcaacaacagtattttggcacaaagtaggtgcctaataaatggaatcattagtattagccccttttggtgttattttatattaatatgtcctttattttagtggtttttcaaactgcaggtatcaaatcatgagtggattgtgaaactaatgtacacaactttgagatacaactagaattttttagtgataaagaatagagtagaattgaatttatccaagtatttcacagaagtgtttttatgcgaaacttctcttcagtatataatatctaggcagacagagtgtatatactggatgacaatgtaaaataacctcttaactatgggttgtatccaaaaactcctccaaaaaacaggattatattggatacttgtctcatagtttccaagtcttttgatactatagtggctaagacaccttggttcaaatcccaactccattaattactactatatgactttaactgcctggcttttactgtataacctcctatgacttactttcctcacctatgaaatgggtgataattattaacgagaataatatgaaatattatatgctttaatatgtgtaaaccacttagcgggtgctcaataactgttagcttattttttaaagactgagtagaatatctttttttctgaataagcaaactatgtacataaaagaatataaagtcatcaggctgggcgcctgatggctcatgcctgtaatcccagcactttgggaggccgaagcgggcggatcacttgaggtcaggagtttgagaccagcctggccaacatggtgaaactccgtctctactgaaaatacaaaaattagtcaggtgtgttggtgggtgcctgtaatcctgactactcaggaggctgaggcagaattgcttgaagccaagagatggaagttgcagtgagcagaaattgcaccactgcactccagcctgggctacagagcgatactgtgtctcaaaaaaataaaaaacaaaaaatgaagtcatcacattagccaggactgaataatcagctaattttttcatccacaaaatgatgcctcctgataagcattttatttccataaatatgaattttcaagaaccaagtaactattcttaggtttgctatttacaaacaatattatctctcaagatatgaaggaataaaaataaaacactaggcaatcccttagtctttgtcagtatattagatcctcaattacccacaacatttttgtattttatgatttttttaaatttcacagtggtatgcactaagtaaaaagaactttgtctatatttcttacaatctttttttgattaaaaaataagaattaacagggatgatatcattggctggtaagagttaaaagcttatagctcttacttttctgatgaacaccttccaagggtattttatgtctatagaggattggtttggaaattatagaaacattctttgcttcccttaaaaaaaagctgggtaactttaagaacattttctaaatgttgaccctgtttagcaaaagtcttattgttcctatagtcttttatgtctttcaaactatatgtagaaattttttatgtacaattataagctggagtaaaatgaaaactatttagcaactcaagaagtgaaggaggatccagctatcagtacacacaaaggctagaaacaactgtgtaatcacttgaaagtaggagctgaacatcagtctgaatgaccagcaacaatatcccacctctacaactggacaaaaattaagcagaaacatagttgagcaatatacctttaatgtaatgatggagctattgtacttagctattttcatttaactcaatcatttcctttaaattctacagtaagccataagtcctcaaatatcttcaactatcctgtacagagataagtaataatgtgtgtcacatctggtgtttctcacagcaaaggaaaaattaattttttgaatacgtgcctgtaataatgtgtgtatatgtgtgtgtgtgtgtgtgtgtgtgtgtgtgtgtgtgtgtacaattttagtctggctgactcaatgaaatacagaagttaggacatcattaatatcaacagttttacccaagttgtatcaacagagcaaacaaaacttcaaagttttccagggagatgagctcctaaactgaacaaaatcagataatcagaaaaagcttctgggacgtgacttgagttggaaacaaaaaatttccacattctggacaattctgggaggccaagtgctattagagatgtgtggataaatcaattgatcaatcaattgattgatccactggtagtctgttccattgatccactgatctctggaacaaactaatatgccagtggatcaattgaacaatggagcaatggaacaaattaatatgccagacactatgctaatttttttgcataaattatttcatactcataaaaaccttacagatttggtctgattatcctcattttacaaaagaagaaactgaaaaacgaagaagatctgagccgatatctgtccaattctaccctttaggattatattggtagctagtaatggaaaattaaaaacttaaaaaagagaacaaggccaggtgcggtggctcacacctgtaatccaaatacttgagaaggctgaaaccagtaggatcatgcgagcccaggagctcaaggctgcaatgagctatgatctcgccactgctctccagcctaacaacagagcaagaccctatctcataaaagagagagagagaaatagtcaattataaaataaaaattcgtatctatgtatatgtgttagcctcagccatgatctcctggaagtagatccaaaatctctggattttgattaagattttaataagaatcttatgcatctgagattattctattttcaattgtactttcactaaatatgtaactatgcatgaccaactcacaaatcgtttgcatttctttcttttttttttttttttttttttttttttttgagacagagtttcgctcttgtagcccaggctggagtgcagtagcacaatcttggctcactgcaacctctgcctcccgggttcaagctattctcctgcctcagcctcccgactatctgggattacaggtgcctgccaccacacctgactaatttttatattttagtagagatgaggtttcttcatgttggccaggctggtctcgaactcctgacctcaagtgatccgcctgcctcggcctcccaaagtgctgggattacaggagtgggccaccacgcccagactaaatttcatttttaaaaaaatcttgtttgctggttatctccacgtctttgcaaattaaaaggtttttataagttcgtctactttcctgttaagaacgtgaagtgaatcctgtccaggcctctttacttatctatttctgccccaaatcatgcccattctttcctcagaaagcctgaaatcttaagttctgcaggaaaattacaaagtctggaatatttttagaatggagaatattcgttcatttctactcccttagaataccttccttacatttgtaccttcacgtgttctaagaaaaatccaggaagggcaggttttagttcttcatatttcagaaggtggataaattaggatgtcaaatgccctgttaaagtttatttaactagtgaagaggatgagaactgatgtcttctgaattcacagctgtttgtattgattactttattaattattttggcatattttggaggtaaacaaatacttaaaataattgaatacattaataaaataaaatattctaattaaataagctaaataaagtaaaatatctaaacttataagttatgtttcattagcagcaccttgatatatatagtcaaccatgccacatttatagtgacttaaataattacccagcaagacaagtaaattattgatcagagtattgtttacaataaatgtgaaaaaagtgactggggtgaaaacttaccatcaataaataagattcaagaaccaattactgtaatatattcataacatcttagagtatcaatattatgaataatattacttataaccatttttaaagtcactagcattttgagtacatgttatcatttatcaacatttccaatacaaatattttatctctttcttccttttagaaaatacaaaatatttaaagtataaagcatgtatttcatcaagaattgtttcatacacgttttggtaagatatgggttaaaagttaaatctacacagcaaataattggctgtataaataactaatagatttgacagtatacatagtattgctggaatagaatgctattcagtaactatgtctggtcttaccttctggggaagaactcttcactcgctgtggttccataaatatttcatttaccaacacaaagcaatatgctaatgatggactatttacccagtgagcaggtgccacctctgatgttgtttcatctctgggatacctttgatgtgggagcagttaagccattttgaattgttctgtctttgcttccctcccctcacagcttcacctgaacctaaaatggtgagcgagagtcaccatgaggccctggcagccccgcctgtcaccactgtcgcgactgttctgccaagcaacgccacagagccagccagtcctggagaaggaaaggaagatgcattttctaagctgaaggagaagtttatgaatgagttgcataaaattccatgtgagtattctatattagtacttgagtaaaaataagtggttgaaaaataccccatccattggaaagaaagtagaactccgtttgatatactataaatttacatttaatttattactatgggaatgatagtatcccaatataaaatgaaatattcttggaaatggaatattcttcttgtctttaaatatacttcataaatgaaaatccagtttacaaaaaaaaaaaagtctgcagcttgtatttaatacaggtaggttgttttctttggtgtctgtttctctcaagaatattaatgtttatgggttctgttatatttattttggatttgcatttatgaaattatttcattgcaaagattgtttctgaacaatagctaaggtttgctttcccaatatcgcaggtttgattttctgtcattcatttgtcatcatttaaaaatcttattgttattttttaaagtttccttattgtcattaaaaaaaactgcacctaagtttatttggataagtatagcactaagtctaatcagtgacatttaattttttaattttatttttacactgacagataaaatcatactattgtacaacatgttggctatcattaataatatatctatggtgtattccagaaaaatgttgagagtgaatataaagtgttctcaccacaaaaataactatgtgagattatgcatatgtcagttagcaggattcagttattccacaatgtatcaaaatatcatgttgtagacataaacatcatgttgtgcaaaagatctctcgaacttatttctcctctgtaactgaaatgtattcttag

SEQ ID NO: 6007 - DNA, 6000 bp, Homo sapiens
tataaccttgttcatcctccagtatacttgaaaacatctccagattacttacagtacctaacgtaatattataaatgatatgtaaatagttaaactgtgttgtttagggatagttaacctgtgttgtttagggaataatgacaagaaaaaaatgtacatgttcagtacagatgcagttattttttccatctgctgtttagttgaccgtggatgtggaacccacaggtacagagggctgactaaaattgcttttaacttgctttattctgtgtattcatcatatatatttttgtttgtttgtttgttcttgttttgagatggagtttcactcttgttgcccaggctgtagtgcaatggcccgatctcagctcactacaacctccgccttctgggttcaagcaattctcctgcttcagcctcccaagtagctgggattacaggcatgcgcccccacgcccggctaattttttgtatttttagtagagatagggtttctccatgttggtcaggctggtctcgaactcgcgacctcaagtgatccacccgcttttgaaagcctcccaaagtgctgggattataggcgtgagcccccgcgcccggccatcctatattttttgaccatcatttgataaaataaataatttaaacctgctgttagaaaagtaacaactgaataaataatgcaataattatacagctggattattttgtataattcactttccttaggttttgcttaaacaacttggtacaagtctattccaaaaggtacacatgactcatacagagtagacatttgtcacatattttattcggctcattaattagcaagggaatctgtatttgaggaagtgttcaatattagaatattagaatagggattgctaggttagattacaaaactaatgtcttacagggaaacctcatataacatgagcatttatttagtaacacagtgttacattttcctagaatgggcttgttaaataatgcttctgtatgatattgaaagggtgtagttatcttggcctttttgtcaggttttagataattatttttaacatcggaaattgttttataatcagttaagccctgtgaatttttatcttgccaattttaagctcatgatgattttttagatacaggttctccctcccccgcaagctccttgtgaagtccaaacccacatttagaattgacagaactggggtgttccaactttcaaagtggaaagcttctaggtttgtcttaggtttctccaggatattaaggtgtttgagctacttaagttcttattttttggaaccaaaaggttggatgaattggctaaaagtcagttttgtcatactggttgtttcaggaagagaaagggaattttcttatttacgattttgtgtctcacttagcctgaaagctttaattcctcagaatagtctttatgtctgtgaaagtaagccatgtgtaaagccatgtgtaaaattgtaatttttaaaatttcagtttcccagttcactataatttttttttgttcttttctcccttgaatggcttggcttaaaatgttttcttataataaagaaaaagcctgcctgttctgagtgaagctctacctcacaacaggaagctggtgctaattggtattctgcaggaggcttcttgcagtggtattgcataactgcccttgacttaggaagattttcatcctgcatatcctaaatggttgacttgctcacagtcaaaaatgtctaagtacatttagatttagctaatgtagattcagattctgaatgtcttttagaatattttgggctttggtatagactcaaagaatttcacatttttggctgggcacagtggttcacgcctgttatttcagcactttgggaggccgaggcgggcggatcacctgaggtcaggagttcgagaccagcctgactaacatggtgaaacctcgtctctactaatattacaaaaattagctgggcatgttggcaggcgcctataatttctttgggaggctgaggcaggagaatcacttgaacccgggaggcggaggttgcagtgagccgagtcgtgccattgcagtccacccagcctaggcgacagagtgaaactccacctcaaaaaaaaaaaaaagttattttaaaataaagattaactaatttccttattgaatgtgagatgaattgctctgaaaagatgtgtttttaaaacacaacatagctttgttgttgctgttattacggagttttgctctgtcgcccaggctagagtgcagtggcgcaatctcagcccactgcaacctctgcctcccgggttcaagcacttctctccctcaacctcctgagtagctgggattacaggtgcccaccaccacgcccggctaatttgttatatttttagtagagacgggtttcaccatctttgccaggctgatcttgagctcctgtcctcatgatctactcaccttggcctctcagtgctgggattataggcgtgagccaccgtgcccagctcaacgtggcctgtttaacttgagttttacattttttaaattccccttagagaatgatttgatcagattattaattgctcatatttcagagaaagcacgagaaaatatagttttgacatcactttctgtaattttttctttttagaggaggttttacaagttttcatttgcaatgaaaacacaagcctaaatcttacttttccaaactgggcttctgaattataatttgtgaatgcaaatcaagcagtggaaaaattatctttaagaaaatagcttatgtcgctttaaaaaataaaattaatcctttcctaagcatgcttccatctgtattgtctagggaacatcaattcattcagctctgcgggctccttactgtatacatatagttatgcagcttcatagaacatgagctattgccacaataaaaataagtgggaaggagcagagaagcagtttgtcttattttactcgggaaatgtttatgcaactctgaaatgtgagtttattcttcccaagcttttgtgcttagctctaaggcaggactacctaataccactctcacagccagccatttgaaatttgggattctgagcaatctaaagagtaacttgtctctggaactgaccttttgctgaccgggagtcctcataacttggattttgtgtgggttgttgtgtctttggtgccactgctgctcattcattcagcacctcagtgatgctgtttttcatactgttcgattggtcgggggtgtgatgggcgaagcagtctaatataattaagctagttagggtaagggacagtactgctgatgctgagtgagcctcagtgagttttattaaagttgttttcgtaaatgaaagaggttgtttgcctttgtcctaagctaacaaaggtagtttatttgtgtagcattttttaaaaatcccttttaaatactctgatgcgctctccccctacagatgttcattctggacagagtggaaggtgatacttgttcccttaatgagtttaccataactggatcaacttatgcacctattggagaagtgtgagtaaccctcctcctcatttaaaggatctggtgtggcagtttagtatttgtattgatttgcagcatgtctacaaagttaagacagctttctgaatgtggctcaagtcaacacttattactaaagtagtaaatgtttttaaaacaaaaactttgaaagatgaaccaaaggttataatccagtcatctttttgcatcttctgggctccaaactttcaagagggatttgtgtttgttattcactgtagccagtggtggaagaattgaattaagaatttctggtctttttactgattgatttctgataccagagatgcattctctcttttgtttttgtctaatattggctctggcatcaaattgtttggaattttttccagtatgttgtcccagaaattctgttttcattattaaacaattgcgggggggcagggggcgggaggaatcaatagtggcgaccataccctgctctaagagtgttttctctttgggcaggcataaagatgataaaccagtgaattgtcaccagtatgatggtctggtagaattagcaacaatttgtgctctttgtaatgactctgctttggattacaatgaggtaagtctcttcataaattagaaggaatggctgttcctagttcaagggtggggtgggtggaatgaaagtctagcctgccttcctcccttttgaaagtcaagggtgcctgattttgtttcccccttccattcagaacctgatggtggggccagcatgacctcaccaaagaaagctgagagcctttcacatatcctctgtgactgagcattgcagttagttaacttaaagttgtagtatatgtgatgttctttctgttgatagcatacttactataaatgaataaaacccaggatagaaaatgctttcctgaaagcaaaggatatagtttctgtctcaaaggtaagctagtccctgtcagagacagaatgtgaactcttcagaatgataagcagtgacatggaattacattattatgtgaaggcactctttgaattaatagtgtgatcagtggcttcttatatttgggtgaaataataaatactgtgtttgatgtcatcttatatttaagggaaatgaaaaacctacttattagaataagatcacatgcacacctgtactttgagtatgtttttaattatctgggtcacctgtttcagaggaggataaaaatggccttacagtgttgtaatagaggacagattgtgcttttgtggaaaaaaaatattaaagataaatttatctgtgtacttctcccttttttctactttctgtgcctttaaccaatacaggcaaagggtgtgtatgaaaaagttggagaagctacagagactgctctcacttgcctagtagagaagatgaatgtatttgataccgaattgaagggtctttctaaaatagaacgtgcaaatgcctgcaactcagtgagtatttgaacctggtttattgttcatgctgcttatcagtcgtactatatatacttagtgtctgcactgtcctactctcttagaaaactaattataccttatctcctcaaacttacagtatttccttccccatattcactctcaggtaagatgctcttcctgtgtatttgaccaggaaaataaaagcaatcaatagctaatttccttgagcgaccctctgggcccacaggggctgccttctcccatagtgctgtgaacagtgttcttgctcctagcagaagccacctcctcccaacatctttgctgcattattgatttccatctctactagatgttcttcagcatagggggaaataatagtgtctttctatcttgaaactttcctttgaccttatttcccctgtcagctaccacactttcttttcctgttcaattaaaccttttttttttttttttttttgagacagagtttctctctgtcaccagattggagtgccatggcgcgatcttggctcactgcaacctccacctcccaggttcaagcgattctcctgccttagcctccctagtagctgggattacaggcacacgccaccacgcctggctaattttttgtatttttcgtagaaaggggtttcaccatgctagccaggctggtctcgaactcctgacctcaggtgatccgcccacctcggcctcccaaagtgctgggattacaggcatgagccaccgcgcctgggcatcaaacatttcttaactcatttgatgagaccagcataaccaaataccaaaggtcaatgtggtgatggtggtggcagtggcagtggcagtggcagagggcacccacattgttcatgtatacactgaacaaataagtggcctctgagcctttttctgcctgtcagagtctttgagacagggctcattcgaccagcatcactatgacaagggccagtagcaaggatggggagtc

SEQ ID NO: 6008 - DNA, 6000 bp, Homo sapiens; identical to SEQ ID NO: 622

SEQ ID NO: 6009 - DNA, 6000 bp, Homo sapiens
tgagatctttttaaggaattgacctgttttattttccgataactgttgtctgcatggttgggtaaaaaccttcaacaatttgttttcctgtattgagagagaatctgggtttggtcagcaggagtagaaggtacagtttgaggaataaccagaaagtttgaagactccctaacatagtcttgtgcctttgtagagtattccttttagcataaatgtagaggtgggcctctgttggcatttgccactgttgagaactatccttatgttcaggcatctcctggcagggattgtgtgaaaaattactttagacactcaaaggatagggctttgatcgcttgagttttaggcaaggttagcccttaaataatttagtaaaatacagtcaatccttgttattcacagactctatatttgtgaattcacctactcattaaaatttgtaaccccaaaatcaatactcatggcacttttttttttttttttgagacagagtctcgctctgttactcatggcactttttgcagacagtcacagagtggtgaaaaagttgagtcaccctgctgttgcagtgttttcagctgaggttgaacaagacagtgctctgccttcttgtttcagttctcgtattgtaaacaaatgttcttttcatggtcatttagtgccacttcctttgtatttttgtgcttttaattggtgattttgctgggttttttgagtggaggtcttgtggtgtcgtcctgactggtctcaaactcctgggctcaattgatcctcgcacctcagcctcccaagtagctgggaatacaagcacatgccaccatgcttggcttaattttgctgttcagaatgcaaacagcatagtgctgaagtgctgtctagtattcctgagtgcagaaagaccgtaatgtgccttatgaagaaaatgtgtatattagataagcttcattccggcatgagttgtactgctgttgtaactgtgagttcaatgttaaggaatcaaaaataatgtcaaatgaggtgtccttaaacagaaacacatataaaagcaaggtatctattgatcatttgatgaaaatgttgtgaccttaggcttgcaggaacctacctaccttttatttccctcaggaacaagggtttactaattcattgtccactgtgattttataacataaacactgaataatgagaatcaacttcttcctttaaaggaaggaaggaacttcagtgtctacgtccatccttaatgatttctcttttttctaatgcctatagtttttcccacttggcgtttttaaaaaaagaaacacttttttcttactacaaagctaatatgtgttcattttagaaaattcagaaaacagactagcaatgagaaggaagtattttagaaacttccataatcccatcatccagaaataactactgttaacattttagtactttgcagtcttctgtatatgtatgtgtcttggtgttttggtgtttgggggttttgtttgttggtttttgtttttttgagacggagtttcactcttgttgcccaggctgaagtgcaatggcgtgatcttggcttactgcaacctctgcctccctgggttcaagcaattctcttgcctcagcctcctgagtagctgggattacaggcgtgtgccaccatgcctggctaattttgtatttttagtagagacggggtttctccatgttggtcaggctggtctcgaactcctgatctcaggtgatttgcccacctcggcctcccaaagtgctgggattacaggcgtgagccaccatgttttttttaaagtgaccaaagggggatcatttctatttgttctacagatggaatgtactttaagcacttgtcacgtttcattcatcctttctattttttgggcaagactcactcatagtttgacttgggtagttgtactgtagttgaaggactacgcaagccagaagagcctccagcatccaccatggtcctaactctgtgcttcaaggcttctgggttatctcctcagccccatccctgagaaaacactactttttctcctgcctccaggttataagcaaatgttaggaagttcagacgagtgtttgaacccaataaaggtctcttgcaaaataaatttgaaactttcaagtgtttaatgattgattgattctgactctaacaggctggcctgctgtctgccttgggctccctgatattgatgatttggctgatggcaacacctcatagccatgaaactgaacagaaaagactgggacttcttgctggatttgcattccttacaggtacgttaagggatttgtctaattttgaggggtgagctatattttcagtatctcttaattagttcccccccctttttttttcttttttttttttttgagacagagtctcgctctgttgcccaggccagagtgcagtggcttgatcttggctcactgcaagctccgcctcccaggttcacaccattcttctgctttagcctcccgtgtaggtgggaccacaggcacctgccaccacacccggctaatattttgcatttttagtagagacggggtttcatcgtgttagccaggatggtcttgatctcctgacctcatgatccgcccgtctcggcctcctaaaatgctaggattacaggcatgagccaccgtgcctggccctttttttcctttttttttgagacagtgtctccgtctgtcacccaggctagagagtgcagtggcgtgatcttggctcactgcaaactctgccttccgggttcaagcgattctcctgcctcagcctcccaaatagctgggattacaggcatgtgccaccatgcccggctaatttttgtatttttagtagagatggggttttaccatgttggccaggatggtgttgatctcttgacctagtgatccacccaccttagcctcccaaagtgttaggatgacaggcgtgagccatagtaccctgcctcctggcttttttttttttttttttttttaagatggagtctcaccctgtggccaggctggagtgcagtggcgagatctcagctcattgcaatctctgcctcccaggttcaagcgattccccttcctcagcctcccaagtagctgggactacagcggctaattttttgtattttagtagagacggggtttcaccatgttggccaggatggtcttgatctcctgacctcgtgatctgctcgcctcagcctcccaaaatgctgggattacaggcatgagccaccacacccagcgcttttttttgtttttttgtttttttttttgagactgagtttcactcttgttgcccaggctggagtgcagtggcacgatcttggctcactgcagcctccacctcccaggttcaagcgattctcctgcctcagcctcccgaatagctgggattataggcatcaaccaccacgccagctaatcttttgtatttttagtagagatgggccactatgttggccaggctggtctcgaactcctgacctcgtgatccgcccacctcggcctcccaaagtgctgggattacaggcatgagccactgcccctggccctaattttgtattttagtagagacggggtttcaccatgttggtcagactggtctcgaactcctgacctcaggtaatctacctgcctcagcctcccaaagtgctgggattacagacgtgagccactgtgcctggccttcctggcctgctttctaatctcatataggttcattttgtttccccatccattaggggaaactctgtgagtagccactgtgactctacttttgtgtccaaaaatagccattgtgtacttgaatgaatgaggttcaagagcttaggtagcataacctattaatagtaggcatagaacttttaataaactagacttgagaatccgacatagttgcacccatactggcaattatcataggagcttctgttctgagtcttacagacagtgcattaaagctatacattgagatctattgtgcaggacactttgctgattctcaaaaaaagaaaggcacagctcttctagaattgtcataaaggaaacaagactcaagctatgtaataaaaatgtttgcaaaacatttgaattagaacagcttgttctgagtgacagtctaatatacgtaggagaaattttagaaaggaagagatttagggattaaaatttttgcatcagggcaagctagtttttgaaggcattaaggggtggaattatcagaaggaaagaggaaagtaattagaacgaaagaaatgttagagctggaacaggttgccctcctgttggcaggtgtccacctgcagaaccagtctcacctttctttgctacaaaggggagtcagtcctacatgactataaggttgctggccacgaggcactgttttgctctttatcctttttttctaattcctgatctggcctatattaccatcttacatcactctagctctgaaatgtttggcatgcctactttattttcttgtaatctctgtaccctccctgaggtcatccatgattttcagctaagaggacaattttgcagctatttctataaaaaaaaaaaaaacaacgcagtcaggtatacattttattgaaaacaattacagcggaggggagagagatttaattctttagtccacgtttgttaagagcatgagtatgcctatatttcgggatcagcttttggatgaggatcctattcaagaattgatcgtaatactgtgttctgggttttctgttttctaggagttggcctgggccctgccctggagttttgtattgctgtcaaccccaggtaactcttttggtagtgtcttatgtgcttttatctttatgaatataccttctaaatgtagaccgtatacctgtagcccttaatctaatggtctttttttctaacagcatccttcccactgctttcatgggcacggcaatgatctttacctgcttcaccctcagtgcactctatgccaggcgccgtagctacctctttctgggaggtaagtgtgaactgggaaacagggaatgggggctcctttttagccagaattctcactagtactccttccttacccctaactcctttgcgactattgagttgagattaaccttcattctgggggaagttaaggaatggctttaatgggattgctttactttgccttggcttctctcaagacagctttttgctgtgtcttataggtatcttgatgtcagccctgagcttgttgcttttgtcttccctggggaatgttttctttggatccatttggcttttccaggtaagacttagcctggaactttccagcagccatttgcctcacacttctttctttccttttttttttttttttgcacttctttctgtactactttgggcagtgctctctaagccttcccattatccttcataggatggagccttctgccacaagtgaaaacaggctgcacaaggttgggcattgctaagagaaaatggtttgctcagacaccatttgtgtaaggccagtctggcagtggctgattgttaaaatgattgaaactcttccagtgaccagtgcagtattgtgcctagggaagtaaagtggtcttcaccctaggctgcagttctcgtgaatggtaatgttcatagggttcacatttgatgtactttcaagtgactatgagccagaaagtatggctggtttttttttctctgcaacttctgctgtatagtaacttcatctcttacatttgttaggcaaacctgtatgtgggactggtggtcatgtgtggcttcgtcctttttgatactcaactcattattgaaaaggccgaacatggagatcaagattatatctggtgagtgtgggaactagtctttaacaagcatgaaggttgaggcataccgttcagcagctgaacttaggttggcattggctgaacataggtggccaagctttgggagtgtatgtggtaggaaacccacggttttgga

SEQ ID NO: 6010 - DNA, 6000 bp, Homo sapiens
ttagatgatgtcttaagggtgggggcctaatccaataggactacggccttataagaagaggatgagagagaagaagagagagagagagtgatagatctttctctctctctaccatgtgaggacacaacaagaaggtggccatctgcaagccaggaagagagccctcatcagaacccagaacctgaccatgctggcatcccaatttcagaattccagtttccagaatagtgagaaaataaatttcttttttctttttttttttgagatggagtctcgcactgtcacctgggctggagtgcagtggcgtgatcttggctcactgcaacctccacctcctgggttcaagcgattcccctgccttagcctcctgagtagttgggattacaggtgcccgccacatgcccagctaatttttttttctttttgtatttttagtagaaacagggtttcaccatgttggccaggctggtcttgaactcctgaccttgtaatccacctgcctcggcttcccaaagtgttgggattacaggcacgagccaccacgcccagcgagaaaataaatttctgttgtttaagccacccagtattttgttatggcagccactaagacaggtggttgaaaactctgtagaatctccaggaggacaagagagccaggttctgtctgtgcagccagaaatgactcccaaaccagctgtggggctgcccctgtgaacacgtgacatgcctttcaccgtggacaccaagcttacacaggggtggagcacctggaagcagatggcttggctgccaggctcactatcagatagattcctcccttttgttgttcacttcctggcagaaatctcatgtgatcttctaatggcacagcctagatcacatgtgacctgtttgcaaggaagattctggaaaagtgctttggcttctctgagggaaaggtggaactcataatgtgaggcattttccaaacataggaagagtatgcatttgtgtgctgcttacagccctgcccattgatgacatctgccccatgggctactttcattgtttaaacttccacttcttctgagaacaactagaaaaacaagattaaatcatcatcatcgtcaccatctgttaaaagacattcagagaactgctgaaataaccaggactaaaggggccaagattctggagacaggaacaccgtggtgaggtgagctgatgttctgcagccgatttttccctggggatatttgcacatttgggcacagggaaagaggccgaggttctagactcttcccaggcatgaaggctgctttgggggaacagagaaactgacaaaacttttagcaacctcatggggctagaaagacaaaactggggacttgagaggccattatcccagggagaagacaggggcagaaaagtgagcctgatagatggtggtttcccctcgaggtatttggcaaagtttgaaatagtgcagggcaagaagcaaagaagccaagcagaaggtccctcaaaaacagagccgttcccacagtctcgccatgctgtggagataagggttagagctcaggaccagagagaggggccttagtgaacacccaaggttcctagctggaaccctggaaaggcacagcattagaggtagggaacagagtgaagtggtgtcttatcaaaactataacctggtctccacccagctcagcccctgattggattaagataattgatctgtatgccatttgtcttgcagagaaagggtgcgtcctctccagagttagatattatcacctggagactgtacattttttcaacgtctgacattcaataagaattacaaggcctgccaagagacaggaccatatcactgaaaataaagggaaaaatagtcaatagaaagagacccacaggtgatcaagcttttggagttagacaaatgctttaaaataaccataattaacatgtttaagaaaaatgaaaagttggagaaaatagatgaaaagagataattttaccagagaatcggatttcataaacttcatcgtccaaaagattgagaacatagagaacttacttcacctgctcattgacagatgttgaaaatactgactcagttctgtatagctataaatcccatggcttacagtattgtttttctttctttgtgttttttttttttttttttttttgagacagagttttgctcttgttgctcaggctggagtgcaatggcacaatctcagctcactgcaacctccgcctcctgggttcaagcgattttcctgcctgggagtagctggaattacaggcgcctgccaccatgccaggctaattatttgtatttttagtagggacagggtttcaccatgttggccaggcagtctcaaactcctgagctcaggctattcacccgcttcagcctcccaaattgctgggattacaggtgggagccaccacaccgggtcagctggcagtcttaaaaaaaaaaaaaagtgtgttgagggagagcatcaggaaaaatagctaatgcatgctgggcttaatacctaggtgatgggttgataggtgcagcaaaccatcatggcacacgtttacctatgtaacaaacctgcacatcctgcacatttaccccagaacttaaaaataaaggttgtcattcaacgtggccaccactggctcctgttcgctctgcttttcaagtggcttcatttaagagtgacatattataccatgtgttctgagtatcacgtcttactcagtcctcagcacagggctctgttcacctaaagaaagaggtgccttttgctaatcattctaaatacatctgttgggcaatgtgtgttgggaatactattagataaggtggttagggagatgaggcctctctgagatgatatttgagttaacagtgacaagaagaaacccaccaggagaggattagggtgaagcatgttctgagcactgtggacatagagtacaaagatttaatcaagagtcagcaaacttttctgtaaagtgccagacagtaaatctttcaggtgttgtgaaccaccggtctcagctgcagctactcaactctgctttacaacgcaggagtaaccacagacaataaacagatgggtggtggtactccaataaaactttacttgtggacactgagatgtgaatttcacataactttcacgtgtcacaaaatgttattttcatttttttccaaccattttatttacatttttaatttttgaatttttagtagcgacagggtcttgctatgttgttgcccaggttggtcccaaactcctggcctcaagcgagcctcctgactgcctcccaaagttctggggattacaggcatgagccacctcaccaggcttccaaaaatttcaaaaggtaaaaaccatcttaactgtggagccatcgtttgctgatataacgtcagttaggtatgctggggtcaggccacacagacacttgtaggacatgggaatactcagaataaggcaaaggcccttttcctcgccaaatggaaagccatcagggcgggccaggctaccaagtctaggaggcagcttcctgaaattcacggaagatcatcaggttcgctttattttttccccagtaacaagaaaggacaaacgaacaaaaaaggcacacacacacaaacacacacccaaaggacaaacgaacaaaaaaggcaaacacacacacacacacacaccacccccgagctaaagacagacgggatgtgcccaggttcacgccgacgcctctccggcgcgcaccgagggttttaaagttgggcgcacacctgctcccagccggagcgcacctgctgagcagcactccggcccggtctcgcgagagcggtgcaggagtagtggcccccacccgctccccgccaccaaatccctctccccgccccctcgcccagcctccaggctcgggcacactcccggcctcccccgccgcccccgggagcaggctgggcccgatgcgcgcgctgtctccgcgcccccgcccgccgatcgctcgcttgctcgctcgcacgcactcccggtagtaatttcactttgccacgcgagctccgcagcccctagaaatcccgccccccggccaggtgcgcgagtctgcgcgctcctcctccgcctcctccgacgggtccctggcgcgccggggccggggcccggctggggcggctgcgcgcacggcgcctctccaccaacccgctcccctgcaggtccctcgcttggtctccatccctctccggcgctccctcgctcccccccgccctttgattgacaggcaagatgtcggtgtggagcgaggcaggagcgattgcagcaaccgtcacccccggagcccggcggcggcagcagcagcagcagcagcagcgcggggaggagacagcagccagccgcagtagccgccgcagccgcgggagcaatgcagacagcaccttgagaacgcgctaaagcactccaaaccgtggaccatgccgtgtccctgcaactgggaggggggaaaaccagattttttttgacataaaagcaagccagccaaaaatatataattttgtccttcaaggagccggtgtgtaaagagtgagcgctattttccttctcctcctcctcctctccctcctcctcctctccctcctcctctctctcctccttctcctcttctttttcctcctcctcctcctccctaagtgtacagacagcatcacatcacctggtttgcttctgagaaacagcatctctccttttcagggaccagagactcagagagagaggagacattctaatggagtccgcttgatatcccaaaataaaataataaattttggctcttgtcccctcctcccactcccaccccctcaaccctgtgtgagatgttggatttcttcttcatgagacattgttgagaagtcgcagtggttggagaggcggagggtagactacctctactcccccccctcttttttctctctgggaggaggaggaggggaagggggttgcagagcaagcgatggatgaggaaaacatgacgaaaagcgaggagcagcagcctctgagtttgcaaaaagccttacagcagtgcgaactggtccaaaacatgatagacttgagcatctccaacctggaagggcttaggaccaaatgtgctacctccaacgacctcacacaaaaagaaatccggaccctggaggtaggtgttgcctacgggaaaaaaaaaaaaaaaaaaaaaaaaaaaagcaatccttctttccccctcctttctccccacggtcccctttccctctgattctgtttattgggggctgggggtggtggtgtgggcaagcaaggtgggcacggtttgcttttctgtgatttctctccttgcaaagcctgcattggatatccttttactgtgctgctgtcgtctgcgcttggctgggtggtggtagtagtagtagtaattgttattctttatttattattattgttgcggctgttaccgttgtcattcgcttcctcgctgaggagggagttctctcttttttccgcttgtggatttgtttatatgccacgggggcttgtgtgccgggtaatacattaaggagctgcagagaacccacgtgaccttgcgcattctgcaggtggtcaaaaggtggtttttgctcacagaatggggccgcctgtcagtgtagacctcttcttctcttggccttcttcccctccctccttttgctccttagattttttgttttaaatcagtgatatacatgtcaggaggcaagatgcatgaaaaaaaaaattcctatggaactacccatttccaatccaatcgttttgatgcagtgagctgttgcaggcctaaaacgtacaaaagggaaaaaaaaatatgcctcaatcagcacacataggtggtgtgggagaatactcctgaatctcagtgggactgtgaggaaagaggaaaggggtcggggaggaggagttatctttggcttcttgtgacattctctccggc

SEQ ID NO: 6011 - DNA, 6000 bp, Homo sapiens
ttccctctattaataaagccactctgacacatgtggccttcagaggtagtatgcagtttctaaagtcaagtacatcaacaataacaacatcatcatcaacaacaaaattatcatccgtcagctcccgttctttgaaattgatgacattcttattagtttgaggtgcaaaaccctacaccagaggcatcaaactcaaatgcctacaggagccagggaggagatataaataatgaatgtagagaactgagtggcactgtagtggagggtctgtgcccccatctgaaaggacagttacctctcttccaaccaattattgcccaatgtagccggatcttcccatttttccagaaaggccagagatctgcatttttggggtagcatctcttaattttggaactactgtcaagagcattagtcagggttctttgttgccaatgacacaatccactctaggtagtttaagcagaagtattttaatagggtggtgaattgtggtccctcttccctgcaccaaatcatatgttgaagccctaaccctcaatgtaactgtatctggagacaggatctttaggaggtaattaaggttagatgatgtcttaagggtgggggcctaatccaataggactacggccttataagaagaggatgagagagaagaagagagagagagagtgatagatctttctctctctctaccatgtgaggacacaacaagaaggtggccatctgcaagccaggaagagagccctcatcagaacccagaacctgaccatgctggcatcccaatttcagaattccagtttccagaatagtgagaaaataaatttcttttttctttttttttttgagatggagtctcgcactgtcacctgggctggagtgcagtggcgtgatcttggctcactgcaacctccacctcctgggttcaagcgattcccctgccttagcctcctgagtagttgggattacaggtgcccgccacatgcccagctaatttttttttctttttgtatttttagtagaaacagggtttcaccatgttggccaggctggtcttgaactcctgaccttgtaatccacctgcctcggcttcccaaagtgttgggattacaggcacgagccaccacgcccagcgagaaaataaatttctgttgtttaagccacccagtattttgttatggcagccactaagacaggtggttgaaaactctgtagaatctccaggaggacaagagagccaggttctgtctgtgcagccagaaatgactcccaaaccagctgtggggctgcccctgtgaacacgtgacatgcctttcaccgtggacaccaagcttacacaggggtggagcacctggaagcagatggcttggctgccaggctcactatcagatagattcctcccttttgttgttcacttcctggcagaaatctcatgtgatcttctaatggcacagcctagatcacatgtgacctgtttgcaaggaagattctggaaaagtgctttggcttctctgagggaaaggtggaactcataatgtgaggcattttccaaacataggaagagtatgcatttgtgtgctgcttacagccctgcccattgatgacatctgccccatgggctactttcattgtttaaacttccacttcttctgagaacaactagaaaaacaagattaaatcatcatcatcgtcaccatctgttaaaagacattcagagaactgctgaaataaccaggactaaaggggccaagattctggagacaggaacaccgtggtgaggtgagctgatgttctgcagccgatttttccctggggatatttgcacatttgggcacagggaaagaggccgaggttctagactcttcccaggcatgaaggctgctttgggggaacagagaaactgacaaaacttttagcaacctcatggggctagaaagacaaaactggggacttgagaggccattatcccagggagaagacaggggcagaaaagtgagcctgatagatggtggtttcccctcgaggtatttggcaaagtttgaaatagtgcagggcaagaagcaaagaagccaagcagaaggtccctcaaaaacagagccgttcccacagtctcgccatgctgtggagataagggttagagctcaggaccagagagaggggccttagtgaacacccaaggttcctagctggaaccctggaaaggcacagcattagaggtagggaacagagtgaagtggtgtcttatcaaaactataacctggtctccacccagctcagcccctgattggattaagataattgatctgtatgccatttgtcttgcagagaaagggtgcgtcctctccagagttagatattatcacctggagactgtacattttttcaacgtctgacattcaataagaattacaaggcctgccaagagacaggaccatatcactgaaaataaagggaaaaatagtcaatagaaagagacccacaggtgatcaagcttttggagttagacaaatgctttaaaataaccataattaacatgtttaagaaaaatgaaaagttggagaaaatagatgaaaagagataattttaccagagaatcggatttcataaacttcatcgtccaaaagattgagaacatagagaacttacttcacctgctcattgacagatgttgaaaatactgactcagttctgtatagctataaatcccatggcttacagtattgtttttctttctttgtgttttttttttttttttttttttgagacagagttttgctcttgttgctcaggctggagtgcaatggcacaatctcagctcactgcaacctccgcctcctgggttcaagcgattttcctgcctgggagtagctggaattacaggcgcctgccaccatgccaggctaattatttgtatttttagtagggacagggtttcaccatgttggccaggcagtctcaaactcctgagctcaggctattcacccgcttcagcctcccaaattgctgggattacaggtgggagccaccacaccgggtcagctggcagtcttaaaaaaaaaaaaaagtgtgttgagggagagcatcaggaaaaatagctaatgcatgctgggcttaatacctaggtgatgggttgataggtgcagcaaaccatcatggcacacgtttacctatgtaacaaacctgcacatcctgcacatttaccccagaacttaaaaataaaggttgtcattcaacgtggccaccactggctcctgttcgctctgcttttcaagtggcttcatttaagagtgacatattataccatgtgttctgagtatcacgtcttactcagtcctcagcacagggctctgttcacctaaagaaagaggtgccttttgctaatcattctaaatacatctgttgggcaatgtgtgttgggaatactattagataaggtggttagggagatgaggcctctctgagatgatatttgagttaacagtgacaagaagaaacccaccaggagaggattagggtgaagcatgttctgagcactgtggacatagagtacaaagatttaatcaagagtcagcaaacttttctgtaaagtgccagacagtaaatctttcaggtgttgtgaaccaccggtctcagctgcagctactcaactctgctttacaacgcaggagtaaccacagacaataaacagatgggtggtggtactccaataaaactttacttgtggacactgagatgtgaatttcacataactttcacgtgtcacaaaatgttattttcatttttttccaaccattttatttacatttttaatttttgaatttttagtagcgacagggtcttgctatgttgttgcccaggttggtcccaaactcctggcctcaagcgagcctcctgactgcctcccaaagttctggggattacaggcatgagccacctcaccaggcttccaaaaatttcaaaaggtaaaaaccatcttaactgtggagccatcgtttgctgatataacgtcagttaggtatgctggggtcaggccacacagacacttgtaggacatgggaatactcagaataaggcaaaggcccttttcctcgccaaatggaaagccatcagggcgggccaggctaccaagtctaggaggcagcttcctgaaattcacggaagatcatcaggttcgctttattttttccccagtaacaagaaaggacaaacgaacaaaaaaggcacacacacacaaacacacacccaaaggacaaacgaacaaaaaaggcaaacacacacacacacacacaccacccccgagctaaagacagacgggatgtgcccaggttcacgccgacgcctctccggcgcgcaccgagggttttaaagttgggcgcacacctgctcccagccggagcgcacctgctgagcagcactccggcccggtctcgcgagagcggtgcaggagtagtggcccccacccgctccccgccaccaaatccctctccccgccccctcgcccagcctccaggctcgggcacactcccggcctcccccgccgcccccgggagcaggctgggcccgatgcgcgcgctgtctccgcgcccccgcccgccgatcgctcgcttgctcgctcgcacgcactcccggtagtaatttcactttgccacgcgagctccgcagcccctagaaatcccgccccccggccaggtgcgcgagtctgcgcgctcctcctccgcctcctccgacgggtccctggcgcgccggggccggggcccggctggggcggctgcgcgcacggcgcctctccaccaacccgctcccctgcaggtccctcgcttggtctccatccctctccggcgctccctcgctcccccccgccctttgattgacaggcaagatgtcggtgtggagcgaggcaggagcgattgcagcaaccgtcacccccggagcccggcggcggcagcagcagcagcagcagcagcgcggggaggagacagcagccagccgcagtagccgccgcagccgcgggagcaatgcagacagcaccttgagaacgcgctaaagcactccaaaccgtggaccatgccgtgtccctgcaactgggaggggggaaaaccagattttttttgacataaaagcaagccagccaaaaatatataattttgtccttcaaggagccggtgtgtaaagagtgagcgctattttccttctcctcctcctcctctccctcctcctcctctccctcctcctctctctcctccttctcctcttctttttcctcctcctcctcctccctaagtgtacagacagcatcacatcacctggtttgcttctgagaaacagcatctctccttttcagggaccagagactcagagagagaggagacattctaatggagtccgcttgatatcccaaaataaaataataaattttggctcttgtcccctcctcccactcccaccccctcaaccctgtgtgagatgttggatttcttcttcatgagacattgttgagaagtcgcagtggttggagaggcggagggtagactacctctactcccccccctcttttttctctctgggaggaggaggaggggaagggggttgcagagcaagcgatggatgaggaaaacatgacgaaaagcgaggagcagcagcctctgagtttgcaaaaagccttacagcagtgcgaactggtccaaaacatgatagacttgagcatctccaacctggaagggcttaggaccaaatgtgctacctccaacgacctcacacaaaaagaaatccggaccctggaggtaggtgttgcctacgggaaaaaaaaaaaaaaaaaaaaaaaaaaaagcaatccttctttccccctcctttctccccacggtcccctttccctctgattctgtttattgggggctgggggtggtggtgtgggcaagcaaggtgggcacggtttgcttttctgtgatttctctccttgcaaagcctgcattggatatccttttactgtgctgctgtcgtctg

SEQ ID NO: 6012 - DNA, 6000 bp, Homo sapiens
gccatcttaaagctcacattctagtgggcagacaagagtcagaccctaataagcgctctgaaacaattatgattgaggtggaattggagagtattggaagaggtggggtagaactcaattagtgtgtgttgcctccgattgccctgcttggaggcacttgtttctcctcaaccaatcccatggccatgagaataacagccaaattgttctgccaaggaaaatggagtgctgttatcagaaagaggggggatagagctgatcaggaaaacccaggaactgtcttaagcagactgtggaggcaacaggctcaaggagtcaagattgcacttctagagcaagtattcacggtgtgtaggagtcagtaccaggcatcatggaagaggctctgggcactagagaggggagtggtcatttctggcctcctggcttagggcaatggttctcactgctggggtgggacactgatgtgtcaggaccaatcaagaggtgccagagcacacaagtcttgatatttgcttgatacacaaatacttgattctagagaaatcagagcagattctaggaggtccttgaaagaaatgtcactttcagtcactgacaaacttttctgagcaggaagaaaggacgtggactcaccatgggtagatacacgggggtctgcgcctaccttctgtcctatttcagccacaacatgcctgataccatgaagctatcactggtgggagttggcagccctggtggctacaggctactaaactgctttacttctttgcaaaatgtttttccaaccttgaaatctagggacgcccatgagaatgcttagcctcgtctgtctttgcaggtctctgaagaataaaagttgagagttgcaatttaatagcattgaggtaatatttaatccagaaagggcaacttccaaaactggttgtgtttggggaggaggctaaactttgggttgggttttttttttcagcaagattgaggggtttcttgattcccccttgttactggtaggccatttgaggttgagattggagaccaaggaatcagaagttgttgccttttcctcaagatgaccatcacaagagtggcatctgttttttttgtttgtttgtttgtttgttttggttgttgtttttgttgttgttgtttggagttttttttagagacagggtctctctgtgtcacctagtctggagtgcaatggcacgatcatagctcactgcagccttgaactcctgggctaaagcaacccttccacctcagcctcctaagtagcagggattatagccatgcacgaccatgcctggctaatttttatttttattttacttatttatttatttatttttgagatggagtctcgctctgtcacccaggctggagagcagtggcacgatcttggctcactgcaagctctgcctcctgggttcatgccattctcctgccttagcctcccgagtagctgggactacagggagcccgccaccatgcctggctaattttttgtattttttagtagagatggggtttcaccatgttagcaaggatggtcttgatatcctgatctcgtgatccactcgcctcagcctcccaaattgctgggattacaggcgtgagccaccacgcccggcctaatgcttattttttaatgttgtagagatggggccttgctttgttgcccaggcttgtctccaactcccggactcaaaagatcctcctgccctggcttcccaaagcactaggattacaggtgtgagccactgcacccagcctggtttttacgtcaaatgtcatctcaaagggtttggtaatgatggcctagaccacagtgttgagagcagatccaggctcagcaggagagtgtactgtgatccactagtaatgtctgccagggacatgagaagggcaggttgtgcacatatgacagatacttgccacacctgaccaaatggttaacactgtgaaaaatgcccagctagaaatagatgcaaagcaataacagactgatcgtcctgaggcgacatgtcactatgaaaacagaccaaggttggccaggcgtggtggctcacacctgtaatcccaacactttgggagtccgaggcagtggatcatgaggtcaggagatcgagatcatcctggctaacatggtgaaaccccgtctctactaaaaacaaaaacaaaaacaaaaaaaattagctggatatggtggtgggtgcctgtagtcccagctgcttgggaggctgaggcaggagaatggtgtgaacccagaaggtggagcttgcagtgagccaagatcgcgccagtgcactccagcctgggggacagagcgagactccgtctcaaaaaaaaaaaaaaggaaacagaccgaggtcagaccattcctggctctaccacttgtataaccgggtaatcttgggcaagtcaagtacctttcagcctcagttttctcattatctcattataaaaataaaaataaaaaataaccacataggttttaaggattaaatgagatcatatttgcaaaattattcataggtagtaggaactcagtaagacttacttcccttcttcccactctgtcccaaatccacccaaactgaggaggtgagaagccaggaaggaaagggagaaggccctggagtaactgggataagggaagtgcagacgggctgacctggaaatgaatggaaattggaacaattagaaagcaatgggaaccaggcacggtggctcatacctgtaatcccagcactttgggtggccaaggcaagcagatcacctgaggtcaagagtttgagaccagcctggccaacatggcgaaaccccgtctctactaaaaatacaaaaattagccagaagtggtaggggatgcctgtagtcccagctactcagaaggctaaggcaggagaatcgcttgaacctgggaggcataggttgcagtgagccgagattgcaccattgcactctagcctgggcatagagctaaaagaaaacaatggggagtttaaaaagccaaccccgaagcttccagaactggagatgcaagctcgtctggctggcacagagccccctggagagactcttggtgtgatggttaaaagtgtgtgtatcagagtcagactacacagggttaaagaccagctccaccacctactggctgtgtgatgtcacctttttgtgcctcagtttcctcattgtaaaatggcagtggaaagagtaccttccccatagcgatgatgcattaaataaatgagctctaccgagaggtctggcatagctcctagcacgtagtaggtgctattataaggtaatgatgatgatgttgatgatctagcaagtatctccttcctctgtggcctggaaatgcatcactaggcccctgtctgtcccattatctccatgggataatgggggatattgaagacatcgccacagagaagaactcccccagatccttccaggaaatgtgcccctctcatggccaggggttggaggtgtcccagcctgctgggtgactgtgccatgtggaggtctctcagtctcatccgggcagatggcatccccggggcccatcattcattatcacaacagcagaaccttgccactttccactctaatgcccctgtaatcagccaagaaaccctgcaatttgatatttggaaacaattagcccagttcacggcctctgcagcatcaattaatgcggacgtggccataaattacagggaagcaggaactggcgcaagaggatgaggtcacagcagccacaaacctttggctcagaggaggttccctgggaaggggaatgaccacggggggtccttgtcttcttcagtcacacaggtggggcccctctcccccaggagtcgccaaagacccatagccagaagcctgtggccagggcctctgagctcaggaacaaaagtgcgtggccaagaaacctggagtgtccaaagctcaggcaggccaactcagccatcctgctgcccccacgcaggcctgcccccatgctctcctccagctaagaggaagatgctgcaaacccccaatctctgagtctctccagaacagtctcagctctgcatgaccctcggtgcaaaataacactggcacccccaacaaccctgccgcagtcagagggtgctccctggagtgcataaaaggcttcttagggctcctttctcagaagtctcagcctacacttgtccagaagcagatgccaaaaagtcaggctgactttgctttgggccccctgctcagccacatgctggctatgtgaccatatgcaagactcatccctttcaagcttcagtgtcacctctgtaaaatgggatttaaaaaaaaaaaaaaaaaggtagacaaatgggccgggcttggtggctcatgcctgtaatcccagcactttaggaggctgaggcaggaggatcacctgaggtcaggagttcaagaccagcctggccaacatgacaaaaccccatctctactaaaaatacaaaaattagctgggcgtggtggtgggtgcctgcaatcccaactactcaggaggctgaggcaggagaattgcttgagcccaggaggtggaggttgcagtgagccaagatcacgccactgcactccagcctgggtgacacagcgagactctgtctcaaaaagaaggcagacaaatgggtttaacacagtgcctagcacatagaaagcatgtggttagtggggcttgctgctggcagttgctagagcaatagttaacagaaaaatagcaaaaatcacagagggcttcagagcttacagaataccatctattctcccaaaggtggggaaaaggaagcagatagctcacttcatttccaagctcgcccacgtggttcttggcaagcctcaggtttgtgctctctggctgcaggctggaggcatcagctccgtgccacgtgggcctctccctaggacagctcacaacctggcctcttgcttttccagggctcttaggagagcaatggcaagagcaaaggacagaaaccactgcctttttgtcacccgatctcagaagtgccagcccgtcgcttttgctgtatcaattcattagaagcaagtcacaacgtcccacccacacttgaagggaaaggagtcacaaggggtctggctgtgaatacctggctgtgtgaccatatgcaagactgagctggggcatcttgaaggctgcctacccctgagggacagttaatgtccataccaagtgctaggccctgagtaaatgcttttcaaaatcgctggaagggccaggcacagtggttcacacctgtaatcccagcactttgggaggtcaaggcaggcagatcacctgaggtctggagttttgagaccagcctggccaatgtggtgcaaccccgtctctacccaagatacaaaaactagctgggcacagtaccaggaacctgcagtcccagctactcagcaggctgaggcaggaggatcacttgaacccagcaggtaaatgttgcagtgagctgagatcacaccactgcgctccagcctaggtgagggcgagagcgcaacattcgtctcaaaaaaaaaagaaagaaagaaagaaagaaagaaagaaagaaagaaagaaagaaagaaagaaagaaagaaagaaagaaaggaaaaagaagttggaagaaaggttttcaaatattcccattgcaggcatcaccctgtttaatcctctctatgaccccatggggtgaatagtacctgcctctggattgggaagagcagaacctgtgatcatccaacagagaaaaaggtgaattctctccttaaaaatatggggagagggaatgctggccaaaaagcaaaatggattctaagagacaaaaagaaaaggaaaagaaaagtctgccaaacaccatgactatccctattttgtaggtgagaaagttgaggctcacagaagttagataattgcctagaaattgggaggagctgctggaattcaaacctgatttcagcattagcatc

SEQ ID NO: 6013 - DNA, 6000 bp, Homo sapiens
aaaaaaaagatatattgtcacacatacatgtgcacacacacacacacaaatttttttgtgctgctcttccttgcttaatctctcgtttctgccatcctgtttcccatagatgcgcccactcattccacctctaaaagctcagtcctgccctgtgtgcagacggcctcacgtgcagcctcacaagccctcatgcctcagtgggagccgggcctggtgcctgggcattggatgctgggtcctctcagtcactgctcttttcatcgaggaacgtgatcccagacttatctgggatcacagctcctccctagatatgtaagtaacttccagttctcttagtcctgacgatgcctcgaaaattttagagcttctactctccactaaaaattgatgatttggaaattaagaacccatttctaatccccattctctagtgaattaatgtgactagtactctctttttttaaattccctttgggaaatggagctttttttcagaatctcctcctgactgctaggccccgttaccatgagctgactttcaaaattgaacagatctaagttcctagagagctgggaccatatctggttggttatggctgaatccccagagcatcatgcacagctcatgttcagcaaatatatcattttcaaatgtgtgaaaggatggctactcccttaccctgtattcccaatcactctgctctacccaagggttgagacggtccctgagttatgtcagatcttctgctgcccattgtgtccccaggatttggatagactcaggcatagtccttgggcaaatgtcttttctgtgagcctgggcctcagaacctcctatgcaccactaggaattctgctctatctctcccagaataaatggccttcttggggatggtacccaagctactgaaatttggaagcatttattcattcactcattcattcaacaaacacttacagaatgttagccgttgtgagagcacatgcagcagaagttgctctgtcaacaatgttgaggaaattcacagaggagtgttggggatgacgataaggaaaacaaagctctttcctgacactaagatcctatgcttttaaagaaaaaggtgagaaaaagaaagggtaaataacataatctgatgatcaacatataaccaagcaaccagatactataataaagcaattgctttaataactattattgcaaaaggtattgaaacaatagatgcaaatgtctcctgagaatggtaaaacttctccctgtgatttccctgccagaactgcataatctgaatctaattaccaggaaataatgtgcaagccccagttgacagacattccacaaaataactggccaatgcttctcaaacctgccaaggtcaaaaggcacaataaacactgaggaagtattgcagcttaaagagactacagagacttgacaactaagtgcaaattgtgatcctgggacgagacataaaggacattataggaacagttaataaatttgactatgaactatggattagataacgatattatataaatgatatttgtaattaactgtggttatataagagaatgtccctgttttatgaaataaatgctgaggtatttaagggtaaaagagcatgatatttgcaatttattctcaagttgtttaaaaaaagagagaatgatagagcaattggggtaaaatattaacaactgattaatttggagagtgtatcgaaattccttctactcttgcaccttttgtgtaagcatgaaatgttatctaaataaaaagttataaaaatgtgaaataactgagggagctttgctcacttctgtaagagtgttaagagttaagaaggaactgataagttaaaacgtagataactcaaacccattctgcctaccaaattatggggtcactatcaaacaactttcctgtgactaacaagtacttctggcaataaaacactcctattaaatttagacacagatctgaaggagttcaacaagatccaaacaggaactactaaaggtcattgccaaacctcaaggacggtaacagaagataagtttcctccctgggaaaggccctctagtgagtactgcaacccattctctgaaagaaggtttagaatagtctagaatatctagaatttattccagaaaatagatctggaaaattagcgaaacctcttcttaaacagctgcttaaaaaaaaaaataaagttaactttcactgtgttggacaccctatgagttgttggtctttcatttcattgtcaacagaaccctgcaagactggtgttaccatgtctacttttacatatgaagaaaatgcaactgagaattagtgtaatttgttccaactcacaaaggtaggaagtgatggaagtaaaattccaacacaaggtctgtgctacttcaaaacttatatcccaacccatcaagacagcacaaataggctgcattttgaagaactgggtatcattaaatgataactgaatgcaccccaaactctaaattaactaatattaaattattacatgagaatcttaataagatagcccttaaggcaaaagatgactttttattgactccaaacaatcagaaaacttaacttttcattttaattcaaatatgttcacatatacaccagaacttgagcttttccctaccccagttgttttcactgatggttctctctctctgtctctctctttctctctctctccccaccttctctctctctccctaccttctctctctcccctcccctccccactctctcgctccccttctcttttgctctccccctcactctctctccctctctccctctatctttctccctctctctctctctttctatcccccttcctgctccctgccccattcccttttctgttctccctcttttagactgagtggtataaaatgttacaaagttttctgctgccctccagtggtcttatcctggaagtggcagtcacgataggaaaaatagcaaaacctttatagaagataataataaaatgacacactcttttagagtgttttaagatcgtgggcttcaggagacagaaaagcacctgtgattactaaaaagttattaaacttcacagggcctcaacaaccacatttataaaggaaaggttaaaatatctcttcatggtcgtcccatgggttgagataacatgcaaaaaggtcttgaagtacagtacttgctcaataaaagaaaagtttcaccttatttaagcctgacaactttctataaggttaaggaaactgaggctaagcacaaattacttattttttaaagttacctcagccagcattgtgggtagaactcaaactataattcaaattttcatattctaagtctagttctcttcatgacatctcaatattccaaagtaacagttgctaataaggaaccttaagaattgttaaagtcttaaagggatattttcacacactgctagtggttgccattaaatctgaaaaatatgcattccatggatcagtagtcacatctctagaactgcatcttaaaaattgtgagaaacacacaaaaatttatgtagttgaaaacaagctaaatataagatatttattaaataaactttggtgcaaataataataattggttttatttgttggaaaatttctaggtgccagatgctattctaaggagtatgaatgtatcaacactaaaatgaagttggtactattattatctccattcaacacatgaggaaacagagagacagagaggttaagtagcttgtccaagatcacacatttaggaagaaggagcaccaggaattgaactgagatgtcttattcaagagtccatgttctagtcacttatcaatcttcttctgagactgtccatggatccacccatgctgtcccattgtgtggcagcacctatgtaatggaatatagtgaacctttgtttaaaaaatgtttcaataggtattaaattatatagggacatgcttacattaaaatattaaggggaataaacagtatgcaaaactgcatactatattatttcagttctagaaacctgtgtgtgtgtatgtctaagggtgtataaatcaaaatccagacctaattagtggctgtctccaagtgacgggttatgtgtcatttttttctcctttgtgctttctaaatattctgaatatttgttaatgagacagaactgctgtgatcatcagaaaatttagattaaaaaaattcagggtgccaaaaaattctagaatacttaagaacagcacttagtttaccttaaaagttaaaaattgaatccagaagtaaatatttgcaagaaaaacaattatcaaggattgctaacttttagtttcttaaataatgaatccagaagtataaatacaaaatatttgcaagaaaatataattatatcaagggttgggaggagaagaaggatgtttagactagaaagggtagtacctacctaaaagagagtgcttaatagaactgtgctggattaagtttgcacagtggaccctattttaacttatgtcagctctacataagcagtctcctgacagtcgtcattaggattcactggagactggaactgtgcggacagagggcctgtcttcagaagagaaaatgggggaagagctttgaacccagaggtacaatctctggattggagagtttcaaaggtgccagggaaaagcagtacaaagagccttctttttgacaataactctaaaacacactttgctctgtgaacgcccgtcctgggcagggcctatcagcagggccagatgagcctatagacacccagggtggcgcgttcccagccgccctgcgcatgccaatcttatcagttttgatggaagcctggggctccagataatgctacttggccccaaacgctggacagagcatgctttttcctgtttggctgggaaagggaaggctgaactgctgagtctgacacttaacaggacttcggcattcccctgaatacagactagatcagagattttatttttttaattgaaaagtaacttgggttctctttagaaacccttatttggtgtgcgcatctggctatttcacagagatttcagttttgcaaagaagtcggagttgatttcttccctcagacaagctattggttgttggtgggcaacagaagttgctcagcatagacaggggaaaaaacggttacggatgagactgaaagaaaacctcaaaggagaactctgagaattcatctcaggatgaagctgcaagggcaaaggagaagtacttgtgacacaagcaaatgggtccattgatcaacagatgcaagaagattcttctcccaactactgtacctcctgcaacgatgagaatctggctccttggaggcctgctgccattcctgctgctcctctctggcctgcagagacccacagagggttctgaggtagggggacaattgagggggtgatctctttatgatcagtgctccaacagagcattcacccggccacagcctttaaatggccgaaaacttaggcattcagaatctagtttcattcagacattttaacaaatcatgttagtaaagagtgttgaaaacagttatgaaaaattgtagaatccttcactgttagtacacttgacattatggatgctagtggcataaagttattttcctgatccactgtaaaaattaagtaaaatattgcttccatagtacaaacaatgcaaaataaaccaagtctatttggctttaaactctagcatacagattgacttaagttttaagtgaatattttaataaagatctgtgtaacaaaaaacaacctaatgttaagagatgacagagtacatatttgagatctagtaacatattaacaaagtttcagagttcatcatgacagttgacagaacattgtattattggtttggtttggctcggcttggcttaaatagataccgtagacctattttaatacctgatgtgaagagttattg

SEQ ID NO: 6014 - DNA, 6000 bp, Homo sapiens
tcccactgttgaccaaccacaggcaaggtcgactcctaggggtattgtgggaggctcagccacaggccaaggtcctggcacagcccttatatcccctacagctttatctcccagctggcctccaagctggccatttgctgcagtcccatgggaggcctattagtgaaattttcctccatcctccctctctccatcccaccaatcaccctcaaatgtcacggctgagccttgtgaacaaagctgacagcacaggatagaggagacatgagtaggagacaagaaggcagccaggaaggagggagagatggcatgaaaggccttgaaattgaactgggaaactagctcctctcccttccaccctgctgaggctacaggcccatagcaggcaccagctgactgcccactgttcctgttcatttcatttccacccgtaatcattaagcatcagcttcatgccagacactgtgctggggagggagagccaatcagattattgtattagggagataaaagataattccaataggctctggggccctgaagatttgggacagtgtctgctgctcagtttgagctctccagtttacagcaaagttccccggcacctacagtaaatgttgttgaatgaattcaagattccttgaatattcttgtggcattgcatagtaaggactgagcgaggcaaggttgagagtagcaatcggggcaggaggtagcagtgcacaatggtgtttaggaatatggactctgcagttagactgcctgagtctggctgtactacttattaactgtgtgaccttgggaaagttacttcgtctccctgtgactcagtttcctcactcgcaaataggaattgttctgaggataaaaagatgtatataaagtgactaacatagtattctgcaaatagtaaatactggaagagaccattattgggctagaacagttgcagtggggatggggcataacagagagatgcaagagatgcttcactggttgaatcaagccgacttggtggctggctggatgtgggagaatgaggaatgtagggtatcaggctcctcacttaggcagtagtggagtttgggaacagggagctgagagaggcagagcaggaggagaggcctcctggggcaggaagggagtatgaggttcctgtgaagacccaggaaactatgggctcaccttgtgtagagctcagcaaagaggccgaggtggggaaaatcaagcccagagtcaaagcctggtctgagaagcccccttcaccttcccaccctcctgagctatccatgggagccgctgccacctgcttgaagggaatgggggagggttcaagtaagtccatgctctggcaggagctcattgtccgagtagagtgtattaaggggtcctgctgtttagtttccatcatctgtaccaaggtgtgggcaaatggctgtggatatgagtttttccccctttataggagctgtcagtatgtttcagaggcaggactgcagagtggtaaagcacacagggtagaaaccacctgggcagagtcactcatggctctaccacttcctagtatgggaccttgggcaagtcatttaacctctttgtgtctcaggtccctcatctgtaaaatggaataacaaaaataacaaccttatctcatagggttgttgtgacaattcagtcagtgaatatatacaaagtatcaagaacagggcctggtgcatgttgactattcttattattatttatctgtcttaacacacctgccaagcatttaatgacagtcagaggagggtggaggcggtaccaggacatggcatgattgttaccatcttgcttgcatgtgttcctcagacacattcccagtcctctgccccttctaggcctcagccttgatcaaatatctgctgagcagtaattctactgtcgggtccccatccagggatcctgagaaggcaaaaacctgccccgtcatctgctttgatggcaggctgggggccttgcctgttagaggtaggacaagctagaaatgggacacataaaagatctactccctatgatctccccaggctaggagccaataggtaatcaccccaggtcctcttctcaatctccccagagagggggaatgaaaaagaaatggaaaaaagaaaggcaagagtagtgttgaaggggaacataggtgggggagtgggttgggacagtttcattttcaccgatttgagtgatccttggctccctgaggctcccccacacctcaacacaaacatattcgatttcccccctgccttttttttttttttttgagatggagtttcgctctgtcgcccaggctggagttcagtggcatgatcttgactcactgcaaccttcgcctcccgggttgaaagaattctcctgcctcagcctcctgagtagctgggattccaggcgcacgccaccacgcctggctaatttttgtatttttagtagagacagggtttcaccatgttggtcaggctagtcttgaactcctgacctcatgattcacccccacctcagcctcccaaggtgttgggattacaggcgtgagccatcgcacccggcctcaattttccttttttgagtagactctcctaggcagtctagtctacattagaagaatagaatacatacagagtatacgcagtataccatggtgagtacgtggagacagacaacctggattcatgccccagctccaccatttactagctgtgtgactttggcaatttccttaatatccctgagcctcagtttccccatctgtgacgtgaggataacagaagtacatacctcacaggatcgtggcagggattaaacacatggaaagcacttgaaagagtgcccgcacatgattagattttgtagctctgctgaaatgtatacaagtgtcctgcctcactccccagcatcttccacctgcccagagtaagggcagcaagaataggaaataggggacccctttgtgacccaactgccagtctcaggaagccttcctgcaagaacttctaggccagggcactggccccagcaacccgaaactcatgactccatccccctaactcttccccatgcatacctgtgactcccaacttgtcatcctttcctgtcagtttccaggttgctcttccttcttccaaattaccagaactccgttgaatggatttgggtctgaggtcagattcattctcaggctttcctccttccccggagaggcatttaaaactccaccagcgtttcttaatgtgtggacacagcagatgacctggggtgtttgttccaaatacagattttccatttcatgccaataggattgaatatgaattgctggggacggagcctgcattttagtaagcttctgggaaacattttttatacatgtatacattaaaaatgggattttaatcacaattaaaatttctctccccactttcaagaaaataataattggtggaggatgggggcttggcatcccaaaattgggagtataggcttcttagagctacctcttcccagtcttctcctcactttcaagaaaataatcatggtggaggatgcgggcttggcatcccaaaattggggtataggctttttagagatacttcttcccagtctgggctggctcaacagcaaagggaaaagggaagagaaggggcaaaaagtcctaaaaagctgggggtggggcgttcacctccttccaaaccctcattatcgtcctgaattacgggtcgctgtccccggccactgtctctccaccctctcaggagtggggcgaagaggcccgcgctgggccatttgcacagtggtggaaactgaggcccagggaggcgtggagcctcggtagcaagcctgcctagcagggcgctggaatgcccggtctccgcctcaacctacccggccaccagggagcgcgcggtagggggcgtggtactcgaacaccttctgctcccctggaagctctgccacaaccccaatctcctcttagggcccctacccgttctggagagcagtccttcctctccagcctcagtttcctcaactgctcccggtgtgtgtgtgctggggcagggggcagtggggcgtgggtctgggaacggaactgtgggaggcaaggcagcgggattccccgcgggaaagccgcctattccctcccccgggcggctggagaccctgaaccgaaacaggaggcagacacccccagccgggaagcggccccagcccggatttccctcccgggtgaggccgcagtgactcaccccctccccgctctccccggtttccttgtttgcatttctcctcccggccacgtggcggccagtgcagccactcaccgccggatccctgacaccccggccgttgcggcctcctccacacacttcggggccgctcctgccccctggggatactctgggctcaggcggatgtccactctggtacccccgggtgcggactccaaagcctgccagtgccggcccccttcccctacgcattcctctaccgtaaggcagggcgcctccaccccgccccctccgccagtcctggggaggggaagggggcgggcagcgcagggggtgtgacagctcccgcccggaccggtgccagcgcagccttgcttcagcgcccggtgccagctggctccttcgtctgagacgaaggcgcaggctcggggctccctgtcgccggtggctgggtggcgtccccccaccacgcccccacccctctactcacccaagaggagcctctccaccgagccctgcatcctgctgccctggcagccagtccagctaggcactggcccagttcactgtacctggacttacccactggcaccctccggatccccttatcaaagctgatgggggtcgctggggaccccccagccttttgctagagcctgcacggctgtgcgagcttgaaaagaaacatgaaggtgggtaaggtggggtcagggttgaggaggagcaggagagggcgggagaggaagctgacacggtggggagtttgggtgggagagggagggttagtcagggctgaggaggagaggagaagggtttaagccgaagctgcatttctgggagacctagtgaatctatagcttcatactgggaggtagtggagatccctgcaggggcatgggcagtgagatgggacagaattccaaagaggactaagaagggcctgatcttttccaagagccagctggagacccctaagtgcgccagaccggcaggccccagtgaaggtcttcctgttcctccccccagctcctggcagggttgcagcacctccgcctgaccagtccagaggactctaaggaagtagttctgcctggggcagttgtactgtggcccagccgccccagtcgtgtcccatggctgtccactttcctccccgtgtcacaggtgggctggccaggtgagagctgctggcaggtgggcctggctgtggaggatagcccagctctgggagcaccgcgggtgggagccctccctgacgtggtgccggaggggacactactcaacatggtgttgagaaggatgcaccggccccgaagctgctcctaccagctgctgctggagcaccagcgtccgagctgcatccaggggctgcgctgggtgagtacctttcacctgcccaggtgccagggccagtaccagagctagaggggggcctagatcatggcttggcatgctgctggtggcccagcttgctctgggggtgtacagtggtacagctgccgtggacactgggtcaggaagcttgtctgcagtgtgcgtgggtggctcacacagctgcaacgtgtgtgtgtctgtgtgtgtgttctgcccaaatgtctctgtttgggcatggggggaaggggaaagggatttgttgtttatctgtcacctcagtgagccggcattgagttaggtacttgtgtgttctttccaggtggaggtgggaggtatgggggccgggtcaatgggttggagtgaggtaagcttg

SEQ ID NO: 6015 - DNA, 6000 bp, Homo sapiens
cactgataggctgctgcccctggatgaattgtcaaaccttcctggatcttggcctccccagtgtaaaacgctaggttggaggcagccatctccaagggcccttccttactctaactgcagaactgaccaatgggtgccatccttcacaacaagcaggtccaaatcactttcccagccaaatacccagagacagggtcaaaagcataattcctttccagaatcagaagccctgggtggacggggctgcttaagggagagaggggacctacgcaccatgggaacaggaaggacacagaggaggcaccccatgggtcttccaacacctccaacgggccagcaaggcaggacaatgaggcagaccaaggggcatttcttggggatgaagtagtgtgggaaatggtaagtgatggataaagggatggcttggtaggttcaagggcataatgcagaggactaggtatatagttggtgtctaataagggagacattgtcatcacatagctgaaccccagcttaatagtaaactcttcttctacttatttaaacaaacatttgttcggtttttggtgggaacagaggttctcaaacttgagcatgcatcagaattacctggctggcttgtttaaaatgcagattgcagggccccaccctgagggtctaattcaggtggtctgaggtggggacttggaatcagcatcactagcaagttctcaggtgatgctgacctcatcattcagggaacacgctttgagaaccactgccttggagtgacggatgagacagaccaccctgccctcatgagggcattgaacaagtaaatatcacagaacttgtatgttctgaagagggacatgcagagtgcttggggctgctcccaagtgggggagttcgcgctaagacttgaaggccgagtagagccagcccaggaagagggatgaaaattttgtgaaacacttacttagaatgtgccaggctctctctcatatcgttcatctgctcctcccagtcaatgtcaggaaggtaggattaacgcccattttacagatgaggaaggtgaggctgagagagagaaataactggccccagaactcatggcaagaaagaagcccaggtctgtttgtgcacaggacacctaccagcagccacatcccctctgctgcacccccaggaacccccttcttcccaggggagctgccacctggacacagctgccggacccggccagccacactctgtccatttccgccccctgaagcgcttcaagtgttttcactgctgggtgaattcagcagatgcctttcgatcacagcctattaaattagcccctctctgcagccaaaagaagataattatgttttcattagccctggataatgtattaccccctcagtgacagccacgtcagtgaggccagcctcctcccttcctcctcctgcccagggctccgccagagcactccactcccctggggtccacctctgcactgaggggtgggcaccagtgagggtccagagtggctgggaggctgggggggaagggacaccctttacacccatccaccatccatgcaggggttgaggggtgtggtcctgagagaaggaccaagaataattgttatcacggtgaccatttatgaagtgcctgccctacgctgatgcctggatgggtctcagctggtttgatcttccaatagctcgagagaagggtggcacaaccctcatctccccctgaaccccagagaggtcctggtggaatcaggttattgtgacagcccagagcagcttccaaggcactacacccaaggggcattttggggactgtcccaaggccacctggttgatggtaaaagtctcttccctccacttgctggggatctctggagacactgtccgtactcatgtggtaggggtccccaaacaccaggagccactctccccaaaccctagacactccccagatggctctgacatcctccctctccctctttctccacaagacagcggcgaggaggcaggaaaagctccactttggggtcccgagttctaatatctgctttaccacagattacctgggtgacctggagcaagtcactttgcctccagagcctctattttctccctctgtaaaatgggaataagaaagggagtcatttcttaccatttttatgatggttcagtgagttatacctattaaatgcgtggctcaaaaccagcaaaatgggaagtgctcaacagaagatggccattgttctctttactaccgcaactagtgttgtccatagttcccgttaatcctggggaaaccaccagagggagggaagggaagtatctggctctgtctgtcactgtccgtctttctctgtatctctgtctctctttcctgtctctgccattctctctctgccaatctctctctctctctgccaatctctctgccaatctaccaatctctctctgcctctctctcttctcttactctgtctctctttttctctctgccaatatgtctctctgtgtattttttctttctgtctctgccaatctgtctctctctctctgcaaatccctctgcctctctcttctcttactctctttctgccaatctgtctccctctgttttctctgtctttctctctgtctctgccaataagtctctgtcttcctgtcaatctctccgtctctctctttttctgtgtgttttttctatctccgtctctgccaatctctctctctctgccagtctttctgtgtgtttttctatctctgtctctcactgtctctgccagtctctgctgtctctgtctctctctttgtctataaatctctctgcctctctctcttctctgactctctctgtttgtgtgtgtgtgtgtgtgtctgtctgtctgtcttcgtctctcatctacacacacacacagagggcacctcatggtccctggctccacccgtgggctctgaggctctgtcttcccagatctctgtctcaagagctacattctaaggctttgcttttaatcgcaccagggcacctggaagtgaggagagaactgaggggagtggggtttctgtccccctctccccaaacccaagccaactctgccttctgcaggcacagccagccttggcccgaccccactatctccaccatctcgtggccgtgcatcccctcccaaccacccttctccccaatttcaaaaaagcttgtgctcccagagaggaagtgcccctactctgagcttcttttggccttgacccacacataggcagacgtggactctgttttgagcaggtgaaccgccagcccagtggaagagcagcttcccttcccctagcttcctgattttccccagttgccatggtaattgagggagcagtgttctgagaatgacaccactgaaacccagcgctcaactttgaaatggttcgggcaagggacgctggacccaaaacaggaggggaccagactgcaaggactcagctccagcctcaattttctgggacccaccccccatccagcctgtatgctggattattctcatcatcatcaaaatcaccattattgttggcaactgtttcctgagcatttactatatgtctagcaccatgtcaagggcttcaccagcatcatctcattgtgtatatcctcacgacatccccaggcccatccatggctcaggaaacaggctctgaaacttgcccttgtggcagccaggaagtggcagagccctggggctggtggcatttctccaggcctccttccagcatgtggaagacagcatagacctccaggcaccctcgtcagcttattctttattccttcctcccctcctcatcccccacacccttcttcctgcccccaaagtcacacaccccctcccctgctggatgtgcaagacgatctgaaaagcatttattagtgacaaagggggtggtggttttcctctttgcctcttctctgcgcaactcgaagcctgagtgggtttgctccgcttggcaaggctggggaggaggaaaagatcaaatcacccagagccaggtgccaagtgtgtgtgtgtgtgtgtttgtgtgtgtgtatgtgcgcgtgtgcgcgtgcgcgtgtgtgtgtcctctctttccttgattttcccccgttttcccaagactgtgtgagcagcagcaacagcaacggggagatgcaaaatcctttgcaatctgcccaggaaaagacagattttgagtcgggtttatatggttacccatatgttagggcccctaagaaaggaagggaagctgcgttctctgtgtcttccctcctccagcccagaccttggcctctccacacctgtggggctcccaggccacagatgaacatgtgccctccatccttcactctccccagatgccaggcctgagtgtggctccagaaaagaccagaaccaggcaacatttcctgaacaggctgcttttctccgtctgtccacccgagagccaaggccagaacccaggctgcaacctctgcgggctcctgggaggggctcccagcactgcccagcctgggaggctgtgtgttccactgtcccattaaggaatgctatcccaacactgatgtagaggcagaaataaccatccctgcctcccatggggccttctctgcccaaatagacctgccctgccctgcgtggctactacattcagccctatccaggctcccagaaattgtcattgtgtgtgtgtgtgtgtgtgtgtgtgtgtgtgtatgtgtgtgtgtgtgtgtgtgtgtgtgtttcctgatagaaaaaaaaaaatggaaattaggttatataaaagatgtatgctttggagcccagagcggctcttttaatgagggttgcgacgtctccctccccacacccataaaccagtcgggttggacgtcactgctaattcgtttcagtgatgataggataaaggagggacattaagaaataaattccccctcacgaccctcgctgagctcacggctcagtccctacatatttatgccgcgtttccagccgctgggtgaggagctacttagcgccgcggctcctccgaggggcggccgggcagcgagcagcggccgagcggacggggtgagccaggggcgcgcgcggggcgcccagcactgcgccggggaagcccgcagcctccgtcccgaacttgggttcgctgaggctgagggaggggacgcaaggggagggaagaagagaagggaggagtgggggctaggggagagggggtggggagggatcttggaggcacaaagcggaggggaaggggagggacgcgcgcggctcctaccaggaggcgagtgggtgcaaccggcgccctccagccgcgcggggcggcggactcggaggattcagaacccggagcgcggcggccgcgggcgcccgggaggaagaggaggagtacgaggcgggcgggcgggtgcgcagcgcgaagaggcagcctcggcgctgcccggctcggcgtcaggtgagttcctgatccaggcgtcccgcgccccttctccgtccccagggctccccgctcccgcccgagcccctggtgtgcgcggaaggctcgggctttgctgcgcgtcccaacttggttcgggcggcctcattttcctcctagcgggcggcctcaggccgggggctccggtccgggggtctacgcgcccaggctccaactttgcaagaccctagtcgttcctcagccgcgcgcttggctccgagctgtgcgctggcggtaatggcggagcccttggcacagctcgctaccctcccgcgggcagcccgggctgggggatgccagtccctggggaccgttgtacctgcccaagctcaactttacgccttcctcggtgcccgactctgcggccgaatcgcaactgcgagccgcaggtaatggcggagtctttggcactgccagctgtccgcggctgggggcccgaggctgggagggctccgctcccggaacatcgctccggcctggcctccaactttgcgaggagcctcct

SEQ ID NO: 6016 - DNA, 6000 bp, Homo sapiens
tggctgggtttagggtgggggttcgtagggggttctcgcctctcttccttgtgtcactgcctctgagatgtgtcctctgtcctcgtctgtgtctccacagagcaagctggtgaagtacttcagccggcagctgtcctgcaaaaagaaggtagccttgcaggagcgcaacgcggagctggacggcttcccccagctacggcactggttccgaatcgtcgatgtgcgcaaggaggtcctggaggtgacctggggggcccctgtgtcccctgccccttactggccagcagctaccccctgtgttgctcttgagctgcaggtttctggctgtgcccagcacagtccctggcacatagcaggctctcaataaatatgtgctggacgaaaacattcaggatcgctgatgctgtctgaatggggtcattgagagtgtgcttccagagtcagttagaaccctccagctctgccacatattcacagagtcaccttggccaaatcacttcacttcttagtccagcgctgtccagtggaactttctgctacgatggaaatattttctatctgtgctgccggctgtggtagccacttgtggttaggacatgtgattgagattttaaattgtgtttaacattaattaatggggcccgtggctgccatatcgaacgatgctttcttagagcattaatattaccatctgtgaaatgtgcataatgattgtcatctcttcttaaatagccgacatcatagaatgagatgatttttataaaatgttcaactcagctgggcgcagtggctcatgcctgtgatcccagcactttgggaggccaaagcagatggatcgcttgagcacaggagtttgggaccagcctgggcaacatggcgaaactccatctctacaaaaaatacaaaaattagccgggtgtggtggtgcatgcctgtggtcctagctacttgggaggctgagggaggaggatcacctgagcccaggaggttgaggttacagtgagctatgatcatgcctctgcactccagcctgggtgacagagtgagaccctgtctcaaaaaaaaaaaaataaataaaaaacaaaaaacgaaaaaaacaggccaggcgcggtggctcatgcctgtaatcccagcacttttggcagatcacttgaggtcaggagtttgaggccagcctggccaacatggcaaaaccccgtctctactgaaagtacaaaaattagccgggcatggtggtgcacgcctgcagtcccagctactcgggaggctgaggcaggagaatagcttgaacctgtgagacagatgttgcagtgaactgagatcccaccactgtactccagcctgggtgtagagaaagactctgtctcaaaaaaaaaaaaaaaaaaaaaaaaagttcagctcatattctggcaccaaatagcactcagtagatgccagcctgttactgttgtgagcatctgacatcttatgtccgctctcaaagattagaccacgttcttaacatcttgaggattgtgagattttcttaccccctgggatcccagagaccgactcatttgcagtgacagggccaagccaaacctaataaaaccagcggacatcactgcatctttcatgccaggcattgtgcaaagggttttgcacttaggatctcaactgctgagactgttcagcctcctcgcaatgaccttttgagtaggtgtgactgttatcccccttgtacagagtgggaaactgaggctcagagctaagtgagtagtctagctggcaagtggatggggctagcaggatgtccagctcagatggacagcaaagctttaggtcagaagcactgtgcattagccttgttttcctgttgcctgggtccccccagagctgggcagaagaggagcttgcctccctgccagtgaaaccaagagtcctctctcgaggcgctccctgcttcctacttgaagaggcttcctgtcttttttagaccttgtccgcagggacaagaatctcacccagccccaccagatctaagaatcccaagttagaggcagcatcaccccgctccattcctccaggcccccaccccaccccatcttgcatatgcacatcagaccacgcgcaatctcgtatttccttatttcattcccagtatggccagatgagtttcttgcaaatatccttagaatgaatggtcctgtataaggacagacagtgttgtatttgcatggctcagggcatttcttttggaggcttcagagtcatttatatatcaagtgccacttgtgggggcaaataaggtagaaacgattcgattctagaccaggggttgaaaactggtggccctcaagctggttctgatatgcagacatgttgttgttgtttggttaatatgatgtcaggacatttattttgagccaatacttaaaaaccgaaagagtctgtctaaaaaacccagagatctctggcttcacttacaaaatcagaaatgttgaccatgctgaactgagctcctgtctggcagcgatttgctcatttacatttacctgacctgcaggtacctgagttttggctcttgccttagtcactgagcatcttgagtccagggacccagggagtgggcgggagaagacgtggggtttctgctctttgtctgcagttcaggtatgtgtccaccagaggtcccctttctgtgaagtgactgaagtatggagaaagctccacagtaaaacagctgggtttgaatcctggctccaccaatgacttgctgtgtgaccttaggcaagtggtctaacctctctgaattttactgtcctagtctgtaagtggtgatgataaaagtgcctactttcagtagtttttgtgataataaaaggaaatctatcaaaaaccttaaaacagtgttccatccatttcagctattattattactattattttatcaaacagaggtgtgtctgcccttttggcccaggtttgttaagggtttctccatttttgatgttataaaaatgttacttttatgatttttttctgaacttaagctttagagtaaattgaaatatatacatatataaatcataagattaaaatgcacaagtgaatcctgaagcaaagaggagaatccttttatgttatgaatcacccccttcaaacatgagtcattctgtaccttcagatcctggactgggtgcagtggctcaagtccgtaatctcagcacttttggaaaccgaggtgggaggatcacttgaggccaggaattcgagaccagcctgggcaacatagtgagatcctatctctacaaaaaaatttaaaaattagccaggcatgttggtgcatgcctgtagtcccagctactcaggagactgaggtgggagggtcgcttgaacccaggagtttgaggctgcagtgagatatgatggcctcactgcaccccagcctggtgacagagggagaccctgtctctatttaagaaaaacaacaaccagaaataaacagatccgtggtcatcacctttcttaaaggggctcaccagcaatgtgtccctatttgagaaagcctctaagtgactccactattcttctctctctgccccctgcctgcctgggtgagttgaaaaggcaccatagctcatatttttgaagataattttttgtactgagacagttttcttctttctggctatcagtttaatgtgggagctgtatcttgttgtaatacacaaacatgaccacaagagggtagatgtattccgcaatactgccctagaaacaccatccgtaggctatttcacccttatttactttcggaggctgaggtgggcagatcacctgaggtcaggagtttgagaccagcctggccaacatggtgaaaccctgtctctactaaaaatacaaaaattagccaggcgtggtggtgagtggctgtaatcctagctacttaggaggctgaggcaggagaatcgcttgaacccgggaggtggatgttgcagtgagccgagatcgcgccattgcactccagcctgggaaacaagagcgagactgtctcaaaacaaacaaacaaataaacaaaaaacaaaaaaaggcaaaaaacccttaagtaataacaatatatgttaaaatgttgagtagtaagtgctataaaagaagactcatatatacatacagatactgatgcataaatatagaagcttgacaaattttgaggtgtgtccatatgatggtctagggagacactgttttgggaacatggggtggcggtgaaagttcacctgcccaacacgttaagttgggaatcctaccttttctaggtccctttcccccactccacgctatactccagtgtttctgctttgccttaggatgcaaagccatgccccatggggctcaaaaacaaacctagtttcatttccagcacggggcatggactttcagccccttttccattagggtttctgaagaccagtgtgagccctagaccctgcagccagagaagagaggaagcagagagagagtgggacccagccaccagcacacctgccttgtcctgtgcttgctctgagtttgtgctgggattttagatgagtccctgcagagtgggaggcactgagagccaagcaaacatgaaaaaatggggccctgccttataaacattcgagagacaggcacagtgttgacgccagacagggtagtaattataatagcactaagcacctgcgctaccttgccaagtatggacacttaggagtcccactttacagatgagcaaagtgaggcccagagaggttgagcgactggtcagaggttatctagataatgagtggcaaacccgagattcggagaccccactgtcatgcaaagcgtttacactgcggagtgttctcctctaggcaccactacagggcagcgtggaggcagagatgctgttcctgccccacggttgacaatccttctcccctcctctaggaaatctcccccggccagctgagcctggaggacctcttggagatgacggatgaacaggtgtgcgagactgtggagaaatacggagccaaccgggaggagtgtgcccgcctcaacgcctccctctcctgcctcaggaatgtccacatgtcaggtgagcaggccccggggtcggggatgtggagacttgtccccagcacagctgccgcggtccctcggcatcccgtgcccgccactgcaggccaggacgagacagagtcaaccctggggggcaaatccgaaacgcaggaagaggcagcgtggacctgggatttggaggccggaagacaccagcaagggcagctcttggatttgaactcttgccccaggaagacccgctgaggtttagggtatctggttctggataattagggtccagatatgaaaatattgagtgtgaataggagaccagggtctttttactttagacattctgacgtggctttgcattttgggtcaatgtctagcttctaattttttttttaacagaagtaatttgcattaattgtaacataaaccagaaaatagattttaaaaaaatcaccctaagctccaccctctaggtaactgctcttgtcattttggtataatttttcctgacaaatggatatatgtatactttaaaaaatagaattatccacacatattgcttaaatttttttttttttcacctaataaaataacctctgtgacttgttctatcagtttgggggccaaatatattgtcatccctcctggatcttttccattaattgctcagatacctgtttgtctttattagcagaacatcagatatcatcttcctgaggcttcctgcttctctttagcctcatgatttttctgcaaattctggggcctttctgtcccaagggatccgctctgcacatgccagccacggagaagtgttagtggccatcagcacggttgttgcagttcccaccacaaggtgtcactgttgagcatcagtctggcagagtcaggtggaggctcacagatgcccttgcttgattc

SEQ ID NO: 6017 - DNA, 6000 bp, Homo sapiens; identical to SEQ ID NO: 3240

SEQ ID NO: 6018 - DNA, 6000 bp, Homo sapiens
cccaggctggaatacagtggcacaatcatggattgctgcagcctccaactcctgagctcaagcaatcctctcacctcagcctccaaagcagctaggactacaggcaagtgccaccacacctggccaatttttttttttttttttttttttttgagacggagtctcactctgtcgcccaggctgggtgcagtggtgtgatctcggctcactgcaagctccacctcctgggttcacgccattctcctgcctcagcctcccgagtagctgagactataggcatccgccaccatgcccagctagttttttgtatttttagtagagacagggtttcaccgtgttagccaggatggcctcgatctcctgacctcgtgatccgcctgcctcggccacccaaagtgctgggattacaacacctggctaatttttaaattttttgtacagagtgagtctccctatgttgcccgggctggttttgaactcctgggttcaagtgatcctcccacttcagcctcctaaagtgttgggagtgctcacccagccaataaatggttattcttttttgctaatggtagtaaattgatattctcaggtttgtcataatggttttacttcaaatgagcaaaccctatacattcatatagcaatttctactgcagtcttgttactaaagtttttaagaaattggtaggcctggtgcggtggctcacgcctttaatcccagcactttgggaggccgaggcgggtggatcacgaggtcaggagatcgagaccatcctggctaacacggtgaaaccctgtctctactaaaaatacaaaaaattacccgggcacggtggcgggcacctgtagtcccagctactcgggaggctgaggcaggagaatggcgtgcacccaggaggcggagcttgcattgagccaagatcgtgccactgcagtccagcctgggcgaaagagtgagactccatctcgaaaaaaaaaaaaagccaagcgtggtgcacacctgtagtcccagctactggggaggttgaggcaggagaattgcttgagcccaggagttaagaggctacagtgagctatgattgtgccactgcactcctaggcaacagagtgagacactgtctctcattttttttttggtatgtctttctgtccttcttaaagtgtttcatgacccatttagcataacgtacttgtagttgttatccattactgtatcaccccacattacctgacaaaaataattacctgataaaaatcaatgtggcaccatgtggtgccaactatctattcgtccatgaagtcttacaaattgaaaagtccatataatatttacaaaaatgatactgaaccaattgagtgctatgcctttgaacatgcttctcttgttttgaggcagggtctcactgtcactcaggctggagtgcagttgtgcaatctcggctcactgcaacctccgcctccagtgctcaagcaattcttccacctcagccacctgaatggctgggaccacaggcgcatgccaccatgcccaggtaattttttaaatttttatttatctattatttattgagacagagtttcactctgtcgcccaggctggagcgcagtggcacgatcttggctcactccagcctctgcctcccagattcaagcgattctcctgcctcagcctcctgagtagctgggactacaggcatgcgccaccatacccagcaagtttttgtattagtagagacaggctttcaccatgttggccagggtggtcttgaactcctgacctcaggtgatctgcccatctcagcctcccaaagtgctgggattacaggcgtgcaccaccatgcctcacctaacatctgttttataaacaaatgtttataaaacatcttggaagaacccaaggatggaaaccggacagtgggtgggatatggagaagggtcttaaaacctgtagattcagttatgtttagagtctggatgaggtatgctaggaaaggggtggtgagagagctggggtggggaagttggtgggaaggacggtattcaggtactgaagactgaagaaaggttgggagtcattgtcaagtaggcagccagcgtcaggacccaaggactcacccataggtaggtatttccaaagcagttactgcttgaataagaacattacttctacctagataatacattaaaacacagtagttctcaactttggtactgaccttaggtgattaaaagactctaaacaagtctgcagtatttgtagggtaactatagcagttgtctctcctggtctataaaagcacctgttgttacttcatcattttgtagcatcctgatcctgcttggggatagtttatcatcctagtcttagttacactcacacatccttgagatttcactaacctggggcatttcacctcttggagtaagttataccctcatttaacagctcatgacatggcctgctgaacacaacttttattctcacaggcgttaacatgatgcattctcttggctgtgagtctgtatatagaaaaagaattgtgtattatcagccaggagcagtagcaggcatctgtagtcccagttactctggaggctgaggccagatgatagctggaacccaagagcttgaggccaacctaggcaacatagggaaaccccatttctattaaaaaaaaaaaaaaaaaaaagctgggcgcggtggctcacgcctgtaatcccagcactttgggaggccgaggcgggcggatcacaaggtcaggagatcaagaccatcttggctaacacggtgaaaccccgtctctactaaaaatagaaaaaaaataagccgggcgtggtggcgggcgcctgtagtcccagctgctggggagactgaggcaggaaaatggcgtgaacccgggaggcggagcttgcagtgagccgagatcgcgccactgcactccagcctgggcgacagggcgagactccatctcaaaaaaaaaaaataataaaaataaaaaaataaaaaaataaatctctgttgaggctgagaaccaccttgaaaaccaggttgagaactaaagcatggaagcgtttccatgtgtgttttgtttttgtttttgagacgagtctcgctctgtcgcccagcctggagtgcagtggtgagatctcggctcactgcaaccttcgcctcccgggttcacgccattctcctgcctcagcctcccgagtagctgggactacaggcgcccgccaccatgcccggctaattttctgtatttttagtagagacagggtttcaccgtgttagccaggatggtttcgatctcctgacctcgtgatccacccgcctcggcctcccaaagtgctgggattacaggcgtgagccaccgtgcccggcctccatgtgtgttaaattattaaaatctaaatgtccttgctggaatcaaattgagaacagaagtttttggttgagtggctgcttttctgcaccatccacaaatatcactctgcttgttcagactctatgataagtgcttcataatgtaaactgtatagaagatgctggaggaggccgggcacagtggctcacacctgtaatcccagcactgggaggccgagacgggcggatcatgaggtcaggagttcgagaccagcctggccaacatggagaaaccccatctctactaaaaatacaaaaaattagccgggcgtggtggcacgcgcctgtagtcccagctactcgggaggctgaggcagaagaatcgcttgacccaggaggcagagattgcagtgagccaagatggcacgactgcactccagcctgggcaacagagcaagattccgtctcaaaaaaaaaaaaaaaaaaaaaggaagctttgcactcaaagaaggaaattttcatctttgaccagatcccaaaggcccatttccaccccaaagtatcaaaacgcatatatcctactaatattaatagtttattgagcaattaagttccaggcacccagttaagcctctcacgtggactgcacgatgaaattcataccctcattgatcctcactacaactcagaggtaacatggaattttactgaggcaaatggtgggacctggattccagaagcaatactatttgtgtgaaatgtcatgtcactgtaaaagtctgttagggattacccaaaaaaaaaaaaaaaaaaaaaagtccactcaagattccctcgactcctcaccatattgatacattttagctcagaaattaaaacagccttgattagtgcaaagctaagaaacttctgactgctataatttaagatttgagcagtgggtggcggcgcgcacctgtggttccagctactctggcggctgaggtgggaagatcacttgagcccgggaggtggaggctacagtgagctatgatcacgtcactgcactccagcctgggcgacagggcgagacactgtctcaaaaaaaaaaaagttttttttcctatccaagtttagccttaagatatcatcttgcagcaagtacctttgctgcaaataaaaattcgcgatttttaaaagggacaagagagagtcaatgtcttttttttttttttttgagacgaagtctgcccaggctggtctcaaactcccggcctgaagcgatcactcctacctcggcctcttaaagtgttgggattacaggcgtaagccaccgcgcccggtctactccagatctttaaaatcgcttttcagcgcccgacgactcctggagtgaccagactctgaaacgcgctctgggtcttggcgagaatctgaataaccaccggggtagaagaaagaggcggacactagggccagactaggtagaacccgaacccagcagattccggtttccgggttggcgtgcgctgccgtaccggtcacgtggacgtttggtcacgtgactgcgtccgtggtcctcccgtaggaaccggcggactcggttggcgttgtggggcagggggtggtggagcaagatggcggctcatctgtcctacggccgagtgaacctaaacgtgttgcgcgaggcggtgcgtcgcgagctgcgcgagttcctggacaagtgcgcaggaagcaaggtgaggggcgggaggcagcgacaccgccctcgcctcccctggtccggcctggtttaatccgttccctgaccgcctgagttcgcggtttatgaggtccttggggcttccaaggaggcgagcctcagggcccttttacctgcacccctgtgcaggaggcagcgatgaaggggggggccctgggcgtacagcctggagccggagtggcaccgcgactgttttgtgagagcagagtaagccactgtgatagcccggcagctgatgagctggtttacgtcaggtgtttcctccgctgcctgccgaggcaccggacgggtgagcggtccaagaatgtggatggtccagtgtccattcattacagggatcatacgtgtaccttagaagctctcttgaaacacctgcaccttgcaacctgctgctcacgcgtgttatgagagaagttgtaatcatttgggcttttaacctggcctcctaaaacagtataacttctctagtagcacccttttcacaagggagtcaggaactagatcagagattttataggatttcttttaaacagtgtcacctctccttcatccccttagggtttatcagtcaccctaagttactgacagtacaactgtgaaaagtcgaactggggagcctcagtcttgtagagaacagaaccccaagaggtaaagtgggtgctagcagcctttgagagaagaaagcagtctacatcataggggcccagtttcaattcagaaaaggatgctgaaatctgaataacatcatggattgtatcaatgtcagtatcctggttgtaatatgttacccctggaggaaactgagcaaagtgtacaggggctcgctctgtattatttcttttaactaaacgttaatgtacaattatttaaataaataagaaaaagaaatgatactgga

SEQ ID NO: 6019 - DNA, 6000 bp, Homo sapiens
ggatgaagtcaggttctcctgagctacatgggaagctggtggggacaggggtgggttaaggaagacaaatatgtgaagagaatcaggattgtttggaaaaagaaagagtatggatgttggctaattagtcaatcatatccattacattttagtacggaatggagttgctggccgggcgtggtggctctagcctgtaatcccagcactttgggaagccaaggcaggcagatcacctgacttcaggagttcaacaccagcctggccaacatggtaaaaccccacctctataaaaaatataaaaattagctgggtatgatggcagatgcctgtaatcccagctacttggggggctgaggcgggagaagcacttgaacctgggaggtggaggtaatggtgagccgagatggcactatcgcactttagcctgggcaacagagcaagactccgtctcaaaaaaaaaaaaaaaaaaaaaaagaatggggttgctgatagaagttactgcaatgatggtgtgaaatagactatgctgtccaatacggtagccactagccacaaaccacttgcaatatggctagtgtaactgaggaacagaatttttcattttatttaattttaactagtttcaatagccacacatagctagtggctcctgcgctggactatgcagatatggagaattttctctatgataacaaaaataagacaatagtgagtggggagggtttaggaaagctagaaagtgtctgccatctaaagacagtggctgctgctgagtgtcagcagattgtggctacagggggaagcaaatgtgtttccattacctgttgctacataataaactgccccagaatttagtggcttaaaagaacaaccatgttatttgtttacaattctgctatctgggttgaggctcagctgtgtggttcttctgctggtcttcacatggctgcattcagtaggcaggtcatctggaatgctgagaatcccctctccacatagttgcagactcctcctcaacatatgatggaaggcaggtggacgtctaatatgatggctccggacaccccagtcatgaaagtggaaggtgtcagactttaagcctgtgcccagaccaggcccagagacacttttgatgtattctcttggtcaaaacaggtcacaggacaggccctgtggtgtgatctctgaggaatacataaaggcttgaatactatggggcatggttcaaagtgatgggatcatactaatgtaacaggtaatcacaagtccagcattgccagagctcacatttattttccccaaatagcaaggcatccaaatttatatgtgaaacctttcaaactgtaactattagttcactttcttttggtaccagctttatggagacatattcgcataccatataattcacttatataaactgtagaattcagtggttttttagtacattcacagagatgtgcaccaatcttcccctcccctcccccagtatcaggaaactgtactaatctgcattgtctgtatggatttgcctattgcctattctggccattgcatataaatgtgatcttgccagatgtggtcttggctcacttttttgtttttttaaacttagctttagttttctcaaatgaggcaatgcaatcggattagtttactatcattcaaaaatggcagagtgtattgagcactgtttggacactgggttatcacatgattcaaatcatttgctttgctttcattccatgtttaatgttaattttactctagactttgcctgagcgtcaaacctatcagtcttagaaaaaatactcaaagattctgtctcctctaccaactgcaaagtggaagcagcactggactcataattagatataagcctttcattgaagtctgagttctattgctttcttttttattttttattttgagacagtttcgctctatcacccaggctggagtgcagtggcgtgatctcggctcactgcaactccacctcccaggctcaagcgattctcctgcctgagcctcttgagtagctgggattacaggtgcgcaacactaccgcctggctaatttttgtaattttagtagagatggggtttcaccatgttggcccggctggtctttaactcctgacttcaagtgatctgcctgccttggcctcccaaagtgctgagattacaggcatgagccactgtgccactgcactccagcctgggttacaagagcgaaactccatctcaaaaagaaaaaaaaaaaatggcacatatgtgtgtgtgtgtgtctatatgtacatgttcaaggacatatattagtatccaataataagttaaaatactaatatatgcccttgaacatgtatagacacatatatatacacatgtatacatgcacacatatacacacacttatatacacacatatatacatatatacacacagatatacatatgtgtatacacacacatatatgagaacataaggtgacttgcatcatttacattcaacaaatggtcagtcattcactcatccagttcaatctaatacctatttatcattggcaagtgctgtgccagcctctagaactacaatcgtggttaaaacaaagatcccggccatcccagctttgaagacaggcattcaatagttgcacaaaataagtataaattataaccggtgctgtgggaaaaaagtatagggagttccaaggccataaaaacggggagctaacctagtgtggcagggttaggaaagtgatatttgagctgacagctggaaatgacaagcatcaacagacaggtggcaaaggtccaattcgggcattcaattattctctccttagacattgattaaatatatattgcctgctgtgtggcagcactgtgctgaccatcagtctatctgtcggacatttaaaaaagttttttaaaaagagaatgcatgcaacttcaagacttactggcaggattacttctccagatgacctactggcaagccaacttcccagctactggctccaccctcatcttagctggagggaatgatgaaggaagaggaggtggtcttacactaattgaatcattgcagcagctgtggatcacgattcctttctttcttgcctttttttttttttttttttgagacagggtctcactatgtcacccaggctggagtgcagtgatgccctcactgctgaatgcagcctctacctcccgggctcaagcaatcctcttgcctcagcctcccaaagtgctgagattataggcgtgagccatcatcccaggccggggtctcaatttcttttttttttgtctttttttttttttttgagacgaagtctcactctgtcaccaggccggaatgcagtggcacaatctcggctcactgcaacctctgcctccctggttcaagcgattctcctgcctcagcctcctgagtagctgggactacaggcgcctgccaccacgcccagctaatttttgtatttttagtagagacggggtttcaccatgttggccaggatggtatcgatctcttgacctcgtgatccgtccgcctcggcctcccaaagtgctgggattgtagacgtgagccaccatcccaggccggggtctcaatttctgaagccatgctgagggccatttttgggcggcactctttcactccactatgtgccaggcgctgtcccagaggcagggggcacagtgaggaacaaaacacaagagaatcctgccatcaggaagcttacacctgttaacacatgcaggttggggagataaacgaataaattaaaaaatgtaacaggtaataaggagaaaagagtaacatgatggaatgggatactcgggccttggacaggctagtgaaaaaaatgtttctctgaagtcaacacttcggtggaaggttgaaggatgagaagccagccatgcaaccatagatggtgtaggggcagtctctgggaaagcctgaaacaggctggagcttgccttgttctaagccagtgagtctcaatgggggcgtatttgcccccaggagtccttcggcaaagtctagaagacattttcggttgttaacctgaggtgctagggggtggaactggcccctagtggatagcagaggccaaagctgctgctgaacatcgtgcaacgcacaggacagtcccgtcgctcaaagtgccaacgatgcacgggttgagaaaccgggtcctctccaggactgaagcccagggcagggagcacgggggcagcctgagcaaacccgcctggagagcagccgccgtctcagtgtgagttttggctgcctactgggccccaccgaagcccgaagagggccaggctccggcttctttgtttaaactcccttagtccgactgcctgcagtggctcatgcacgtaattccaacactatgggaggctgagacgtgaggaacgcttgatgccaggagttcgagaccaacctgagcaacaaagcgagaccccatttcaaaaaactgtttaaaaattagccacaggcagcggcgagcgcctgcggtcccagctacccgggaggctgaggtgggagggccgcttgatcctgggaagctgaggctgcagtgaggcgtaaccgcatgactgcgctccagcctgggcgagagagggaaaccctgtctcaaaaaggcaaacaaaggctctcggccgccaagctgcggaatcccaagctccccaagacacgcagtgatccagaataccggccacctcctcgcctagtgcccggggcggggccggaagttccggcgagtggggcgttgagcagcggcgagcccgcccaatagggacatctcaggcccggcagtctcgcgagaagggcggcggccctgggttctgggacaggtgacccggcggcggggcgaggcagctggcggcgtcgcatggagggctctgggggcggtgcgggcgagcgggcgccgctgctgggcgcgcggcgggcggcggcggccgcggcggcggctggggcgttcgcgggccggcgcgcggcgtgcggggccgtgctgctgacggagctgctggagcgcgccgctttctacggcatcacgtccaacctggtgctattcctgaacggggcgccgttctgctgggagggcgcgcaggccagcgaggcgctgctgctcttcatgggcctcacctacctgggctcgccgttcggaggctggctggccgacgcgcggctgggccgggcgcgcgccatcctgctgagcctggcgctctacctgctgggcatgctggccttcccgctgctggccgcgcccgccacgcgagccgcgctctgcggttccgcgcgcctgctcaactgcacggcgcctggtcccgacgccgccgcccgctgctgctcaccggccaccttcgcggggctggtgctggtgggcctgggcgtggccaccgtcaaggccaacatcacgcccttcggcgccgaccaggtgagccgcgcccccgcgcgctgtccctgtccctgtccagcccctgcccagccccagcctcttcccctgccccagtccctgcctctgaccgcggagggagccccttgccccggggggcttctgtctagtgccgaggaatcccgccagcaggtgggccaagactggaggtaccggtgtgatgggtgctggaaggggtttgcctggggcggggtgaggtctacacacacagtgatggccacagtggctttaaagaaaagagaggccgggcgcggtggctcacgcctgtaattccagcactttgggaggccgaggcgggaggatctcttgagcccaggactttgagaccaggttgggcaacacagtgagacctcatctctaccaaaatttaaaaatttgccctccgtggaggcgcacacctgtagtcctagcagagaaaggaggattccttgagcctacgagtttcggaggctgcagtgagctagggtcacaccagtgcactctagcttgggtaacagagtgagaccccacctcaaaaaaataaataa

SEQ ID NO: 6020 - DNA, 6000 bp, Homo sapiens
aaaaattcataagttttctagaatgtctaatttttcttttatatgtttgaatacttgatttatctggaattaacttatgtgtaagaactttttcccttaattatcctgtattctgacaattatttattgagtattctatattttcttattgattagaaatactattttatcatatattaaattctcatatgtaattggatttgtttatggaccacccagtttgttctatgggtctgtctgttcatgtaccatgacaaaacaattttatttatatatttataatatattttaatgtctggtaaaactagttttctttcattactttttcttgccttcaataaaatgtctgggttatacttttgtgcttatatttccatactaagtttagaatcagcttccagaggtctggaaaaaaatctcggctttatgttgattgtaatcatattaaatgttaaggttgatttcaggagaattttataaaatttaaggaccctctccaagtgtggggttggcttttctttttgctccatttttcttttattttttcctcagttttcttcatatatatcttacacatttctaggcatgcctttctttttgtatgctattataaatggaatttttttccccttccattatacttcctaactgattattgcttttatataggaaacctattgacttttgtatattatttttgttcctccaaaataatatgcaataatatacaaatatatatttgctgggaacctaaaataatacactattctattcaattatggaatatatctagagctctccttttttttttttttttttgagacagggtcttgctctgtcacccaggctggagtgcagtggtgtgatcatggctcactgcgaccttcacctcctgggctcaggtgatcctcccacctcagcccccgagtagctgggactacagacatgaggcatcacacctggctaattttttgtatttttcatagagacaggcttttaccatgttgcccaggctggtctcaaattccagagctcaagtggtcctcccgtctcagcctcccaaagtgttgggattacaggtataagccaccacgccagacctattctatcctctcctattcaattcttatttgtaacagtttttctgtgattggttcatctgggtttccaggtagatcatcatgtcatctccaatactgcctagtttttagacctttctgactaccctactacttgtaaacagggcaggtttttccgagagatgttcctagctgagtgctgcacttatggtgaacacccagcttcaaaggctacttgaaaggatttagggggctgcacttacccaccggccttggaattggcctcatagaaaacttgctgtgctttgtggaagctcgggcccgcagaggtgctgatggtcagtgtcagcacagacctattattagctgtccagcgacaggagattccactttaatgctgaagcttcagaactacgttgcaaacaaaatgactggcattttctcagacagcagttccaagtggaaactgtctagttgtgctgtctccatacggagggctggaaaactgtgaatggcaattatgcagctttgcatctcacacttcctgacatctggcaaacactcgttccatccaggaccagataaaacaaatggtgccttattcacaggagtctttaacggcctaatagacccgatgagtagcaatgcctttgtgtggcctgtgtgcagtccagagctagcaggttgcctatgacaagcgctggagggggtcagcacttttgattccatcaccgaaactggtccccaccacagcagctcatttttcagaactggctagctccttcctgctgggttgaatacatcctcattcttcacaggcccagaatggcttcatctggattgttagttacctatgaaagtctctggtttgttacatttttttcagtattttatgcacaaaatttacctaatttttgtgaagttagaacatgacaccaagaaatggaatcctgtattatttttcttttctttcctttttttcttttctctttttttttttttttgaggcagagtctcactctgtcccccaggctggggtgcagtggagcaatcatagctcattgcagccttgacccccctgggctcaagccatcctcccacctcagcctcctgagtagctgggaccacagccgtgcactaccatgcccagctaagttttgtattttttgtagagatggggtctcactacgttgtccaggctggtcttgaactacgaggctcaagtgatcctcccactctggcctcccaaagtgctaggattacaggcatgagccactgtgcctggccctgcattctttctatgatttgaccatgtgtctcttggcagctacagtcaactctttggtctcaagttgtccagctgaaaaagtgggctcctcacgccgagacccatgacatgcagccccacacacatgggatactgcagacgacagtgcagccatgacagagactcagtggggctggtgcagacagcaatggccctgtatggggagaacccagcatctttgaatggaaacattttttgcagcttatttgttttcgaaccttggctttttggcctaaatgttccatggcattccttaacaattaatttcctctctgctgagaaaacaaaggtggagagtcattttcatgccactgaatgaccttttaaaagattgaatcctttctaagggggaatagctttatttccttctgtcaaatatttcatttgtcccctagaagagccccgtgaagtagacattatgtgataagcagacacgatcgttttacagatgtgggaaaagactgacctgctccaggccacacagatggagtcaggaaggggcagactgggtcagtggggcccaattcacaggcactttctacggtcttttcatatgtttttatggaggtaaagttcacatcacataaaattaaccattttaaagtaaacaattcagcggcatttaatacattcacagtcttgtgcaactgccacctctctcttgttccaatgtgttctcaccaccccaaaaggaaaccccactccagtaaggagtcactcctcatctcctctcctcctagccctcagcaaccaccagtctcctttctgtctctatgaattcgcctattttggatatttcataaaaatgggctcatacgatagatgggctttgtgtctggcttctttccccagcatggtgctctcaaggtccatccatgtggtagcaggaatcacatactccattcctttttcctggctgaataatattgcattgtatggatatgccacattttgtttccccattcatccattgatgggcacttgtgtcatttctaccctttggctgttgagagcagcgcagctgtgaacatgtgtgtacgagtatctggtaaccagtcccttccacgattttctgcagtcttgtagtttctgtgacctgataactctgctgcagggtgaaaaggaatcatctgtggtttgccacctactcctggatacagcacgtatctctttgttccatgcacagaggctggggccactctacacggggcttgaaagaagcctccagtcttgcagccaaattcagaggcatataattcagaagcctatccgggaggccaaaatgagtcctgactgggaaaactcgctggacccgtctgccacagtgttgaaaaagttgtcttgggaagaggtttcctctggctgtctaggtttgagacctttgcgattcctttaagatcacaagcaaaaccacggtgatggtaggatgtgttggttttactaaggagcccattttttaaaaaacttgtaaagtgagccttaattggagaagcaacagaaagcacctcgggacaagtccttcctttttgtacaaaggacccgtggtgagcccttccttggaattctcgtgtcctacactcgagtcttgtccctgcacagggccatcattagtaggagccctcagagcctcaattagggtatgtggagcccaaaataccaaaggggctttcctccgcatgagctatcttattcagcacctttcagtaacaagccatgggatttttaccccagggaaggaagcaagtgtgtgaagtccgtgcgtgtttcccagggttttttccctcctgcaccacccggttgctaggtagcgggtatatctgtgccaccacctgaagttctgtgggaagggggaatctgcggggccactggaggcttggggtggggaggggagccggacaggagagcaaagacccaggcagcttgggtcgctcctcttcatcacttaattctgagggcgcttgagtttctgagcttcctggagtagagcccagggcagcttttactttgatgtgctgatcggttgcctgtcggttgcaggagacccccggcctcctgcagggaagatcctgtgctgttttcccagggatggagagaaaagcaccaaccccaagccccgcatggctgagagctgtttgcctccatctctgtccgagcttttcaccacagctctgtgaaagaaactggcagtgaggggtatagccatcttggtgtgtgtatgcgcacgtgtgtgtgcatgtgtatttgtgtgtgtgtgtgtgtgcgttcaaacactgacgtttcagaggctctggttactgctgcatggcggatgatcctctctctctccctctctctccctccctctctccctctcgacctgcttgcctgcctgcagaaaactaatgaatcatgtctagctgaatgcaagcagtgcagacacaccaatgccctgcaatgttgactgggcgccgcctctgcctgcctctcgctccctgtctctccctctgctgctccctccctccctctctccctctccccctcctccctccctccttctctccctctccccctcctccctccctccgtctcgcccccagtttgtaatctgacacagtacactgcagttgtctccgaggtgaacctccggagccttggcacagctcgcttctaaaggtaggctgagatttatttttttctcctaaaaatagcttcccgtctcccctcgcctttctgcacccgagctgcagcggcgttgatcacagggggttagccggaaactctttgcccagacaaagtttatcttgcagcggatggagaatgcccttcagcgtggggtccgggggcgctgggtgcggggagcagcggctcgccctgctggcatgtcggtgctgcttggaattcaggatcgtctcggaagggaagggctgacgggcttcttcctgggtgccgggtgtcagctgcaggggtgctgtggctctgtcatggcccccaccccaggcttttaagaaaggcccctccaggcaaagtttggcacccgatggacacggccccgctcgcctggggagtgcgccccaggcttctcagacagcagcggctcagggcctggacttgtcttcttgggggcggggtggagggggggaaggggacgtgggacaaacacatcagagtccccagctcggctcaggtgcaaatgcacaaagcccgcaggctgcgcccaggaatctgtcaattcacgtcccatggactgacttgaataatgtgtttgtcaaaacagatgttccccggcagagtgtgtgcgtgcatgcgtgtgcctgtgtgagcagtgtgcgcgggctgctggccgggggcagactctcccagtggaaaccgtatttcaccgggaaaggcagcgcgtacgggaccacccgcccaggagcttaggtctgggtaggtccaggtgggggcccggacatctgtcagcagaggcctcggtggaagcagcctccctcctgtccccggggagcgcacgctggctgaggtcggggtggcggctggccggagggagggaggactgcttcacctcccggcctggtcactggccccgggggaggcgggggtgctggctccgtgcctgcg

SEQ ID NO: 6021 - DNA, 6000 bp, Homo sapiens
cggtttcaagaacagctgaagtatccttagaaataaagggtcagcccctctgggcctgagcattccaatcaacctttattgagttctcctttaggataggccccaaacaaggagctcagagtcttgaagagatagaggatcagtaaataggtaactgtgacaccaggcaagagtgagggatggcagtggggcgggcagagtgaaatctttaaggaagttgggagttaattagattggagagaatgggaaatttctagcaaggaaagaaacagctagaaatagcggtaaaagagaaaggcaattagttctgaagggctctaacctagagtatatgtggtggaggcaattgaagagttgattcacagagacccttgtatgctgagttaagtgtaacagatgatgtaatgtaatagatcatcactgaaagggtgtaagccagagagtgacatgatcacatttatgttttaagtagaccctgtggctacagcatgcagattagaggagggttaagcctgagaaccagctgggtgcagtggcttaggcccgtaatctcagcatttgggaggctgaggcgggagaatcacttgaagtcaagagtttgagaccagcctgggcaacacagtgagaccccacctctaccaaaaaaaaaaaaaaaacacaaaaacacaaaaaagcaatttcaggcaccaggaaatgaaggcctgaattagggtggtgatagagaaaggttaggagggaacacaggagagccatttagaagagtgatgctcaacagaaataaaatgggtcaggagccatattagaaaagtaaagagaaataggggaaattaatttaaataatatattttagttaaccaaaaatattcaaaatattattatttcggcatgcagccaatataaacatttccgaaatgcttctttttatttggcattgtctgaaagtccacttacagcatctagatttggactagttatatttcaagtattcaacggccatctgaagttagcagctgctatactgggtaatgcagaaaagctacaaagatttcttggccgattagatgtggtggtggtggtggtggtggtggtgtgtgtgtgtgtgtgtgtgtgtgtgtgtgtgtgctgggagcctagaggtaaggaaacaagagatattgaccatgactcccaggtctctggcctggctggttattgccattagtggagagagtagatataaaagtggggtaggtttggataggaagacagtgaatttgaatttgaccttggcattcaaatggaaattggttccaggacccccacctcactaaatctgctgaataaaatggcttagtatctgtagagaaactacatacatccccctgtgtactttattattatcattttgatacagagtcttgctctgtcacccagactagaatgcaatggcatgatcttggctcactgcaacctctggctcccgggttcaagtaattctcctgcctcagcctcccaagtagctgggattacaggcatgcgccaccatgcccggctaatttttgtacttttgtattttttttttttttttttttttgagatagaatttcgctcttgttgcccaggctggagtgcagtggtgcgatcttggctcactgcaacctctgcctcccaggttcaagtgattcttctgcctcagcctcctgagtagctgggattacaggcatgcgccaccatgcctgcctaattttttgtatttttagtagagatggggtttctccatgttggtcaggctggtctcgaactcttgacctcaggtgatccgcccgccttggcctcccaaagtactgggattacaggtgtgagccactgcacctggcctaatttatgtatttttagtagagatgaggtttcaccatgttggccaggctggtcttgaactcctggcctcaagtgatctgcctgcctcagcctcccaaagtcttgggattatgggtgtgagccaccacgcccagccttttcccatatgctttaaatcatctctagattacttataatacctaatgcaatgtacatgctctgtaaatagttgctatactgtattgttttttatttgtatcattttgtattgttattttttatttttatttttcccaaatatttttccatttgcagtttgctgaagctgtggatgcagaacccatgaatatggagggccaactgtattttgtaggcagttgaaaacattgccctggagctcaggagatggctctggctggagaattcatgccaagggcagcctatagatggaagcagaaggcatgggtgtagatgatttagcctatggatagtgggcagacaaaagggagaagacattaagaacaaaactctgcggagaaaactccagtttaaaggattaataggaggactaggatctgcaaaggaggctaagaaggaatatgtaagaagtagaaagaaatgcaggagagtgaagttattgatgctaaagtaaaagggactctgggtgaccaacagtgtcacaggctggagggtgggcaaatgtttgctcttcggtctgggttggcctgttctttgccctttgggctggtgataagagggggcagggaagaagtgggagagagacagggagcaccaggacctgttagttctggagactggtatcctggggactgcattccctgctgtggtgaccattcccctcctccccgctgctctggctggggaaggtcactttgttttgccccatgttgttaggagtctcctgtgatgcctccttccggccaccgcccagccaggggaaatgtacctggcattttcgtccgtccacgctcctgaggtcctcctcaaactccactcccacatcaaactgcacagtgtagtttcggaaggtgctgagcgtcctcaccgtcatgtggttgccctggtgttcgatctccttgtccggcttcagcagcagcgcgatcttccgcacagccaagctgatgtctgtgggggctgcctgttagtaggggtgctgctagccagccaggagctcctctgcctgcagcagcccctcagggctgtgagtttcccttctttgggtctgggactgtggattcaccccctcctaccaatgcctggttagaaatggatcccaggtctggtgccagccgcctgagcctttccacagtgtccaaccccgggcattccctcttctccatgggaccaagaagcaggaaggaagaggggagaaagggagtgacaggggtctgggagggcgaggccattacttagggcttgcaggtagtcctccatgttcttctgcgagacaaagcggtagtagccagtgaggttgggaggcattgtgtggatgaaggtttcaggagaatgcaggagacagggtgaggaaggagggggtgttgtctggcaggtgaggctgagagattccagccagctccacacacagagacaggatgtgtaatggccgggttaccagggctttttataaggctggggccctgttgcaataagagtccctaccagacttcttccctccccgcatggtgagtttgggggtggtgtctccagcctgaaggaggggcagggatttggcaaagttgcgcctgaccttggcttttcctgaggaaggaacctggagcaggatccttcctgaggaaggaacctggagcaggatctggggctgtcagtcatccaaaactcagccatccaaaggtcagtgttggcctccacctcatttctggcaggcttgggaaccgtcccagggcctgaggggcagtctttcctgggagacacctgaggctggtctggctgtgtgaggtggagatgagttccaacaatatcctgagatcctgggactgagtgatgttggaagatgtgaggggagggggtgaggatggccagctgccaccatgaagagcaccctgtaggcctggctctcagagctccctcaggtagtgtgctcaactgggaccccaaagtggcattccagactcttggtcctaaagagccattaggagggaggtggagcccgaggggtgctgagttcaaagtccggaacagacagcctgagaggagtttgttggctattctggagaattttattctttttggcttgggacccagggggttttctctccctctgagtcatcgatgagaccgtaacccccagtccccagccctaggacagcccatgctttccagatgtatttctgtgaaggtggggtggaggcgcctaaataatattgtgccccgcccccagctgcccaattctctctcgaacctgccatcgtcccgggcttcagaatccactgggcttggttcatcatggtttaaggtgaaattcggggcgaaggaggcaggacaggtaggcaggaggaggcggccggtcccgacaggtgcgtgcgcgaggggtgcacgacgtcctgcccctccttgggtcccagagcctcgataccgccctgcggaccgccctgtggcttcctcgcagccctgggctacaaatgccaggatttctcaggctcagactgagggttttacttcacccttcccagagggcacgcagcacggatctgtggatggaaggggctgtggaaacaggttatggcagagttggggggcggggtgacgcggtgccacccctcctggccgccctcaggtcccgctgacgtctctcttccccaccccctggcttctggcttctttctccccacgtccctcttctttcccaccccctccgtggctctccagcttcctccccagcccccgcagttcctcggctcccccaaaattgcagccaggggaaggagccttgaaactctccagccccgacgccccagtctcattggctccctcccccgctgcagcacctggtccccccccctcccagtcacctgattggccggcggccccatcaatcgttgcccggctgtgctgacgtcatcctgcagtagcggggttggggtgggagtgagagagtgaggacgctgggctgggggaaacgggaagccgctgcaagtccaccgcctcagctacccagattgggatctgcccaggcccgctttatggactagtgtgggcggcaggctcctttccgtccctgccctgctgtaccccgctccttggagaccccctgtatccctcccgcaaggtggaatccgcaggctggaggctcccaggggaggcaaacgcctggccctgccctgccccacgccgcaccatgaccctcctgctgctgccccttctgctggcctctctgctcgcgtcctgctcctgtaacaaaggtgagtgaggtgggggtgggggtaccgaaagaggggcgtcgggcagcgccgtgcggggtgggggtgggaaggaggtgtcgaggctccctggcacctgacaggtgtctggccctcttctgatcaccctccttcccatccgttctcagacctgctccgtctcctctctttctcttcccccagctacatcttcctttctggtccatctctacccatgcgtttctcttgctggtcatcttgctcccatttggtctccattcccgtcctggggtctctattctccccttcccctaatttctacacgctggtggctacctcgggtctgggaaggactgcccccgagccggtgataggcctctccccgcggctctccctttcactggcgcatgctaagggtgtgtggcagatccatctgcttcgcctccatcccatcctggggagaaagtatttgctgcagttcagcaattcggagcacgtatgttttttgcgtgtgcctctgcattcagacccttttgcctgcatcagctgggctgtgggttaccagagctgccctctctggcagacagcggatacattcagctgggcggggctgtcggacagacggagagggaggacgggagggagggcttgcgggcagagggctcaggtaggtggaaacggatggagactggcaggaaagggcagaagtgggtgtgtggggggcgctaaatgagtatgagagggaaag

SEQ ID NO: 6022 - DNA, 6000 bp, Homo sapiens
gatatctttagttttcgggcctggtccttctcctaattacacccagcacctgccagatgcctcacatcctcattaagcagcggagagtcacaaagggtgagtcattgctgtaaatctccctggggccaagttttattcatgttctgaagctattatatagcttggacatgtaggaggaaaggatatttcccttaaatcatcaggaaacagaattctaacttaaagtgtcccaagtgagacgtatcctttgcttttcaggctgtagaacctgatgtcttttcttcatgaatagtattaatactaaagtagctttgatcctaagttctgtagttataggactctcaatcttttttatttttttctctctctaggtttctagattattgtcatttaaactacaaatattgattgaacacctaccatgtgccaggcactgttctaggtgttggggatacagcagtaaataaatcaaagttagaattcattacccctcagatttgaagattgtcaaatttacaagcaaagccagtttaacctgacacagcagctacagcacaacactgcagagcaaggagtaggtatggctagatttaggtcaatggctgactttaactgctatttgattaaaatatgagatcatggtaagaccaacacagcgttttcaactttaaaaaatgttcgttttttgaattgttgaaattgatggaggccttacctatctcacagtggaaagagtgttagtttgtaaatcatgagatatgaagttctgatcctgactgcatcaccaactatgtctttggatgagatctgaactgaaaggttactaaggtccactctagctaaaaaaaatcctgtaaactatgattcgaatctcattacaatttttattaccactgcatgtgtagcaacttcaggatttaggaaaattatactttaacaaataccattgatagcagtaccctgagcaatgataagtcagaatttaatctgtgataaatacctttttgtgtgtgcgtaaagaagagctgggaaatatgttactggtagggctaagttaagaaaaccataagttattttcatgtttaaatgacatctaaaagtgaccaagatttgagatgggtaaggcctccatgaatttcaacaatgcatttaaaaaaacaagcttttgttaaacttggttaaatcatatacttacaaagccacatacaagaacactagcttgacttagcacagtctactcagcccagaacctgtgagctgtgtagctactaccccccggtggtgggcaaagataagttcgagacaagacatttttaatttttttattttagtttatttttttttgatacggagtctcattcagtagcccaggctggagtgcagtggcatgatcttgactcactgcaacctccgtctcctgggttcaagcaattctcctgccttagcctcccaagtagctggcattacaggcatgcaccactatgaccagctagtttttgtattttcagtagagacagggtttcaacatgttagccaggctggtcttgaactcctgacctcaagtgatctgcctgcctcagcctcccaaggtgctgaggttacaggcgtgagccactgtgccggcccaagacatttttaattattttgattgggaaagaacaaatcatccctgttaaggcaggctgaaatgatcattcatttagcaaataaacatacagagttcttactatagtctgaaaactgtgctagatactgggaaaacacaaacctgtttctttcccttggaaaacagagatgccaacaagcagttgaatgcaatgtgctaagaactaaaacagctgtacaaatgttgtgggagcatagaggaggcagttaccagttctatttagagaagttgaggaaaacttctgagataaattgatatttagattagatctaaaggcatcttaccaaggaatgaacgggaagtgcatttcagtctggacaaatatgttcagcatgaataaaaatggcatgtatggaaaattatggcaatgtgatcagttaagctagagaagacatcgtgggtgagagtgaggaagactgtatttttttctgtttctgttgagatgaagcaagagaagggaaatttaaatttatataaagaaaaaacatggttaagtaagggtttttttttttttttttttttaggtgaaaggacttgaatatacttacatggtgagggaaaggggtgaatggaaaatgagttttaagatacaggaaagaaaggagataactgattaaccaggtccctgaggagattggtccctgaggagaatccagggcacacacaagtggataggagaaagaatagatgaagatgcagataggagtatgaatagggtgtcattaagttgagagagttcacacaaactttattttcttagggaagtagtaagatgttttacctgtcaagaaagaaaaagagaagacttagagttgaaggcctgaaagggcagcaaaatttggaacaaccattaaagggaatgaaaataaaaactagcaatggcaaatctgggtgttaagggcaaagctgagactcaaacccataaacttttagggacaccaatctttataattgtgtgatttgcttttggagaatgatggagggagatggttggaatatataagactggagtcttttgggttggctgtgatggaaagacaaagaggaaaggaaacttaaggatgctggcaagagaactgttgaaacaaggagatgggaggaataaagagaaggctaacaatgtgcagaacatgaagaagaacaggtgaggtagaaaagagaggtaaagatagttagaatttatgtcaagagattgtatggctaggaagagttaactatatgggctttgaaatctctaaaagatttgggagaagaggaagagtataaactagtaagaaggtgaaccagaagccagaatcctccaaaaatgattgccagtgataacacagaacagagaaaaaaaaagaggtacaatgtggtgtagtcatatgacctaggcttcagatgagatcatagggtcagaaataaggaacaacaagtaataaaccacttttctgtctttatttttcttttaacatgtattcagtgacaataatagctatataaatcttaaacaacagagaaatatatggaggagaaaataagtttctttcccccacttagccttatatcctttgaaagccttctcaatgcatttacatgcatgcatatataattttggggtgtttcgacaaaagttgataatgctgtatgttttttgcagttggctttaaaaaatcttggatctctttcaatggctaaccctttagttcaaaacatctcatagtaatagatataccattaaccatttcccattgatagatggtcattttgtttccatttttttcactattacaaacaatgctgtagtattattgtacatacttttttgtgcatataaggatttctctacaatatttattagtgaaactgctaaattgaagattacgtccaattaatattttgataaattctgttaatttcccttttaaaaatgccgtgccaatttacattcctgccaacagtgtatgagattagactgttcctcacgtcctcgccagggataaatgtggtaattctttttgaaatttaagatatcactttccaaggtggagcagacaaattagaggcaggtttgctttttttttttttctcattaaacttttttaatgggtctcaaaattctgtgacaaatttttggatgtttccattaaaaagtactgatttaaaaaactaataacttaaaactgccacacgcaaaaaagaaaaccagtggtccacaaaacattctcctttccttctgaagaagaaaaccagtggtccacaaaacattctcctttccttctgaaggttttacgatgcattgttttcattaaccagtcttttactactgaacttaaatggccagttgaaacaaacagttctgagaccgttcttccaccactgattaagagtggggtggcaggtattagggatgatattcatctagccttctgagctttctgggcagacttggtgaccttgccagctccagcagcggtgaagactgctgctgttgtaatgaggcaggcttgagtttctgtctcagttttgccacttgctatctgtactgtcagggtgttgtggttaagtttacctttggggcgcagaaaaagcatatttatggtgagagttcggtagcatttatcattataatagaactgggagctaatataggccattagatagttcattatgcttccgattttatcaggaattgggttgatcccacgtatagtctatttaacaggatcaaattttccaaaaagataatcggaatacacgccgaaagtgtggcaaaacattttaacaggtgtcgtcctgaaaaatcggagataaagagtgtaaggcactaaatcaagttgggtgttttcagcgtttagactctggagagttgaaatccacggtgtctatgaccagatcatacatcattctctgcaggtacctcgtctgggactaccggctggaggttgcctcttttctgccaggagactacagttaggaagtgactcctgtaagaaaatccgtcacgattcaatatggtcctcgtcctcgtaggacactccaggcacctgcctagagtaagatggcgcttttcgtaagcacctctccaggacagagatttccataacgagagtcacgcacttgcaggccatctttgccattatccaagacggtgagccgtgcagcctcatcgtttccaggtttcaatatggctccccgcgtcaccgaaaaggttaatctcagaaactaacttgaactcgcgcggaagtgacgcaacagaagttgtcgcgctttgcatctccgcctcccgtgctccgcctccggtcttacgtttcgcccccggcagcgccgacagcggacccaagatggcgaccgagttggagtacgagtctgtgctgtgtgtgaagccagacgtcagcgtctaccggattccgccccgggcctccaaccgcggttacaggtactaaccccgaggcgctgccgcacacgcgtactctgtcgcagatgacagcttccttctcagctagcacgctgtccgtccctgccactactacctctgtattgtcaccttgctagcctccctacctgggttgtcatctccctgaccacctgctccatctccactctggactgtcatcaccatatttctgccgtttttttttttgttttgttttttattaaattaccactctgcgttattccactctgcctctcccgtaatcccctggggcacccatctgctccccatcatgcactttcagtcgtgcttgctccattgccagtcccctttcattcgctcttccctgcgtccttcagcttatcatcctcatcctttctctctctctctctctcacacacacacacacacacacacacacacacacacacacacacctttccagttccccatgcacatttatgggtaatcgtgttgcttgccactctggattatctgatttattttttgtactgttgtcaatttcgtcaccaactgtcatcatccaccattcggtttttccttcagcagttttaccagtgagcaaaggttatgatcataagctttacaacggttgttcattctgtttcttctcattgtattttcttgatgattatatagtattttctgtcttccttccctacctcccttcttaacctctcctacaccttttccctccaaagttgaggcagcatttttctctgttgggcctaactacctaccttgtaatccaatgactgtgaggttctgaggatgctataggacattatgtagttgaaagacagttcactgggcttcatgttaaaccatatgagtgtgagccctttccaagcctcaattttctcatctgtaaaatagaaaaaaaaacctgttagtg

SEQ ID NO: 6023 - DNA, 6000 bp, Homo sapiens
ttgtagacatttcatcaggtaatcaatacaaagttttcaaaactttgacaattacctatttctctaatagatgagtaatttaagtattgatataggcccgcactgctaacaatgttttggtcaatgacaaaccacatataccacagtggtcccatatgattataatatggtactttgtgccctttctatgtttagatacacaaagatttaccattgtgttacagttgcctagagtatttaatacagtaacatgctgtacacgtttgtagcctaggggcaataggctataccatataaccgaggtgtgtagtaggtcacacatctggtttgtgtcagtatactctgtgatgttcacatgatgaaatcacctgatgacgcattacccaatctcaggtattctttcatagcaacagtaaacagactaagacaagcttccaccatgtgccaggcactattctggtaattggagatacacagcaaacaagacagctattcagagtccttgttcacatggcactaacaccctagtgaacagagataaatgataagtgagaaaacaaataaacgaacaagaccattttgtatagtgataagtgctataaatacaatgaaacagggtagtatgatagtgaaagaaaaagtgtgtatgtgtacatggggtgtccaaaaatttttgataagattcttggaaaaaaagcctttctaaaataaagtaacatttgaggttagacttgatggagcacaaggggccagctatgtgaaaatctctggataccaaggccctgaacagggtttcccatttcacatgtatgaagaacacaaaggtggcctgaggtattagagatgcattctccattcctttagacactagccaagtgaatgtattaaaatttaaattaaaataaaatacaaaagttcagctcctcagtgacaccaaccatggttcaagtattcaatggccacatgtggttagtggcaaccatgttggacagcagagggtctatttgtcattgaagaaagttctaataaatagtacttcaccagtgaagtaggagcattggaataggaggagaggtcagagagaattacttggaaagatcatgaaggtccttgtaggactgtcatgaggactgtgatgaggactgcattctgcaagtacgatgggtagcctttgggtagttttaaataggggagggacataattcaatttatatttttaaagtgttactctgctatatagaaaatgaattataagtagggcaagatcagttagttactgcacttgtcctggccaaggaagatgatgggtctttggcaggttattataagagggacagtgaaaagtaaatggatttagaatatattttagagacaggatcaagtggatttcctaatcgactaaaagtaaaacaagataaacaaaggaaagaatcaagacccgttccctcttctggggcctgagcaactaggtagatggttatgttctttactgggatgtaacaagattgagaaaatatagtttgggtgggtaggggataggtaggaagggaattgtaagttaagaattttgttttggataccttatgttttaggtacctattagatataaatatataataatcagataggtagcagagaatgattgaacccatactacggaacgtaaacttactgaattttacaatagaatcccctgacgcttaactatatttaataaagctcaaatgtgaagggttagatccttttcccaaaaaactgtaaaaacatgtttgctagatttgactaagtggaagatttatcaagtaaaacttaaatttttatttctgttgtccatgctctactatttttctgcacgtacaacattttccttattctttggctgtgttgtcactttcttgaactaggactcaccactatctgtagaaaagaggcagtgtttatatgtgattgctccctatccagtttatgtattgcagcttatttcatttaatatactctgttaaaggtacattattagtcgcttctttcagttagtatagccctgcaggtttctgcatctctctaacattagcattttgttgtctttgttcacttgcctctgggttctggatggtatggggagaaaaatctaccttctttccttttgatgggacaaataactttttgattatgatttgttaaagaaacctggatgccaggacattgcctccttattttattgaagagttccaggatgttattaacacatggatttagaatattcttgttttgctgccattagcaaatgccattttttcctgttacaacttttaaaaaacatctgcttcccataccttaagtgttcagtttttatgataatattatattaaattttctaaagaactgagataattgtgggggtaggggacagataaaattgaaatattctaaaatttcccttactatgcttttctttttaaccttgatatatgccagatttttggtttattattttaatatgttatttttgatgccaacagatatgaatgattttccaatcaaggtttttcactccgatgtgtcccaggtaggatctggcatatgaatcatatgtctaaaaaggaaactcatgaaagtatgtgtgcgtgctagggggctcatttgtctttggcaaagacattgctgctcctgtttccttaattattaaacagatggtgcccactgccattgactagctgcccaactcatactcctgtgtggtagcacaattctggacatctgacagagagaagctatacctttatagtatatctgccttctactagaacaggctgcttcccatgaagctgtttaaaacttaagtcatcttctccccctgtccccataaattaattttatctcaaggatctccttttggctttttttattgcttcatgtctacatacaaaatacagtggcatattgaatcaattatctaaatgctctaggctgtaaatacactttaacctggaatgtcaagataattaagacaaaattggattattaagattattattagtgagggcaaatgacatctaagatagccatgttaaaagtggagtatcatattaaaaagacaactagatcccagggaacatcaatagagtttaagtccattgaacagatactgaattctttttcataatctgccaaaaaaaggttagcttgaaaattttcttttagtttctcaaatatcacactgctgcagtacacgaacctttactcattaataactaaggtcctgatttttttcatatgctttgctcgaagatgtagtattttgcagccatagacagtcttctaagatctctcctagtgttaacccacctatcctcacctctcccttgagatttttctttattttttgatgaactatctgggcttttaaactttgttaaccttttttgaggatacggtcacttaatctcaatgtaattttactttccacagtcaaaaactattgtgtaatactcatgcactggatttaaatgactgctgcctctccttcctttctttttatactattgtggtctaggtaaggctgattcttccatcatttgaaccaacaggccaggcttgggttctcataaagcagaccttccagcaggagcgaccaaaggatgacactgtcacctgaaattggactgctgttgtacctgacttgggaacatctttgaatcagacagtagaagtggctgtcattttcagggacagtagaaagtatgttggctctcatctgccaagtaggcaaacacaatcttttttttttttttttccttccaacgttctagggagctcagcctcagggctagccgcagccccccacaccccggggctgcggtgggctgcgcggtggatcagcctcagcagcccctgctccagcctgtagggtgaaccggccgctttcccagcaaaggagcaatcgagctgagggtagcgcctcctccgcaggagggggcgggagctcggctgagaaagctttcctagggagttgccttaaagaaagaaagcggaattgtcgatcactccagttgccagttttatacaattttaagcagtcgtcgccactcgtttcccctttgcaaaactgcaaatcaccaccaaccttgcatcaaatagaagtggggagggaaaaaaaaagcaaatctccttctcccttctcaccctccctttcttctcaccctcccttcctctcttactcgctccttctccctccctcccttctgcggctgccgctagtctctcggtctggctctctctccgacgggacttagcaacttcttatttctcagccccttgtccatttttttttttccatcctttgccatgaattggattgacagaggcgggggaggctttgctttctgccccagggaatggcgattcgcgtcctggggccgtgccggggagaatcggccgaggagaaagaaagagtgatagaaaaagagctgcaggaaggaggagaagggagacctccatctgccgcgggcccggcgcgctgcagcgcagcgcagcgccgagctgcgcctcggaatggcccggagcccgccctgcgcccccggctcctccagcgtcagcggctcctgcgcgcgggatgcattgggcaatttttgaaatcctgaagtaggaagagaccccggaggatataagtcgggggtgggggtggagcagagaatctgtgaaagatattcaaagagagaaaaggggaatcctgatcgtttctgcccgtgcttgttttcaacttgagcgtgctagcctttaacttgaagaagtctcattggagcatctagcattctccaggagttattcgaaagctgaaactttcagtggattgtgggcctggggagaagaaggattccgagggtggaattgggaagagcgtgcgtgcgtgtgtgtgtgtgtgtgtgtgcgcgcgcgcgcgtgggtcggggcgggggcgtcggggggccactgggaattcagtgaagagggcaccctataccatggcagtgcccggcgacgctgcacgagtcagggacaagcccgtccacagtggggtgagtcaagcccccacggcgggccgggactgccaccatcgtgcggaccccgcatcgccgcgggactcgggctgccgtggctgctggggagacctggtgctgcagccgctccggagctctcggaaactttcctccgcgctgtgcgcgggctccctgtcctttctgctggcgctgctggtgaggctggtccgcggggaggtcggctgtgacctggagcagtgtaaggaggcggcggcggcggaggaggaggaagcagccccgggagcagaagggggcgtcttcccggggcctcggggaggtgctcccgggggcggtgcgcggctcagcccctggctgcagccctcggcgctgctcttcagtctcctgtgtgccttcttctggatgggcttgtacctcctgcgcgccggggtgcgcctgcctctggctgtcgcgctgctggccgcctgctgcgggggggaagcgctcgtccagattgggctgggcgtcggggaggatcacttactctcactccccgccgcgggggtggtgctcagctgcttggccgccgcgacatggctggtgctgaggctgaggctgggcgtcctcatgatcgccttgactagcgcggtcaggaccgtgtccctcatttccttagagaggttcaaggtcgcctggagaccttacctggcgtacctggccggcgtgctggggatcctcttggccaggtacgtggaacaaatcttgccgcagtccgcggaggcggctccaagggagcatttggggtcccagctgattgctgggaccaaggaagatatcccggtgtttaagaggaggaggcggtccagctccgtcgtgtccgccgagatgtccggctgcagcagcaagtcccatcggaggacctccctgccctgtataccgagggaacaggtaagcactggcaactcctctctcggctcttggaaacttg

SEQ ID NO: 6024 - DNA, 6000 bp, Homo sapiens
ggaggtgccttctcaaagcactttccaggttaaatccagcctcgggaggagggagtggagagagaatttactctcccccaacttacctccctcagaaatgggggcaagtggagggtcagctgagcagagagggaggaacagtctcccgagatcccggggatgggaggattgaggggaggggtcccggaaactcccaggggaagtgggttaaaagaagggccgggaagaagggtgggacgccctccactggaaaggggagagcgttctagttaatgctgaggggaagttggggacctgggtcaatcggagtcagcgtgtgtctgtctccatgaaggggggtccgtctctccccgccccaggcgccgtctttggtctggagaagggtccagcctggggtcgttgggggtgtgaagggaccaatgagcggtctgtccgctcagaagggtccagagagagagccaactggaactacacccccgctcccccttcccccgccagaacttgggcttgtcctgtttgacgcacccgcagaaaggggcgggaggggtactgacccgaggagcggtcccgcgactctgtactccctgctgcccagtcccggccaggacgctgcccggcttagctggggcgcccctcgagaccaggatggaggtagggacgggctagggtcccggaagggcgcgggtgtctcgaaggagccccacggggtgggaataagtagagcgcagcctggggtctcctactgggggtctcgagctgggactgcagttcctggagaaaggagggggagaggggttcgtcctgggcttgggcggtgtctggatccggggtgcgtcccccctgctctggcctgggcagcgccgcctgctggcagggccggaccctgcggccccgggaccggacaccaggcggtgccgccacctggagggcgcgtgtagccgccgggccagcgagcccaaggggcgctgcagcgggtcgagaaggagccgcgtcgcttcgcctcgcccttccccttcgcggagctgagacccgctgcaccagaacccaggagaggggggagacggcagagactccgcgggcgcggggcgatcccagctgggctctctccacagggatgccgatccctctggagacacagagccgagccggggacgggtggatgggcgccttgacgcttgggcgggcgagcagagcaccagcactcttgcttttcggtcctttcccccgccgaggtcggggtcgcagccgccgccggaggatgggcggccggcgcacggagcagggccgggagggagcagaagcttccgccaagagctcaggagctggggcagccctggagctcttcctgcccttctgcccgcggcggcggaaactccagagtccctactctttctcgggaggactttagggaagaagcagagcggcaggggaagccgaggagcgagggtgcgacgtggggatggaaggacagtgggaggcacacggaaaaacagaacgaggaccttagacaggagagacggaagtggagagaggctgggctgaaaggcagggagagccagagactgacagaggcggcgagaaaggaagggagagggagggagggaggagggaggagaaagagggagggaaccaggggagagggaagggagcaggcggcggagcccggcgggcgtggggcgaggccaggcgtgcaggcgggagcagcgtgcagagcagcggccgggttttgctcccgcctcggagcccctggcccgggggagggggagaggccgctagcctggtctatgtctttttctgactccagtgcaaccttcctgctgaacgaggtaaccgtggggggggtgtggggtcgtgggaagggggttccccactgggtgggaggagagctccgctccaagctaggaagggggcacgcgtttgggggagactgcaccgatggggaggcagggaaaccggaggaagtgaggccaggggtggaagaggcaccgggttagagaggagggagcggccagagctggcagcttcctagtactgggattggatgagaggagaggactgactgaggagccagaaaaaaaggggctagattacaagaagggctctgccaagctcccctagcgcctgtccctgagttccctggcagcctagcagccagaatggtaggggcctccacctggtccagatcttaaaaactgctggggaggagtctttaagtcttcccagaaggcctagcttctgtctcagtttccccattcagtgcccagggactgggatctgcccagcttcctggtacacttagaggagaagctagaatatattctgaaacctcccaagaaggtttcaatatattccagctcccaaacctgattattcaggcttttcctcttatgtcttgcttctatgacttgggtacctgccagctgccagtctaacaactctctcctagaaagaatcagcaggaggagcctctcccctgatcctttattgccctcagctctctccctttatgcccagccatgaaaaagaaaagaggttagggctacatggacactgacaggcacatgtcctgtcacaggacaagaagtcaccaagttggtattagaactagagtaggcaggtgtgggtgagaaatgaaaggaacattgggtagcaacccagagatatgagaagaaggagggaagctctgaagctactgcaggacccaggggatgggcccaggtatgaggagcttgaacccatctcctggggatggttggcatggcaacacatgcctcaggagcagacttagacaaccttgtcgcaggagattacaaggagtgtgaggaaggagtgctgccgatggcagatccgctgttacctacagccccaggaccttctgtgggtggagagagtcccaaaaggagaggccaggagagtggatgcagggatgggaagagaaacagctgcctccaccactgctttcttcactagagccatctcccaggagaagagcaccttgagggtcttactctttgacacctctccaggcccctgaaagaaggaattgaagagaaaggatgaaagagggggatacaaggaatactgcgtaactgggtgagggcacaaaagtgggcagtgtctgggaacttccaatacagaagaatccagtatatgaccaaaccccagttggtgctggactcaggagaggagacagtcccttcagccacaggggctgcaacaaagttgtttgtcaaacccagcatgaggaaggtgctgggcagggctgctctgggccacccacagtagacagactaaagatgtcagtctgaagatgcagctcttctttgtcttgccaagataacaccgataagtgacccaggtgggaagccacttggtttgggtgggctttctctctcccatgcacagtgctttctaccatagatcttactaagccatgtcagagttttggatttctgattctcctcaagccaaggagggatgagcagattgctgaactcccgggtgtgagaaattgggaaggaaaaggactgagctcagggccaagagcatgggcaccaggaggcctccaagtgtaacccctgtctacgcacatcctcctcgtggggcacaaaggtaggcagtcaaaaatcaaagaaggaattttgctcaggagatgaaaaaaggaaagagctcaaatgggtggatctttggggaaagtttcctcaagataagggctgcggctctcttaccccaaatctcaatgctcctgtaaaggagactgagtggtgcagagtggtacaagcccttctgctaaggggagaatctggccttaccctagtgactccgaggagactggccctttcctctcccaacccgagtgtagccaggatcccacccacaactatccccctacctccaccctctggcttctttccccttccctttaggctcacctaaaacagcccctttctgccccagttcccacggatgccttggcactgtctggcacaatccttggcagggaagtggggaagggaacccccatcctggcaggactaagacaaaatctatccgtgcaacaggtgtggggaggcctacccagctcacggaaagttccccccttctcaagggttgggcaacaccgcctttgccgcagcgtccccgtactgagggggccgggcacctgttggggcaggagctgccgtcctgtcattagcctgggggcaccaagcccattcctccccgggaccactgcggggtttgctttcggagcctccgggacgcacgggcccagacccgccctgctgtcgcctgggacccctcccccgtctgccgctcgttcccgcgcctcttctgtctcccacggtctccccattttcctgtcctctccgtcctccctctgcctctctctctccggtttcctcgacacctgcgccctctccagtctccgcccgggtcgcgtctccctcgcggtctcagcgccccctccctcccccgccgcagccctttgtttcccggcggagtagttcctgggttgccgagcgtctctgtctccgcatctctcctcgccccgcctcctccctgcctggatccgccctgcccgcagcctctcctccccttcctccccgccgccacggccccgtaggtgctcggggacccaccttccacctagcacgggttcgttcccctctcccggcctggcccgggctccccggtggccgccgccccctcgccgcccccgccttctcccggggagggggtcaggtgggcgggcactattgttgtaggagccggcgccagattcctcagccgcgctcggggtgggaccggctgggtttgggggggtggggtggggggagcggtgatctgagctccgagcagctggtcttcgcggctcgctccctccttcgcgctctctcgctccctgccgccgcccgcagggctgcggggctcggtggcatctcccgggcgcggcccgcagtccttgcccctgcctccgggccgctcccgcccccggcgccgctcgctcccccgacccggactcccccatgtatgacgactcctacgtgcccgggtttgaggactcggaggcggtgagtgcccacgatgagggtgggggcggggaagttggggtgacacctcctctcccttcaaccctttccccggttcaggactttgaaaaacgcctcagtggcagggcagggtttgtaggggggcgctctaagaacgtggggagatggattttcatgccaagcgttccccagcgacccagactcagaccctggggcatcgggtgtgtgcagagagggggcagtataggggaagggctcaagcaggtggctccacggcccaggaaagaggggtgggagaaggcagggctggaggccgagggcacagaggctctggagagggaacacgccatgtctggagttccaaattctggatttctggggtctgaacacaacagctaggagagccgccgaggtggttggggaggcagacattctagacctcttgtgcctcaagcaaacgacacatcagggagctgagaggacatcagggagccaggggccaacctcttcagacagacggatcctaaaacttgaggagctccattattcccttccaccccctccatctctgcgcattgcctcatctcctcaccctttctctagcccagtttctctcccaggctgaaacctgggcgcccagcacatgggtaggccaggtgactgagccccatctattccacagccccctgctgaggcttcctctgcagcgggcatcctgagctcttgcccagcatggagggcctggaggtgaggccagaggagctgagggcctggggatggagaggaagcgctttgctcagagaaacaggcaaccgataaatatttaattctcctctttgcttttatctcctgacccactgagacaaatcagctcattaagcagtgattcccggagctcagacagcagggagagtgcctggaaagatggggcaagaatgcggagcagctt

SEQ ID NO: 6025 - DNA, 6000 bp, Homo sapiens
gcatactgagcctgcatattgcaatgactcttggacacatctttactgagaactcacatcatcaatgtgatcccagcccagctgtcttcagaaataatagaacctaaaacacatcctataaacacacctcttggcacttaaacagagtttttactatgttgatttccattcactcaatttttttttccttctatatgtttcctatatgtatcctaattccccattagtctggggctcattgggggcagagacatttcttcctctgcattgcacaaaaaaaaccacagaatgaacacactcaataaaccatactaaatgtttcccctcacagttaaaatgtatccgtacctaattactccatcctcagaattctcggatctaaaaatgcaaccacagtctcacatccgctgatgtgaaatatttacattcttcctcaaatttgttttgctctaaaatcttggaatcactttcttaattccttgcccaatggatactggatattcatatggaaaaagtatttctccatatttcaaagtctagttcttggtagcagtttattacaagtgcccaggcttcatgattcatttccatgggttagaacccaggggcctaagtcactagctccaaacctgttttgagatatttcaattttatttaaaaggcccaagaatcagggctttgcaaacagatgttgttagctgtaattccgctgacttgactctccctcctgccattgctcattggtggctgcaagcccagcaaggtctttgcaagccctgcaacctatataccacccaggctggggttggcatacccgcttattgctgtagctcccccgagaaagggaaggacctgtctaggggagaaaggtcagagtccggaggagtctgtggcagcacacattcttaccgcatcgaactccgcttgatcatcctcaggtaggtcgctagtttcataaacatctggctcattcctggcctgcaggtagaagcagtgaccacccaacctcactacccagcatccaacaacaccccttcccccactccatttgaataagctaacagagaaggcggggtgtgatgtcagggttctgtcctttctcctccacctgccccgtgagtcaacagtatgtcagttcccatgtctcaaggggtagggatgacagcggaaacaattgggacctgacagtaaacggtgagtgtaagtgatagcaacgatgttaccctaaatctagaggcgggcaggtccttggcaatcactattgccaaagaaggtgaaggctatcctccaattaggccccgtacaccaccaccctggcacaaggattgagagtgactcaggaccttagtactcaaggtcctgtgtcccaaccctcaccttgagaagcaggcagggcagcacaaaaggaaggtacacgccaggattgtcatgggagtgggggctgggggagggcataggttccctcaaggatagagctccccatctggcacaagagggttctgccagatggcagaacctcttccttggcaggatgaaggccatcgttaagtggtctggtgtgtgtgtctggggtagcgatggggtcttatggagagatttgggggggacatgggaggcgttgacacggatggtggaaaaactcaggcacaagaggtcagtacccggagtcgatttctgggccgagctaccggcgactgccggaaagggggcctggtgcgccgtccggcggcccggcccagtcgggtcagaagagttcggggggtgctgaggccgatcggagaacgagcggcgggagcccttgggcggaggatgggctgcaggcgggaggggtcgcgggctggtttctgctgggggtccttgggaggtcgggggcgcggtcctggggagccggggccggtcctgtactcacaatgccgggaaggtcggcgtatttagggtccgccatggcggcggcgagacgggctgggggacccgggcctcggtggagccggggccggtgttcgggtaggggagaggctgggttcgggtcccgggctaaggcggcggcaaagggagcggcagatgagcaggaagtctcgcgacagcagtagcacagcagaagggtaaagcaaaagtcgcgagaacagccctgctgccacacccctggagaggccgggattggggagaacgaggccagggaatgaggtaatggccaggggacgccgcctaggattgtgggatgtgtagttttggtgtactggagcttgggcggggagcgacaataacgaaccttggggagctatttcatacagccttttctctcacttttacagcaagtcagtgaaagaacatttataattcctgtttggggctcccaggaataaaatgactagattaaatgatacaggtagtcatactgtgacacagccggggtttcaaaaacaagaagtttgcttgatactgtgtattataaaaacaaaataaaaacaagaagtaaaatttagtaaacgcgtagtgtatgttaggaatgaaaaagttaggcaatcttctcaagtaagggctttcagataatttgaatttcagataataagtaggtgtgtgtgtgtggtgtgtggtgtgtgggtatactaaccccccaaaaattaagtatctgaaattcacatttaactgggcatcctgtttttgttttttgtttttcaaatctggcaattctatctgaagttcataagtaggtaagtggtgtctccatgtctgtctgaacactctctgggctcttaactacttcgttaatagttctcagacttttatttatttttcaattttttcaattttgtgggtacacagtaggtgtatgtatttatgggacacatgagatattttgatacaggcatgcaatgtgaaataagcacatcatggagaagagggtatccatcctctcaagcatttatcctttaagttacaaataatccaattactctttaagttattttaaaatgtacagttgagttattcttgactatagtcaccctattgtgccatcaaatagtaggtcttattatactttctaattttttgtacctattcaccaaccttaccttccgttctcagacttttaaatttcatcgttcaataaaattaaaacaactacaaaccttgaagatttgcctttttattttatcaagtaagtatattacaaatagaaaacctattatttactgtcaccatcattacttggtagaaaagcaagaaggacacactcagaataaaagatagtcctttgaaacttatcaaatccatctttatattaaaaaaaaactcaccattgttcttttggaggtgagggcatactcagtgaacttttgtctctgaccagtgaccctccatggactggcattttgaaacccctttactaaagatgccaccttggagcccctggggacccaaggatgggatgtttcccaggatgtttcctgagcttgcaggatgctgcaacacttagaaattgtgccaaaccaagtgactagagagttcctgagttcggaactcgttgtctttctttctcctggctcctccccaagcctctatccctttctccatagtcctacagctttcctgtcccattccttatgttggactcttttctttcagttcccttaagattcaaggtaggttagaggtgtagccccaatgtgggaaaccccctgagttctgaatagttaggtcttgtctggccaggctatcagcctcttacttttgtcccatagtgtcttaagtgaccttaaccactcaccagacagttgctgagcagaactttcctttcctcctccttctcccatccaccctgcccttcctctttgcctagaacctcaactcctgcagtccaactctctgttggccagcagaggcctgtgacatggagaaaaatcaatttggccagcttcttggtggttctttccaggggctgcagcaggagtctgacccaaaggaaggaaggacaaggaatctctgggcttggcatttctttcgtttttcttcccccacacctttttttttttggccagggaagggggctgaagtattgggactctatcctccaatggttactgagacagaaaacacacactcccgtaggtatctgaatttgcctgaaacccaaatgccggctttgcctcagacttcaaagtctctctggccttacccatccccatcattgcccctccttcactgctttctgactccctttctcttgcaaagatgtttcccacccatcttcctcccatcctcagcctaggacacaaaaataagtattgtatctgcttttgaattcccataacccagaatgggagtttatcttccctgaaactggggacctggtgtgtacgttggggagacagtatagtgcacctttggatgtggaaggggaagggagtagccagaacctcccacgacacccaacttcataggagtacaggcaggggtccccccagaaagctgagtgggttgggagtccagcttccgtgcatgtggggcatgggatgggcgtagggggagaatgagaagtgtgatcccagtttggagagaggactgtgacgggttgggggatgccctggaataaagggagagggagatctgttgacccttttcgctacacaggcgacaggcccacctcagtccccttatcccttccagggggtggagtctgagggagggacaaacaggtcgggggtataggggtgggatgcagtgagttgggtggggaagggtcgagggcaaggttatctccgaacgttaggggtgggggagggaggagaggagcggtgaggttccacccttcgggggtcgacgtcgagccagcgtccccagtggagggagccccgcccccgctcctccatcgcggccccgcccaggcccgcagcgcggcgctgcagcgcgaggggcggagaggcagagagcccgaaaggaccagacgcccaggtcgcccgcatcccgctgccgcaggagagagacagcgcgccccggccctgctccccaggcttcgcccgggcgccctcaactctgtccccagagactgagcacctgtcctccgcctcggcctctgctgagagccctctcctctggagcacacaccacccctgcagcccaagaagagtcccagccccacgccggctaccaccatggcggagaccaacaacgaatgtagcatcaaggtgctctgccgattccggcccctgaaccaggctgagattctgcggggagacaagttcatccccattttccaaggggacgacagcgtcgttattggggtgagtgtcgcccaggagggaattcggggagggggcaggtggctgaatctccccgccccccgcagagccttagtctctgctggtccctttgctccccctccccgccgctcatccttcatcctcttccccgcagcccctcctctcccctgcatcaggatggctgggtgtggcctggccaggccagcggccgagtctctgcagagtggcagggggctgctttcctaccttcgggagatccaactcccctttgctgctgtctgcagcgtctccacccgttagaaccagtcccatgtttttctgatgttttccccttctccaccacccgctccccaagagaaagcgcatcttccctttgttattggctcagatctctacccccacctcccggaaggtaaggcggaagacttttgggtggattagatgggaggtgagcagtccagggtctctgcagagtgtggatggaagtgggctctaagaccaaaccttccatcattccctaaagtagttatagcctggatttttgtgtgtgtgttgtggggagtaggtctgatgcagggtttactgggaaagaaatcattgatgccacacccaatcttggggggagcctctggaatcctaaggtcaggtctgccttttggtcccaggtacagtaggaagagggtttcagattccccaactgacccccctaaagaaaaatgcccaaaccctgagatcctag

SEQ ID NO: 6026 - DNA, 6000 bp, Homo sapiens
ctggggagggagagccaatcagattattgtattagggagataaaagataattccaataggctctggggccctgaagatttgggacagtgtctgctgctcagtttgagctctccagtttacagcaaagttccccggcacctacagtaaatgttgttgaatgaattcaagattccttgaatattcttgtggcattgcatagtaaggactgagcgaggcaaggttgagagtagcaatcggggcaggaggtagcagtgcacaatggtgtttaggaatatggactctgcagttagactgcctgagtctggctgtactacttattaactgtgtgaccttgggaaagttacttcgtctccctgtgactcagtttcctcactcgcaaataggaattgttctgaggataaaaagatgtatataaagtgactaacatagtattctgcaaatagtaaatactggaagagaccattattgggctagaacagttgcagtggggatggggcataacagagagatgcaagagatgcttcactggttgaatcaagccgacttggtggctggctggatgtgggagaatgaggaatgtagggtatcaggctcctcacttaggcagtagtggagtttgggaacagggagctgagagaggcagagcaggaggagaggcctcctggggcaggaagggagtatgaggttcctgtgaagacccaggaaactatgggctcaccttgtgtagagctcagcaaagaggccgaggtggggaaaatcaagcccagagtcaaagcctggtctgagaagcccccttcaccttcccaccctcctgagctatccatgggagccgctgccacctgcttgaagggaatgggggagggttcaagtaagtccatgctctggcaggagctcattgtccgagtagagtgtattaaggggtcctgctgtttagtttccatcatctgtaccaaggtgtgggcaaatggctgtggatatgagtttttccccctttataggagctgtcagtatgtttcagaggcaggactgcagagtggtaaagcacacagggtagaaaccacctgggcagagtcactcatggctctaccacttcctagtatgggaccttgggcaagtcatttaacctctttgtgtctcaggtccctcatctgtaaaatggaataacaaaaataacaaccttatctcatagggttgttgtgacaattcagtcagtgaatatatacaaagtatcaagaacagggcctggtgcatgttgactattcttattattatttatctgtcttaacacacctgccaagcatttaatgacagtcagaggagggtggaggcggtaccaggacatggcatgattgttaccatcttgcttgcatgtgttcctcagacacattcccagtcctctgccccttctaggcctcagccttgatcaaatatctgctgagcagtaattctactgtcgggtccccatccagggatcctgagaaggcaaaaacctgccccgtcatctgctttgatggcaggctgggggccttgcctgttagaggtaggacaagctagaaatgggacacataaaagatctactccctatgatctccccaggctaggagccaataggtaatcaccccaggtcctcttctcaatctccccagagagggggaatgaaaaagaaatggaaaaaagaaaggcaagagtagtgttgaaggggaacataggtgggggagtgggttgggacagtttcattttcaccgatttgagtgatccttggctccctgaggctcccccacacctcaacacaaacatattcgatttcccccctgccttttttttttttttttgagatggagtttcgctctgtcgcccaggctggagttcagtggcatgatcttgactcactgcaaccttcgcctcccgggttgaaagaattctcctgcctcagcctcctgagtagctgggattccaggcgcacgccaccacgcctggctaatttttgtatttttagtagagacagggtttcaccatgttggtcaggctagtcttgaactcctgacctcatgattcacccccacctcagcctcccaaggtgttgggattacaggcgtgagccatcgcacccggcctcaattttccttttttgagtagactctcctaggcagtctagtctacattagaagaatagaatacatacagagtatacgcagtataccatggtgagtacgtggagacagacaacctggattcatgccccagctccaccatttactagctgtgtgactttggcaatttccttaatatccctgagcctcagtttccccatctgtgacgtgaggataacagaagtacatacctcacaggatcgtggcagggattaaacacatggaaagcacttgaaagagtgcccgcacatgattagattttgtagctctgctgaaatgtatacaagtgtcctgcctcactccccagcatcttccacctgcccagagtaagggcagcaagaataggaaataggggacccctttgtgacccaactgccagtctcaggaagccttcctgcaagaacttctaggccagggcactggccccagcaacccgaaactcatgactccatccccctaactcttccccatgcatacctgtgactcccaacttgtcatcctttcctgtcagtttccaggttgctcttccttcttccaaattaccagaactccgttgaatggatttgggtctgaggtcagattcattctcaggctttcctccttccccggagaggcatttaaaactccaccagcgtttcttaatgtgtggacacagcagatgacctggggtgtttgttccaaatacagattttccatttcatgccaataggattgaatatgaattgctggggacggagcctgcattttagtaagcttctgggaaacattttttatacatgtatacattaaaaatgggattttaatcacaattaaaatttctctccccactttcaagaaaataataattggtggaggatgggggcttggcatcccaaaattgggagtataggcttcttagagctacctcttcccagtcttctcctcactttcaagaaaataatcatggtggaggatgcgggcttggcatcccaaaattggggtataggctttttagagatacttcttcccagtctgggctggctcaacagcaaagggaaaagggaagagaaggggcaaaaagtcctaaaaagctgggggtggggcgttcacctccttccaaaccctcattatcgtcctgaattacgggtcgctgtccccggccactgtctctccaccctctcaggagtggggcgaagaggcccgcgctgggccatttgcacagtggtggaaactgaggcccagggaggcgtggagcctcggtagcaagcctgcctagcagggcgctggaatgcccggtctccgcctcaacctacccggccaccagggagcgcgcggtagggggcgtggtactcgaacaccttctgctcccctggaagctctgccacaaccccaatctcctcttagggcccctacccgttctggagagcagtccttcctctccagcctcagtttcctcaactgctcccggtgtgtgtgtgctggggcagggggcagtggggcgtgggtctgggaacggaactgtgggaggcaaggcagcgggattccccgcgggaaagccgcctattccctcccccgggcggctggagaccctgaaccgaaacaggaggcagacacccccagccgggaagcggccccagcccggatttccctcccgggtgaggccgcagtgactcaccccctccccgctctccccggtttccttgtttgcatttctcctcccggccacgtggcggccagtgcagccactcaccgccggatccctgacaccccggccgttgcggcctcctccacacacttcggggccgctcctgccccctggggatactctgggctcaggcggatgtccactctggtacccccgggtgcggactccaaagcctgccagtgccggcccccttcccctacgcattcctctaccgtaaggcagggcgcctccaccccgccccctccgccagtcctggggaggggaagggggcgggcagcgcagggggtgtgacagctcccgcccggaccggtgccagcgcagccttgcttcagcgcccggtgccagctggctccttcgtctgagacgaaggcgcaggctcggggctccctgtcgccggtggctgggtggcgtccccccaccacgcccccacccctctactcacccaagaggagcctctccaccgagccctgcatcctgctgccctggcagccagtccagctaggcactggcccagttcactgtacctggacttacccactggcaccctccggatccccttatcaaagctgatgggggtcgctggggaccccccagccttttgctagagcctgcacggctgtgcgagcttgaaaagaaacatgaaggtgggtaaggtggggtcagggttgaggaggagcaggagagggcgggagaggaagctgacacggtggggagtttgggtgggagagggagggttagtcagggctgaggaggagaggagaagggtttaagccgaagctgcatttctgggagacctagtgaatctatagcttcatactgggaggtagtggagatccctgcaggggcatgggcagtgagatgggacagaattccaaagaggactaagaagggcctgatcttttccaagagccagctggagacccctaagtgcgccagaccggcaggccccagtgaaggtcttcctgttcctccccccagctcctggcagggttgcagcacctccgcctgaccagtccagaggactctaaggaagtagttctgcctggggcagttgtactgtggcccagccgccccagtcgtgtcccatggctgtccactttcctccccgtgtcacaggtgggctggccaggtgagagctgctggcaggtgggcctggctgtggaggatagcccagctctgggagcaccgcgggtgggagccctccctgacgtggtgccggaggggacactactcaacatggtgttgagaaggatgcaccggccccgaagctgctcctaccagctgctgctggagcaccagcgtccgagctgcatccaggggctgcgctgggtgagtacctttcacctgcccaggtgccagggccagtaccagagctagaggggggcctagatcatggcttggcatgctgctggtggcccagcttgctctgggggtgtacagtggtacagctgccgtggacactgggtcaggaagcttgtctgcagtgtgcgtgggtggctcacacagctgcaacgtgtgtgtgtctgtgtgtgtgttctgcccaaatgtctctgtttgggcatggggggaaggggaaagggatttgttgtttatctgtcacctcagtgagccggcattgagttaggtacttgtgtgttctttccaggtggaggtgggaggtatgggggccgggtcaatgggttggagtgaggtaagcttggttacagttctgggtgcatcaccgtggcaacattctcctttagtgagttactgaactgtgctaattctgcgttttggtcttagggtgaggtgatcatgtggacactgcttggtacctgcctttggggggctcagggaaggattctgagacatttggagaatctgagatcaccaaagtgccctttgctagtgagaaacatctctggacctgaaagaatgaaggagagagcagggaggggaaagaatggtgggatttgggaggcaagataatggctgtactatccaaatcagcagagaagctatccccaaccatccagactaaatagagtagcttagcttgagattcagttatgtctccactgcgtgtgtccacccaggtttcgctatgttgcctaggtaggtcttgaactcctaggcccaagcaatccacctgccttggcctcccaaagtgctggtattacaggcgtg

SEQ ID NO: 6027 - DNA, 6000 bp, Homo sapiens
gtgttgttcccttccctgtgtctacatgttctcattgttcagctcccacttataagtgataacatgtggtgtttggttctgtgttcctgcattagtttgctgaggataatggcttccagctcagtccatgtccctgcaaaggacatgatctcatttctttttatggctgcatggtattccacgttgtatatgtaccacattttctttatccagtctatcattgatgggcatttgggttgattccatgtctttgctattgtgaatagtgctgtagtgaacatacatgtgcatatatctttataatagaatgatttatattcctttgggtatataccctttaatgagattgctagttcaaatggtacttctggttctagatctttgaggaattgccacactgtcttccccaacggtttaattaatttgcattcctgccagtagtgtaaaagtgtttctatttctcccccatttagcaaatggtgctgggagaagtggctagccatacgcagaaaactgaaactggaccccttccttacaccttatacaaaaatcaactcaaggtggattaaagactttaaagtgatcttttaaaagcagaatccaattctgttatcttccttcttaaagtcctccaacagcttcccaaagttctcagcataaaaccctacctcctaacaaggacctgcagtgatctggccctgctgcctcccgacttcacctctgcccctctcctcgtcacttactctgagtttccctgtcctggctttgcaccagttctgtggactccgcgacattccccctgcctcaggctgcctgatccttcttccttcaaatctttcaaatctggcttctccttgacattcaggtctcagccaaaatgccaggtctgccttcccacccagttactcactaccatatcactggattttaattctctatgtagaagctcttattattgtcatttatttatgtatttatttttgagatgggttctggccttgccacctaggctggagtgcagtggcacaatcttgactcactgcagcctccacctcctgggctcaggtgatcctcccacttcagcctccctagtagctgggactacaggtgcgcactaccatgcctggctaatttttgtattttttgtagagttagggtttcatcatcttacccaggctggtctcaaactcctgagctcaagggatccacttgccttggcctcccaaagtgctgggattacaggcatgagccaccacacctggtggtagctcttattcttaagtagcatttcctcgttgctatctgtttgtctgtattcccccatcaggatataagcccaaggaaagtatagctcttgtctgcctccttcattgctggaatccaattattttactgtcctagtaacacttaccaggtcatttttttcgaattaatatatatctttcaaagacacaatgaggccatatcatatccattgttttttctcctcccactttcactttataataaatgttggtgttctctctctcctgattcttttttaacacctacatagtttccatcaaatggaattaccataatttaatcgaccagtccaccataatgcatatttcagctgcctccagtcttttgctaagcacagttaatttcactattgttgggaggggtgtgaaaaccagacttggagaggaggagaggagagagagatgagatggagcaaatgatctaattgcagaacaatgcatcatctcacccttcaatgctgggggcagggattgtttagagcagccgtgtccaaaagaaatgttagaaatgatggaaatgttttctacctgctttgtccggtgcagtagccactagccacatgtagcttttgagcatttaaatcatggatgtaatggctgatgagaagaatattcaattttatcttgctttaattaaaatgttaatacccgtaaagaacagcatagatttagacaaagggatttatactgatcattaaagaatgttcctgtttacttccctccccataacccagtcacagtggcatacaattcagggatatggggagaggagtgaacaggaatagagaatgttcattatttagacacagaaggtcaagagagaagctgtatgctgagggaaaataaatcccaagcagacccttaaagcaggctctcttacaagttttctcttgacatctgtggacaggtagtgtagaacaggaatcagcaaatttgttccacaaagagtcagatagtaaatatttcagcttggggttatgccaactctgtcacaactaaccctgctattgtcaggcaaaagaagccacagacaatatgtatataaatgagtaggcatgactgtggtccaaggaaactttatttaccaaaacaagatgagggctggatttggccattggttggcccatagttcttctagaacccctgttctagaagaacctggctagagctgcccagttcagaccaccaggcaatcttcctgagaacaaagggagaaccatgccctagccataacccaggaattcttgagttttacacacccagatgggctaaaagacagcatggataacccagtctcagtgaatcagttactggttcaccacatctgatttgagatttctgctgtgtcttgagacacccgtacccttatagcaggtgtcaaacagactcctgcctcatggccaggtctgtgctggtgcggatgtgatacacaagtcagggttgctgacaatggaagctgtgtcttctatttccctttagacctctgaagtgtaagaacacagtgcatcacacttagagtgtgctcggttggtgtgtgctgaatttttaaccaagtgccgcataacctctctgaacttcaatttccccatctatgaaatgggtataactctagtaccttccttgtagggttgttgtgaggaccgcatgagttaatgcacatggggagctggtacctggaccataggaaacgctccgtgcatggtgctgatgcacatggagtgctggtgatagcaacctaaagttcgatggttctgggagcttcaagggcgctcagacttgagttcagcctttaaggatacatggagagaagacggcactgggtcctaggagagtgaaggtacagagaagctgagccagagcaggttcaaggtgaaaggagacggggaaacagagtttgggccatgtgccttcatgaagtaggaaatttactagagacaatacgaattcatgccaagagggtgataccagtctttcccactgatgccatgccccaccccttgcagacccctcagcagaccttgtctgctgtgaccatcatcacacttgggcagtatccctctttgagaaatgaggagacaggcccagagaggagaagtgacttgtccaagaccacacagctggtacaaggggagcaggaccatcatccagggccatttggaattcagtccctgctgcccacatcatgttgtccattgtcctcacccacagaaaacctgcctttgcactacagaggtcccttgggggttacttggctcaatctctgagagctgcattacccccaaacagatcccgtgaccataggggaaccatattcctcccaggccagatcctgtgtcatgggagcttggtttgagaggactgatgcaggtaacacctctcaggtacctcagcagttctgttttgtacctggaggaaaactcctttgcttcttgcaagaaatctattcttcagtccaaatctccctgtggtcaagctcttgggtcatagtgaggaggaagccatgtaggtctcacccagagagccccggaatcctaactcctagtacatgaagatgtctgcgatccaaagcttggcaagggttggtgggggcggggtgggggtagtatcctctttctggcaccagagtgggatggagcctcatgtagctgtgagagcctgggctccggatctggacaaattgggttagaagcccaatactggcccggtgcggtggctcatgccttaattccagcactttgggcgtgtgaggtgggtggatcacttgaggacaggagttcaagaccagcctggccaatatggtgaaaccccatctctgctaaaaatacaaaaaaaaaaaaaaaaaaaattagctgggctttggtggcacatgcctataatcccagctatttgggaggctgaggcagaagaacgagttgaacccatgaggcggaggttgtagtgagccaagatcacgccactgccctgcagcctggtcaacagagcgagactctgtctcaaaaacaaaaaaggagctcagaactttctggactcggtttcttcatctgtgagatggaaccacctgcaaggcttgttgttaatattcacttgtacattcatccaaaatatagttttggaggacacactgtgcgtcagacatttttctaggccttggagacaacattggtaagcaacattgagatagagctcatattctagttggcagacagagaacaaatgaagaaattcagacaccgctagaataagaatctcataaagtggccagtcctgtgtgtggcccctagtaactatcccattaaaagtggtaggtatttttcttgtttgagttatggcaccaaagaatcccttgagacaagggtactgtattagtctgctagggctgctgtcacaaaatatcacagatcgaggggcttaaacaatggaaatgtattttctcacagttctagaggctggaagtccaagatcgaggtgttggcagggttggtttctcctgaggcctctctctgtgtcttgcagatggccgtcctcttgctgtgtccttacatggcggcttctatacatccctggtgtgttgtcctcttcttaaaaagacaccaatcctattggattggggctctcccttatgatgtcatttaagcttagtcacctctttaaaggttccatctctaaatacagccacattctgaagtcctaggggttaggacttcaacataggaacttgagggggacaaaattcagcccataacatgcattgatggtgagaaccaagagaatgtcttaagaccaaaaacgcagtgtggggagaaggggcattttggccaagtattccttgcacaccttttctctggatgcctttgatgatgctgttgtatgctcccttcttcaaggaaggcttcctgcttcccaggcctggcatcatcaccttatcccgatgatggacacccttctccacttgtcagtgtcattctcagactttgtgtgtttgagaattcaagtcatagcatttgtacactatgacttatttatcccttccactattgatggtcactgagatgttcccagtgtttgtgtggcccttatgaataacgctgccatgaacattcttacaaaggtctttttttgcagacatgggccctcattttggttagatacaggcctgggagtaaaatcgttgggtcagagcttactttcagctttagtagctactgccaagtcatttttcaaaaacggttgtaccaatttacactcccaccaggattttaggagagttctgtttgccttatatctttgccaatatttgtaactgccagtctatttttagccatttgggtgggatctatactatagtttacttaacatttttttagccaacatctcctccccctcgtttgtcttcttattcttccttttctcttcctttttctcctttgtcttcctttttctcatccttctttctcttcctcctccccttctttttctccttcttagtatcttttgcatatagaaaataattactatgaaattatagatttgacgtgcaaaggctatttcttgaattttattaaaatgcaaaaagatgcatccatgtcttctctaaaaggactgcgtattcctccacacttggggaaatgcagcttgtgctatttcacaggctcatcatgccccttttttttgccaggacgctggttgattaatgcca

SEQ ID NO: 6028 - DNA, 6000 bp, Homo sapiens; identical to SEQ ID NO: 3242

SEQ ID NO: 6029 - DNA, 6000 bp, Homo sapiens
catggagccctccctctgcccaggtcaatgtcctgcacagcatgaaccgggttgcccaccccagccacgtgctcagctcccagcagttcctgcaccgtggtcaccagcccccgcctgagatggctggacacagcctagccagctcccacagaaactccagtacgtaagcctggtggggctgggcagggaggggcaggtggcaggtgagtgtgttgggacaggtatcctccccctccacctctgggagaggacaaggtaggtggagcaatgggttctgttccctgtggtacctgccttagttgacagctatggaccaatccctctctccctttggatcattcactttcccttgtgaagaacatgagccttgtgtcattgtagggatgcttatgcctgcagtcataaagtcagtgtgggtttaggcgtgtttgttatacctgatgatgcctccttccccagccccaagcaatatcaaattagccctggacctaggatcctctgtggtgaaactatcaagtatttactaagcacctactatgtactagcactgtcctaagatgatctaaatgatttataggatagatcagtccctatccccaaggagagaattggtactattacatgtaaaattatgtgctacgtatgcagtcacaagaatatttctaaaaaatatatgcaaatatgcaaagcgttacattcagatggagtgctgcccttcaaagctgcccttcaaagcaacctggccgtggtcccaaaggttcccggtcatggtcctttacgaatggtgcaattttattttcaacttttgagttgcgtaattgtagaaaaaccagaaaatatcaaatatttcttttaaagaagaaaaatcaggccaggcacagtggctcatgcctgtaatcccaacacactaggctgagtcaggaggctcacttgagtccaggagtttgagaccagcctgggcaacacagtgagactctgtctttacaaaaaataaaaaaaattagctgggcatggtggcaggtgcctgtagtcccagctacttgggaggctgaggtaggaggatctcttgggcctgtgaggccaaggctgcagtgagccatgatcacaccactgcactccagtctgggagacagagcaaggctctgtctcaaaggaaaaaaaaaaaaaaaaaagaaagaagaagacgaggaaaactcagccataattccgtcagagaggaaaccactgataatatgagtattctgttccagtcttttttctatgcttaatttttcctttttagaaagttaggattagcctattttgtaacctgatatttacacttcatattataaaacaagtattttcccacattattaaaaattgcaaatgatgctgatgttgttgaaagtgatttttggaaccccttcttagaattgctttcagagccaatttatgaggtgcatttatttttgttattttttggacataacttgcttttgaccctgttcagtgttactcaacttcatcacccagttttgccaaagttgaatctggatataattttaagtttttaaacattaaacccactctcaaaggccatagatcggtcacctttgaaaagagtcaaaaggttgtgtcacaggcttttgagaattgaaggcaattctcaaaggagtccactagtgctttctgggaagaaatttgtggtctctgaacactatgtgaaagtacagaacttatttcaatatatgtgatgggtaataataattataacaaacacagggtgctctcatcatgtgccaggcactgtgctcgggggattacgcttattaactcatttagccatcataaacaaccaatgaaatgggtaccagaattatcccctttacaggcaaggacacagaggcacagagagttcaagtgccttacccaagttcacgcagctagaaagtaagtggagccaggatttaaatccaggaggcatgattccagtctgtgcactaaccatggccctcacccttctccccagatgtttgatgctttaaaaaagattagtcttattactttagagttgcatataattagggggagcccctgaggggcttcccagggttttctgactgaggccagctcctctgatgcccccagggattcagtctggcttcctctccttgtgcaacggccaccacctacactgtctcttattttattttattttatttttctgggactggctcccttcttccttgctgtccctgaaaacaaccgcagaggcttttgggagggagagacagggtcttgttctgtcgcctaggctggagagcagtggtaatcctagctcactggagcctcgaactcctgagctcaagcaatcctcctgccttagccccctgaggagcagatgcatgccactatgcctggctatttttaagactttttatagagacaaggtctcactttgttgctcaggctggtcttgaactcctaggctcaagcggtcatcctggctcagcttcccggagtgctgggattacaggtgtgagccgccgcacttggacttgcagacgcctttttcagtgttctactgtgattcactatagcaagtaggtggaagtgaggattagcggggaatataaggcataaccaagctgcaaagattagagaagtttcacatagtatttagtcaatagagacatgttagcaagctaaacctatttatttcaaataaactcttgaggccagctataaatttttttccttcttgtgattccatagcactttctccagttctttcattggggatcattccactcaatcttttctggttggatactaggtcctgctactctgattaggctcaaggtagataggggtgctgcctggcctggtgagattctcgatccttactttctttggtataaggccccaggtgagagacttcttgttctaggagcccagcaccttctcccctgagtgtccagctgccctgcatgggctggtctggcgggcagcgtttctcacccctcagcccctggaggagtgtctgttcacggcaccctttcacctcccctcggtgaagcccagtctccccatcctttgttctgagctcatgtccaggctgatcaagcttccctcagatttcagttgagagcagcagttttcctttgcttcttctcttattttgacctgaataggacacagagttcgtagcttccctgagggcactggtgattggcatgcctgagctgacaggccattcacggcataaaaccctttccatatgccttttctgactccgcaaggtgctccctccctttcacctacaaatctcgagtggtgttgcagaactgtggtttcacaatatcaaaccattctaaacatgcagaagcagtgagaggtacgatctcctccagtggcacggaggcccattgctctaaatctcctaagtgcactagagaaagagagatgaatgtgaactggaaccagggtaaactggaacagtcaggggagattttgtggcacatgtagagtttgcatttggacctgaactgtaaaagggatttttggatgggtgtgagagagaatgggaatttgagaaccgggggtagataggtggttaagagtgtttatggttagagagaataaggttggttgagaagagcaagccggatgatgagggtattatgtatctactcatatcaaattttgatgactgccagaatcacctggggagctttaaaaactctcggcacctaaattataccctagaatgtctagggggtgggagccacgtgtcagtggtttttaaaaatcccatgtaatctttaaaagtttgggaataattttcctcttttgtttcctacaagtatctgaagctttgcagaaagagttacaaagcaataggacaaaaagaaaatgaatgaggaagtaaggaggaacaggtaatgatgaaataaggatccaatgaagccagggaataaagtcagctcataacatgcgtactatgagatgctatgcagttgctaccacgggccagaattttgaccctgagcttcttcaaagctaaagcaaaaggaaacctgagcagttctgagagccgtgataggagccaaacgctatttcatgaaaagccctgggagtgcggggggcagaaagaaatctctcccaaggctctttgcaaagagagcaccgtgtggggccatggacagggctttccactgtcctcgcaatcccatggaccatttgctaagtcaccccttaatgttggctctggaggtcattcaaggccagaattaactgctcagatctcatgtagcaagaaaagctgaacgcacttcttaaattcttgatttttatctgtagctgatttaaaaatcctcccatctccccgggctcctgactcatcttaaactaattaaccagacttgtttgcttgtagatagagtgtctgcattttgtctttcctgtggtcatttcttattgtcctggcaatcaacttgtcatttccttcattaggccaggagctcggagggacactgcattgattagggcgcaaaccagctttagctcgtcatcgttgtgtgcttagaggaagttcacctgctttggcctccactctgagggtggggtcaccaccccttctggagcctgggcttagccactgggcccatctgccagtgaaggcactgcccctggctctggtctgttgacgtggagacctgagagacactatttcctgcagatgggcaggagagacagctctgtcccctcctcccttatcccccgttcccaggaagttgagaaatactgatccagccagtcctgtcttcaccttggaaccagtgtcgagggagtgtgccccagcagagtccgttctaattggctggtggcctcaagtgggctgtgggtcaggatggggaccaacttggcagacagccatcagggtggcctcagggaggtgtgtggcctgcccaggcagggcattctccacacacctagttggccctggagtgcgtggcagctgagtgtgctggctgctggggagaggggcgctgcagcagggtgtgggtgtgagtgtgaggagctcctgggccatgcgcttccctacgctctgctctgtctgttgacacatgagtctcaggctgtaggtaatttgcggacggggctggaatgcgatgtgtgtatttttctaggggcttgcttgtgtgactgctggtctctgtgtgtgtttggggcacacatacatggaatagtccctcagcaacgggaccgcccagggaggagctgctgtgtatgcatggtgggcaggggtgtgcacccatgtggggagtagtgacccagctgcccgtaagggccctgggcctggaggtgcgtgtgtggggtctctgcctccacctgctgtccctggggctgcgggctttcctgcttttcttccttgtgcttcttcgagagctgtgtgtgtgtgtgcaggaggcaggcagggctgtgctcatggcggctcgctctgtggccctcacggcccacgtctgtagtgtctatgtcttccttcagggggttgcctggtctgcccagctggtggggagctgggtgatgctgcacatatggctctaccgtgccttgctggagacccccagacgcgttcctttactcccgcagtgtgagcaggcggccaggtggctggtgtgggccagcatgcaggctggcaaaggcctggctcgggtgtggggcgtggcaacctttgtgcagctgtgtgcccacacggtcttcctgagcatgtacctgtgcatgcacatctgctttgccgccatcagctctaaggtccgtgtgagagtgaacgcaccgttctgtgtctcagtgcccttgaaggtccatgcccctctgagcctgggcatcaaagtggggctgcagggccagaagcatgggagagccacgggggaggcaggtatgcctcagggggagatgttggggaagcaggaaccccagacgtcccggagccccaagcccaccaggagaagggag

SEQ ID NO: 6030 - DNA, 6000 bp, Homo sapiens
ctcaccctgagctagagatggctaccacagctcagatccttaaactgagaagggtgggagtcaagggtgcggcagaggctagtgggagcaagtagaaaggtacccagcctgcaggccagacactggcacctctttgttagagaggggctctgatgtgggctcagagcagggatcccgtgagataaaggaacacgcaaattgccatgagctagaggggcagagaggaagaatccaaacacattgcctcactcccactccctccagctgtacatgccagggtcagcctcttccctcatggctctgaccttctcaaggccaccctcagcctcttgtcagcagccccaccctcctaaaggcccaagtcctctctgctccagctggcatgtttcagctgcccctacttggggaactcttttcccaaagaactcccaccacatgtgcctgtaatctgagtcaaacatcgcagaaccttttccaaggatcctaacccccacctccatctcttttcagcccagcttccctgactaacctctgatgtttacaaagcttgtaaacgtgtgggggtggaggaaggacttgaactgaccccttgggctgtgctgtgctgtgctgtgattcagagtcctaaagctttaggaatttagcgagagcagttccttgcttctagtgagggagagaaggtggtaaattctaggccagcccccacattcccctggccaccctagagatcctgccatcaatacccattctccatgtggggcagccctagagttccactcatgttccaggctcattgctcactgcaatccgttctgtgagactggaatcacctatcatgtgcatcagcagacccagaggggaaactgggatctaagactaaaagaaacatattatcaagcacctactatgtgctaggctgagccggattctgggcagcaagagcatgaagccaatcacctcagccctctcaccttcccctccttcccaggtaccaggaggaacctccaaatgcacacaacagtcatactatctgtcccagagtgagcaagagttaggtcttgaacccacagctgactccccagtctgtccagaggcctgatttgggaaggagggtgcgatcttgctgggcattgtcgcaagaaacccttcagacatatttatagcaaatgctgcatcaggggatggaatctgaaagtgcctcgaagcatcaaataacaccatgagtccagaggcagagcccagaaaaagaaggcactgcagcaggagggattgaggtttgatattggaggaacttcccccagagtaatatctggaactggcaatggggattccctgtggaagctacttccacaggattttctcagaagagaagggataggtacctttttctggtctaggtagaaaagataaaaagggatggacatggtgatctctatctttgtagtatacagactttcaaatatcaaggccactaagcacagttgtgcagattatgccttgctgaggaggcaaacggagactgaaatccagctctagatcagttacctcctgctgcagagctgtgtctgtacagactagccagagtggcttgtaggggccctgccagatatcccaagtcctgacaatcttggggtctgaggacaaggtgagcagggagaagggatgaaggctgcctgggaagccctgggggcctgtttgctagagctcagagcctatatgggccaagttagagggcatagcttccaggaatggatccagggtagaggcccctctcagcagggtgccctgcccagatactatgaggtttgagccagagatgaaggccctgagggagcttgagtggggaggaagaggatatgcgtcttgggcaggccctggagaaggataatcctgccagtcacgtcacagagaagggcctgggagagggcagttctggggacctggaggatgggctgctggctctagctctgaagttcctaccttctctgcagagcaagatggagaaggggcctgtggtccagcagctggggtggaaatgagaaaagtaaggggtggggaactgcccctgtgcacctcagatttcctgtgataggctcatggaggagtaattttttttttttgagacagagactctgtcccccagagtctggagcgcagtagggcgatctcggcctgtctcctgagttcaagcaattctctgcctcagcctcccaagtagctgggaccacaggtgtgcactgccatgcccggctaatttttatattgtttgcagagatgggatttcaccacgttggccaagctggtcttgaactcctagcctcaagtgatctgcccgcctcggcctgccaaagtgctgggattataggcgtgagcctcggcgccaacctcagggagaagtaactgatatttctattttaaagtggaaggtgggccgggcaccgtggctcacgcctgtaatcccaacactttgggaggccgaggcgggcagatcgcttgagatcaggagttggagaccagcctggccaacatggtgaaacctcgtctttactaaaaatacaaaaattagcctggtgtggtggcgtgcctgtagccccagctactcgggaggaggagaatctcttgaacccgggaggcggaggttgctgtgggccgagatcgccaccgcactgcgacctaggcgacagagtgagactccgtctcaaaaataaataaataaataaataaaaataaagtggaaggtggagagatggtttctatgctatagtttcaggcagagaatgtggagggagggaaggagagaaggttgcgggaagccagggacaactgcttgcctgggccaacatcccctctctccccacctcccttctcctatggaaacttaagctgccgcagggcccagcggagctagtccattagctgtggtcagcaggggagtgtaggtggggagggccctctctccctccaggtcttcttgccaaatgaaaggcaaagcgtttgctccctctactagagtcaaaacaaaacaaaaccataaaaacctccacacgcatttttaacacacacaaataacataacttctttcctctgaatggtcgaagctgagcaacttggaggtgggtgggtggtaggggctccgtgacccactagactagactacagagggagtgggggaggaggtgccttctcaaagcactttccaggttaaatccagcctcgggaggagggagtggagagagaatttactctcccccaacttacctccctcagaaatgggggcaagtggagggtcagctgagcagagagggaggaacagtctcccgagatcccggggatgggaggattgaggggaggggtcccggaaactcccaggggaagtgggttaaaagaagggccgggaagaagggtgggacgccctccactggaaaggggagagcgttctagttaatgctgaggggaagttggggacctgggtcaatcggagtcagcgtgtgtctgtctccatgaaggggggtccgtctctccccgccccaggcgccgtctttggtctggagaagggtccagcctggggtcgttgggggtgtgaagggaccaatgagcggtctgtccgctcagaagggtccagagagagagccaactggaactacacccccgctcccccttcccccgccagaacttgggcttgtcctgtttgacgcacccgcagaaaggggcgggaggggtactgacccgaggagcggtcccgcgactctgtactccctgctgcccagtcccggccaggacgctgcccggcttagctggggcgcccctcgagaccaggatggaggtagggacgggctagggtcccggaagggcgcgggtgtctcgaaggagccccacggggtgggaataagtagagcgcagcctggggtctcctactgggggtctcgagctgggactgcagttcctggagaaaggagggggagaggggttcgtcctgggcttgggcggtgtctggatccggggtgcgtcccccctgctctggcctgggcagcgccgcctgctggcagggccggaccctgcggccccgggaccggacaccaggcggtgccgccacctggagggcgcgtgtagccgccgggccagcgagcccaaggggcgctgcagcgggtcgagaaggagccgcgtcgcttcgcctcgcccttccccttcgcggagctgagacccgctgcaccagaacccaggagaggggggagacggcagagactccgcgggcgcggggcgatcccagctgggctctctccacagggatgccgatccctctggagacacagagccgagccggggacgggtggatgggcgccttgacgcttgggcgggcgagcagagcaccagcactcttgcttttcggtcctttcccccgccgaggtcggggtcgcagccgccgccggaggatgggcggccggcgcacggagcagggccgggagggagcagaagcttccgccaagagctcaggagctggggcagccctggagctcttcctgcccttctgcccgcggcggcggaaactccagagtccctactctttctcgggaggactttagggaagaagcagagcggcaggggaagccgaggagcgagggtgcgacgtggggatggaaggacagtgggaggcacacggaaaaacagaacgaggaccttagacaggagagacggaagtggagagaggctgggctgaaaggcagggagagccagagactgacagaggcggcgagaaaggaagggagagggagggagggaggagggaggagaaagagggagggaaccaggggagagggaagggagcaggcggcggagcccggcgggcgtggggcgaggccaggcgtgcaggcgggagcagcgtgcagagcagcggccgggttttgctcccgcctcggagcccctggcccgggggagggggagaggccgctagcctggtctatgtctttttctgactccagtgcaaccttcctgctgaacgaggtaaccgtggggggggtgtggggtcgtgggaagggggttccccactgggtgggaggagagctccgctccaagctaggaagggggcacgcgtttgggggagactgcaccgatggggaggcagggaaaccggaggaagtgaggccaggggtggaagaggcaccgggttagagaggagggagcggccagagctggcagcttcctagtactgggattggatgagaggagaggactgactgaggagccagaaaaaaaggggctagattacaagaagggctctgccaagctcccctagcgcctgtccctgagttccctggcagcctagcagccagaatggtaggggcctccacctggtccagatcttaaaaactgctggggaggagtctttaagtcttcccagaaggcctagcttctgtctcagtttccccattcagtgcccagggactgggatctgcccagcttcctggtacacttagaggagaagctagaatatattctgaaacctcccaagaaggtttcaatatattccagctcccaaacctgattattcaggcttttcctcttatgtcttgcttctatgacttgggtacctgccagctgccagtctaacaactctctcctagaaagaatcagcaggaggagcctctcccctgatcctttattgccctcagctctctccctttatgcccagccatgaaaaagaaaagaggttagggctacatggacactgacaggcacatgtcctgtcacaggacaagaagtcaccaagttggtattagaactagagtaggcaggtgtgggtgagaaatgaaaggaacattgggtagcaacccagagatatgagaagaaggagggaagctctgaagctactgcaggacccaggggatgggcccaggtatgaggagcttgaacccatctcctggggatggttggcatggcaacacatgcctcaggagcagacttagacaaccttgtcgcaggagattacaaggagtgtgaggaagg

SEQ ID NO: 6031 - DNA, 6000 bp, Homo sapiens
ggcacagcacttacgcttctgctaacactgaaatgggttcgcattcctgaccacaaaaggacagagatgaaattctacattcacacagcccgccaagttagccaagctccctaggaggctgtctgaagtgcctaaaatgcttctctacaatgatcacccagagctgagagacttcagtggggtagtgagaagaaagagggttgggagagacaggaaagcatcctctccttgagggaaggaactgggaatcaactgagaaccagctagcactgccaggaggtgaggagagggaaggagaataatttaaatgaggccagggagcttctgctccctcaattaaacggtgatagacggcctgacaccaccagccctcgaagcctgagatccacaggaaatgttaaaaactggcttggcaatataagtattagaaaatacttcttccaacactcaccaaaaactaagctcccaataaagaacacttcacctgccctccgcaaccctctacctctcttccccgccaagatcttcacccaaggtctcaagagggcggttcccaacctcacgtgacacagcggtcacgtgacatggccccggggagccgaggtgagcgttccagcttccggagccggagggggcccggcgtacccagcccccagcccgacgtgaccatgctgtcccgcctcctaaaagaacaccaggccaagcagaatgaacgcaaggagctgcagggtgagccaaatatcctgtcggccgttttctcttcggccgcggcctagcttcagcccggagcctggatctcgagtaactaaccatatccagggaaagacgccagctagcgggcaacgggcatgggggagagggaatttcagagaggctttttttgaaactcctttcccttgccaactggctccggtcccttgggcaatactccggtcccctcggcaacgcccccaatccccgacctgccgcaccttagccccgcccctgccccggagcgccctgcctattggccctgggagcctctcgtcctggcggcgggaaggagcgactctggagggaggagggtgtggggaaccccccagagatgggcttcttggaggcctgaaaccaccggaacggaggtggggcacttgtttcctgagtccgggctggaaatctcggagttaccgattctgcggccgagtagtggagaaagagtgcctgggagtcaggagtcctgggcgctgccgctgacttcctggcgtccctgagtgagtccatttccctcccagggtaccagtttcctcatctctaaaatgaaagaggttgcgctatgttttgcaaggtccttttcagctccggcattcagagattagttaagaaatttcggcaactagcagaatagtaatggatgggtagggaacctttaacactacccctcaaaaaaccaagtctcccctccaattccttttccccctctccccagaaaagaggaggcgagaggctatcactgcagcgacctgcctgacagaagctttggtggatcacctcaatgtggggtatggacctcttatcaacatcagtttcctccttccccaccccgcccaagtttaggcactggccagtctggccctcaaatagctgttgaaggggtgggatgttccactaattcccctatcctaccccgcccctcccagctctttgtagagcaacttgagtcaactctgagtcctagcactgggcaagggaggaacagctgccgtggttagagaagcagccagatttccccttccccacgttaacttccctggcatttacaacttgatgccatctgcccacctcccttcacccttccaagtccagctgtcacttcagcaggagggagagcaccctccttcattacagcttaccaccctctcctctgcctcccaccctctggcaagcctggggagcagctggcaggaaagagatggcagagctggtggtggtgagagtagaacctgttccgggagctatggcagagccaggctgtctcttaccttcctattgggtctctagggaccacaccctgccccagccctaaatgagaatgcaagtaacagccaaagacttgggaaaaagcaaagaacattgtctcttgaccctaagtgacccagaagcgtgcagagatgatgatttgctagtctgcctattggaagaaaggcagtatggtaccttccaccccaggtcaagtagaacagctcggtgtgaatccagagactgagtcatccaagtgagccatgcaggggctggggtcatctttgttactcatcttgggggaaggttgagagaaagaaagttgtggctggggcctctgatctcccttctctccaggcagctctctttactcagtgtgaatatagaagcaggtggtcaatggggaaaaccagaagttcaggaattctcaggggagtctgtttcagttcctacccgacccttgacagtgacccagctgtctcccaaaaagaaggaacagggtctgccctcccatttcctccctcccacattggcacctcctgggctctgctgtgcccatcatttgtgagattggcccaggcctttccctcttcttttcctttgctagatgccaccccactttcagcttagagggcagctaagccaaagccagattagaaagggttttgtgttgctgcccacgcctcctctcattccccggaaaggaaaacaaaggctcagtctatcttggcccctgtcaggtgtcctgcccactccctcagcccccaccaaccccttccccgctccagcccccacacattccagtgggtgggggcaccggatgtggaatctcctggctgagtagagctctggggtgggaagtgaaaaattcaacagccaataaaggagaacaattattgcaggggttggggagggcaaaaaacactggcagaaggttggggacaccaaccccatggtagtaatggtaaccacagcccataccttgattgaaaagaaaaactagtgcctaaggcagaagggagggagagcatgtgtgtgtgtgtgtgtgtgtgtgtttgtgtgtgttccttgatctgtgtgggcaaaagcgaaggcttgggagagcaactgagagccgagaagaaacccctgggataccctcttttgacccagggttcctggggagggggtttgtactcccatcctaacccggcttcagggaggggcccaatttccctctccaacttcttgcatagatccctaggcttccaatcactgccagatgtgttcctcctgctggattttcccagtttttccatgcccctttttccctcccagctttttcctcagggatatcaccccaggttttccctcccttcccccactcagctgcaggaactcctttttggggtttggagctggtatgtttctagtcagctccgagcttggctctcctgggaatcctgggagtgaaaggaaggagctgggtttatttgcatgtactggtagtcatttgcatcacatccaaaaatggccaaaattatgagccctgattcttggctgaactcccactgctgcaatggaatattagtcccggagaccacccccaactagctggagctgatctcctccctcctccaaccccccagtgtggcccaggcctacatgaaccagagaaagctggaccatgaggtgaagaccctacaggtccaggctgcccaatttgccaagcagacaggccagtggatcggaatggtggagaacttcaaccaggcactcaaggtgggccatactccctacctcaccaccccaatcctgggcccccattggctgcctccagtcaggttacctcaggtttaggttaaggaggaagtagggtggtcccagaaaccccatctatagccccagtgtcagaaaaggtagagaaagaaagaaaagcagttggtgggtccaagtaaagccttttccaggagatgaataaaacgtattccccagactggaagccatactctacccattctgattcctgggctcccacctcctctcccccttcccaggaaattggggatgtggagaactgggctcggagcatcgagctggacatgcgcaccattgccactgcactggaatatgtctacaaagggcagctgcagtctgccccttcctagcccctgttccctcccccaaccctatccctcctacctcacccgcagggggaaggagggaggctgacaagccttgaataaaacacaagcctccgtttctctgtggtgtgtttcagagagctactagctccagtgtcgggggtgggagtggaaggttcaaaggtggtttccctgagggacaggtaccttttggggagagggtggaactagcttcctcttactatcccaactctcttctcctccatggcccttgtgcaggtgtctgttaggcaagcagagggtgggagttcccatccctcctgagagaaggtcctagtagccctgccccaagcttcctaattcaggacttgtttcctacagaagagaaacaaggcaaggtacaggcctggtccccagctctggctttctgcctctccacgtgctcatggcctctcccaggctaactctaagcagtgtcatgagtctgagccaggtgggagattaattcctgggggcacttcagggctgagaagggggaggaatgacaggtccagtaaccgttaccaacagagcagtgcagctgccatccttgacagctccctcctccttggagaccatgacatagatggtcaggaacccaggctgagaaagacagccaaggggtggggggagcctaggcaaatctggcctctgccaagtcctggcttcagccaggcaagctccagcctccctggctcctcctcctcctcagtcctatccccaccctgtcacacatacacttaatacgcctggcatccaagtccacccactccggactttggccttagcagtagttagtgtgggaggctgggaagactgggagcagtctcttaaacaaaagcaaaagaataagcttcgggcgctgtagtacctgccagctttcgccacaggaggtaagtggatactgggagctgggggaactgagaagactagccagatattacatgtattgccaactcaaaactttcagcttttaacatgcttcctcacacattatcccctttgatcctccacaactctgaggtggacctggtgggtcttagccccacttggtagatgagaaaataggttgagagagacagtgagatgctcagtatcacacagcaaacctcttggccctatacatcattccaaacacaagacccaggttgcatatagaaggttcagtgtccctggtttagaaggagaggtggtgtgaggcaagcaagaagatgcctctgctgcactccagcctgggcgacagagtgagactccatctcaaaaaaaaaaaaaaaaaaaaaaagatgcctctgctccatacagcaggtctgtacacaggatctggctcatgtggttttagttaagttagccacaaatacagggtctgcccacatctttgctttgaacagatgagccatggttggccaattatctgccaaccagataatttctcaatatgctcacaccagatgcttccagctagggagggtattaggggaaagggcttgagggccacagtaaactggacaagtttttctgcccagcctaggctgccacctgtaggtcacttgggctccagctatgtggctgcctcttctgctgggtgccttactctgggcagtgctgtggttgctcagggaccggcagagcctgcccgccagcaatgcctttgtcttcatcaccggctgtgactcaggctttgggcgccttctggcactgcagctggaccagagaggcttccgagtcctggccagctgcctgaccccctccggggccgaggacctgcagcgggtggcctcctcccgcctccacaccaccctgttggatatcactgatccccagagcgtccagcaggcagccaagt

SEQ ID NO: 6032 - DNA, 6000 bp, Homo sapiens
tcagttaagagaatcttaacagccaggactatagccctatatcaattaagctaaagtattgtcacagcaaaacattgcttatactccataaattgtccaaatggaaactgcatggaagggtttctagcttgtccccttgagcccccagtgttccccgctatgctgatttacccgctgtcttccaaggccctgctccttttgcaacctatagtgcccccagtcattgtgtggaacctgtaaaaagatcaggaagtcttttcgggctgcagggtggttgctcccatgctctagcttaatttcactgggggagggataacccaggaagtccttgaatgtgaaggtaatgagtgcaaatgtttgtgagacctcaaacattttctttccttcctacggggcgggctctgcctgtctatatgtgtatgtcaggggctcctgaattccagcttctgctcctgctctgcactgcacctgccatgcacagattctcctcaatgccacagccaccaaactgctactgtgcccttgctgccccaccctttgcatgcccacaaagccctctctggggaagcgggtccctcatccccatggccgccctggggctattgatctggcacatgctgggagatgtgggggaaaccagatggagacaggacaaggcgctctcacaagagttctgggctgcagtggagatggcaggttttactgcctagaaaattatataacttttaaatgcctgaccacccacccttcgctctgggagaaggaatgagctggacagaacagtccattacataaaggcaatgaggccttttgaggaaatgacatggtctccatcttctctgactcctgatttttctttattctctctcctcacccctgtcccctacgctcctctgggtgaccgtcttgggtcacttgccttcctttccacttcttccctttggcttgccccatagctggtacgtgacaatgcagatctgcgttgtgagcttcctaaattggaaaaacgacttagggctacggctgagagagttaaggccctggagggtgcactgaaggaggccaaggagggcgccatgaaggacaagcgccggtaccagcaggaggtggaccgcatcaaggaggccgttcgctacaagagctcgggcaaacggggccattctgcccagattggtgagtaggtgttagcaggcaaggtgggagtatctcctgaagcaaatttagcaaattgctaattgccaagcaactagattattgcttcttacctacccctagcctcatcccacttccccccaaaaagtaaaaaagtgattatgttacaagcaactcagttcaaccccagctaaatgacctcagggaccagggcaaatgcagggtcatagcctcctcatggttgttttctttctttattgcagccaaacccgtccggcctggccactacccagcatcctcacccaccaacccctatggcacccggagccctgagtgcatcagttacaccaacagcctcttccagaactaccagaatctctacctgcaggccacacccagctccacctcagatatgtagtgagtgaccacacgtgtgggttggagtcccacccaaagctccctggaccctagaaggcatagggtgggggcagttattggttgtggcttaattattttcctaaaccctttctcaacttcatgcctatgattagaaggtaggtgtctgccctcccagcctgtggccatgtttgttttcctctgctctctggggatggggagggctgagcagctctatcactgaggatgagtgtggattagtggtcctcagactagtggagggtgggtgtcagaggctgcctctttcctctgctccatccagctttgcaaactcctgtaccagcagtggagccacatcttctggcggccccttggcttcctaccagaaggccaacatggacaatggtgagtgaaaaagatgggtaatcccacctttggggtcctcagggcaagttgagaggcataaaagtaagtgaccttagtgtacaaaaaacactgactgaacctttctggtgtgccaaggcttcaaataaaaaaaaaaatacatatagccaggtgtggtggcatgcacctgtagtcctagctacttgggaggttgagataggaggattgcttgagctcaggagcttaaggctgaagtgcactgtgaatacacctgtgaatagccactgcactcagcctgggcagcatagtaaagccccatctctaaaataataataataacacatatgaagaaaaaagtgaccctgtacctacagcctgagcactgcccagccctttaggtctcaggctgcctgggagtggattcctcctattaccacgccaatcccagcccttgccttccagttcccttttcctctccttggtgaggggctgcagaaactttttctcgaacaaaataatgatgtagcttgggataactaaggagaaagtgtcacagcttatctttttctctaagggattaagatgggagagggtttgcgcaaactgtttctaacacccaatctccttttttcttcttctaatcctgtgttctcaatgatgatctcttcaggaaatgccacagatatcaatgacaataggtacaacagtccccactacccctgggttctctgggtgggaccagaagaaatgattaaatttcccttgtgccccacttggaggttcctggagcctttggggaagggggagggagtgagactcattcttttcatcactgtgttgtccaggagatccagtcattcccctgcctcagtgcagaatatctcccctcctccaatcccatctgtggcttctccctattccagtgataaggtctggacgaaaacaacgtgggcatctgacgactgggtttctctcctacctttggaagccttgtgacattggacaagtcatttacatccctctggccttgagtttccctgtattcctgtaaaacacaaatagtccctgccgtttgtgatctcacagggacactctcagagcagagtaaccatgatgacaggaatactttaatttctatggagctgatcatggtgggtctcttcctccaggagtgacctgccgtgtggctatgaggctgaggaccaggccaagcttttccctctccaccaagagacagcagccagctaatctcccacacccacggctgcatacctgcactttcaggtagcgtcaggctgcttcctcggaccagcctcaggttgcttcccttcttgctgacagcctctttggttttcctgctgctgcttctttttttttttatcacctcaaaactttaattatgtagttacccctcaactcctgctttcccctgttgggggctacacctgtgctgccccatgtaatctggacgttgacctcccgtgcccccttttgctttccgttaggctacagtggtaaccacagtactgtctttttgccactaggggtcactgtcacatgtccaaagaagtgagcttggccgctgtagattagaaccacaggggtggtagactgcagatctatcaggagaccctagggggccatctcaaccccacctcttcctccaccctgaaataattttggatggataggtgtttttggaactaagacatctccagttaaggcgatgtttgcttcacgcctgcacctgtgtcccatcctcttcccatctgtatatgccaccagtaagctttaggaaacgccccacgaaatcagtcagcgctcccctcccatcttgctcagtggaggtggcaaagcccctctttttcctcctctgtccccaggtgctctcctctagcagcacaggaaccttctttgttcttgtgtgtcactgggtttctcaccaaggttgctttagggcccagaagtggcacagagaacatggccagtctcttactgggctgcatctaagctgagccctctccaggggtttcccagaatagtaaaccaggcacacacaggcagaaaagtctgagaagcagagaagtaggaatgcagaagaggagttggggagacctaggggtggaggtgcaagcctgggtcacggggggcggtggtaggggggtctgcttgttggtattaaaggaacaggacagtaaaccaaagtgtgtgcagatgccacctgttcctgttctgtgactgagctacaagctgggccctcacaccctctttctctttctttcccagtttctaagagggactgaggcctcttctcagcatgctgcaaacctgtggtctctgatactaactccctccccaacccctgttgttggactgtactatgtttgatgtcttctcttacttactctgtatctctttgtactctgtatctatatatcaaaagctgctgctatgtctctcttctgtcttattctcaagtatctactgatgtatttagcaatttcaaagcatagtctaccttccttatttggggcaatagggaggagggtgaatgtttcttctttctcatctactcgtctcacactgagtggtgttagtcactgagtagaggtcacagagatgacaaaaggaaaaatgggagctagagggttgtgacccttcatacacacacgcacgcacgcacacaaacatgcacacacgcatgcacacacacaaagccttaagcagaagaatgtcttagcatcatgagacagagaaatagactcttcctccctcctctttcacatatagcacaggggaaggtaaaatggaagggctgctaattgagacatataattttcttcatacacccctcaccttaatcaaaggattcaggtgttacttctgccctacaaagtctgccttttgcctccctcttcctgttttcccctggactgagaaatgggttgctcaagggaccatttccctttttcttcaagctccttttgatattccctgccccagagctcatgaccagaacccagagctgatttaaaatattttgaaaaatggaggaggcagactgctcccagcagcctgtcaatggctgctcatctgtccatggagatggttacaggcaggtgtagtcaaaatgattgattccttgggtttgggggtgaataggctgggaaatttctgagccttttttttttgtcacagtgccctcaagttgaagtgatgagctggatttctttcttgttccatactgggcggcatgctcctcccatctccaccccttggtttgggggcttccagctcattggcaaaatctctctagttgccttcctttcaagctggagcctgacttttccccaatgtacattttttttttctccacaaagagttccttctctaatgtccccatctggtattaagtgcactttaaagaaaggggcagggtggattttcaagaggtgggaagctctaaggcttgaccctgaggggtcttctcccagccattctcagcccatatgcagcaccctccatactgaagaggactgttgttttagtttcagacggtcctttccttccacatggtgctaaggtggttttctaggtaactgcagggatggaggtcactagccattccaaaccaggagagaaagtctggtgtcctgatatccagtcttttctaggaggaagaccaagattctccagcggcagggcagcctatcacccaacttctaagtcaggaaaggaagctgagtgggaatgccagctggtaagcgcaggctgcactggcccatgactccttcaaggaaaagaggccctgctccctttacctgctgagctccttttagcagttagggagaactgcagggggaaaaataccagtggagtgtggaataaatccaaagcagtgatttttaaatgtttttcaaaaacaaatcttacatagaaccccaatataaaaaataaagtaatgcagacctgggcagtttgcatttttttttttttttttttttggtggaagaagtctcagcgtctcttaggactgactgttcaaaggctcctcagcaaatgagccct

SEQ ID NO: 6033 - DNA, 6000 bp, Homo sapiens; identical to SEQ ID NO: 3239

SEQ ID NO: 6034 - DNA, 6000 bp, Homo sapiens
gaaaagaaaagaaactgaggctagtacaaaggtagcaagcaatctgaattgattgttcagagtcagatcaaactccttgttctactcttccccccttctcactattgcaattaactagtcttaaaaaaatttttttaagtaaaaaataaaagtaagaaactgagtttctgagataataaatggcttgcccacaaccagcaaatggcagaattaggacttgccctctggtcttcaggctctaaatcctgcattctttccaaggtaccagatgaggcctgtctaggaccgtgacactaactgcactcctcacaccacacatgcaagaccttatttgcagggaagggacagaggcctctctgcacagagcatccctgaatgacacttaccggtgctgacttcaggtcattcaaggaaaaatccagactccttctggctctgtgttaccccagaagcatatgagagtccagacctccaatcctgggaaaccactccagtcaaaagtcttccagtctcacttcccaacctggttgcaaccaagtggttgccagctccctctgtcctatgactaccctcctgatccatcatgaggggccacaagtctttgccagcccacctccctccaccccaggaggcttctctccaaggcccacttcctcaaccttattcagtccctgcctctccccaataccctcttcccaggccccaagactcatacccccttacagcagtgagaagcacagtaagaggcaatggtgggcccaaggggcagcagctgtgaacagctagcacaatgctgtcttcaataattcattcccagggaggttgcaggcaccatgccctcaccctgagctagagatggctaccacagctcagatccttaaactgagaagggtgggagtcaagggtgcggcagaggctagtgggagcaagtagaaaggtacccagcctgcaggccagacactggcacctctttgttagagaggggctctgatgtgggctcagagcagggatcccgtgagataaaggaacacgcaaattgccatgagctagaggggcagagaggaagaatccaaacacattgcctcactcccactccctccagctgtacatgccagggtcagcctcttccctcatggctctgaccttctcaaggccaccctcagcctcttgtcagcagccccaccctcctaaaggcccaagtcctctctgctccagctggcatgtttcagctgcccctacttggggaactcttttcccaaagaactcccaccacatgtgcctgtaatctgagtcaaacatcgcagaaccttttccaaggatcctaacccccacctccatctcttttcagcccagcttccctgactaacctctgatgtttacaaagcttgtaaacgtgtgggggtggaggaaggacttgaactgaccccttgggctgtgctgtgctgtgctgtgattcagagtcctaaagctttaggaatttagcgagagcagttccttgcttctagtgagggagagaaggtggtaaattctaggccagcccccacattcccctggccaccctagagatcctgccatcaatacccattctccatgtggggcagccctagagttccactcatgttccaggctcattgctcactgcaatccgttctgtgagactggaatcacctatcatgtgcatcagcagacccagaggggaaactgggatctaagactaaaagaaacatattatcaagcacctactatgtgctaggctgagccggattctgggcagcaagagcatgaagccaatcacctcagccctctcaccttcccctccttcccaggtaccaggaggaacctccaaatgcacacaacagtcatactatctgtcccagagtgagcaagagttaggtcttgaacccacagctgactccccagtctgtccagaggcctgatttgggaaggagggtgcgatcttgctgggcattgtcgcaagaaacccttcagacatatttatagcaaatgctgcatcaggggatggaatctgaaagtgcctcgaagcatcaaataacaccatgagtccagaggcagagcccagaaaaagaaggcactgcagcaggagggattgaggtttgatattggaggaacttcccccagagtaatatctggaactggcaatggggattccctgtggaagctacttccacaggattttctcagaagagaagggataggtacctttttctggtctaggtagaaaagataaaaagggatggacatggtgatctctatctttgtagtatacagactttcaaatatcaaggccactaagcacagttgtgcagattatgccttgctgaggaggcaaacggagactgaaatccagctctagatcagttacctcctgctgcagagctgtgtctgtacagactagccagagtggcttgtaggggccctgccagatatcccaagtcctgacaatcttggggtctgaggacaaggtgagcagggagaagggatgaaggctgcctgggaagccctgggggcctgtttgctagagctcagagcctatatgggccaagttagagggcatagcttccaggaatggatccagggtagaggcccctctcagcagggtgccctgcccagatactatgaggtttgagccagagatgaaggccctgagggagcttgagtggggaggaagaggatatgcgtcttgggcaggccctggagaaggataatcctgccagtcacgtcacagagaagggcctgggagagggcagttctggggacctggaggatgggctgctggctctagctctgaagttcctaccttctctgcagagcaagatggagaaggggcctgtggtccagcagctggggtggaaatgagaaaagtaaggggtggggaactgcccctgtgcacctcagatttcctgtgataggctcatggaggagtaattttttttttttgagacagagactctgtcccccagagtctggagcgcagtagggcgatctcggcctgtctcctgagttcaagcaattctctgcctcagcctcccaagtagctgggaccacaggtgtgcactgccatgcccggctaatttttatattgtttgcagagatgggatttcaccacgttggccaagctggtcttgaactcctagcctcaagtgatctgcccgcctcggcctgccaaagtgctgggattataggcgtgagcctcggcgccaacctcagggagaagtaactgatatttctattttaaagtggaaggtgggccgggcaccgtggctcacgcctgtaatcccaacactttgggaggccgaggcgggcagatcgcttgagatcaggagttggagaccagcctggccaacatggtgaaacctcgtctttactaaaaatacaaaaattagcctggtgtggtggcgtgcctgtagccccagctactcgggaggaggagaatctcttgaacccgggaggcggaggttgctgtgggccgagatcgccaccgcactgcgacctaggcgacagagtgagactccgtctcaaaaataaataaataaataaataaaaataaagtggaaggtggagagatggtttctatgctatagtttcaggcagagaatgtggagggagggaaggagagaaggttgcgggaagccagggacaactgcttgcctgggccaacatcccctctctccccacctcccttctcctatggaaacttaagctgccgcagggcccagcggagctagtccattagctgtggtcagcaggggagtgtaggtggggagggccctctctccctccaggtcttcttgccaaatgaaaggcaaagcgtttgctccctctactagagtcaaaacaaaacaaaaccataaaaacctccacacgcatttttaacacacacaaataacataacttctttcctctgaatggtcgaagctgagcaacttggaggtgggtgggtggtaggggctccgtgacccactagactagactacagagggagtgggggaggaggtgccttctcaaagcactttccaggttaaatccagcctcgggaggagggagtggagagagaatttactctcccccaacttacctccctcagaaatgggggcaagtggagggtcagctgagcagagagggaggaacagtctcccgagatcccggggatgggaggattgaggggaggggtcccggaaactcccaggggaagtgggttaaaagaagggccgggaagaagggtgggacgccctccactggaaaggggagagcgttctagttaatgctgaggggaagttggggacctgggtcaatcggagtcagcgtgtgtctgtctccatgaaggggggtccgtctctccccgccccaggcgccgtctttggtctggagaagggtccagcctggggtcgttgggggtgtgaagggaccaatgagcggtctgtccgctcagaagggtccagagagagagccaactggaactacacccccgctcccccttcccccgccagaacttgggcttgtcctgtttgacgcacccgcagaaaggggcgggaggggtactgacccgaggagcggtcccgcgactctgtactccctgctgcccagtcccggccaggacgctgcccggcttagctggggcgcccctcgagaccaggatggaggtagggacgggctagggtcccggaagggcgcgggtgtctcgaaggagccccacggggtgggaataagtagagcgcagcctggggtctcctactgggggtctcgagctgggactgcagttcctggagaaaggagggggagaggggttcgtcctgggcttgggcggtgtctggatccggggtgcgtcccccctgctctggcctgggcagcgccgcctgctggcagggccggaccctgcggccccgggaccggacaccaggcggtgccgccacctggagggcgcgtgtagccgccgggccagcgagcccaaggggcgctgcagcgggtcgagaaggagccgcgtcgcttcgcctcgcccttccccttcgcggagctgagacccgctgcaccagaacccaggagaggggggagacggcagagactccgcgggcgcggggcgatcccagctgggctctctccacagggatgccgatccctctggagacacagagccgagccggggacgggtggatgggcgccttgacgcttgggcgggcgagcagagcaccagcactcttgcttttcggtcctttcccccgccgaggtcggggtcgcagccgccgccggaggatgggcggccggcgcacggagcagggccgggagggagcagaagcttccgccaagagctcaggagctggggcagccctggagctcttcctgcccttctgcccgcggcggcggaaactccagagtccctactctttctcgggaggactttagggaagaagcagagcggcaggggaagccgaggagcgagggtgcgacgtggggatggaaggacagtgggaggcacacggaaaaacagaacgaggaccttagacaggagagacggaagtggagagaggctgggctgaaaggcagggagagccagagactgacagaggcggcgagaaaggaagggagagggagggagggaggagggaggagaaagagggagggaaccaggggagagggaagggagcaggcggcggagcccggcgggcgtggggcgaggccaggcgtgcaggcgggagcagcgtgcagagcagcggccgggttttgctcccgcctcggagcccctggcccgggggagggggagaggccgctagcctggtctatgtctttttctgactccagtgcaaccttcctgctgaacgaggtaaccgtggggggggtgtggggtcgtgggaagggggttccccactgggtgggaggagagctccgctccaagctaggaagggggcacgcgtttgggggagactgcaccgatggggaggcagggaaaccggaggaagtgaggccaggggtggaagaggcaccggg

SEQ ID NO: 6035 - DNA, 6000 bp, Homo sapiens
gcgggagctctcatcctgccagctcctcatctctcaggtgagtgcctaagtttgagaaccttcagatgccatgggagaaagaaggctactctggggttatggctaaaactcctaacacccacctttatgtcaaagttctggggtcaagtgaaatcaaggacagaaaagctggggtggcaggggtgcagatcagggccaaaaaagtaaaggctcagggcgggtactgccccctgagccatgggagctaaaggaagagccccataggaatggcccccaaccctgcaccctcatgggaagtgtagcaggagggagggctgggaggagagctggagttggagatctgtgtggcctgggtttgtgtcctttgctccatcttcttcctctcaccaactttctcccaccagcatgaggccaagatccgctcgcttacggaatacatgcagagcgtggagctaaagaagcggcacctggaagagtcctatgactccttgagcgatgagctggccaagctccaggcccagggtgaggccttcttatacctccatcccactgtccagggcagaaaagtcagaaacatcaaaataaatcaccccaataatcactcactcaaagcattagcttgaaatcatggatgccaactcatatgttagccaaggttttgcatgtagctcattttacattaaccatacacccttgttctctgttcctgctatatcaaattggacagtcctaacacagaagaacatccctgtgggtccattcccagccctgcctggagttctggtcacaacgtgaagttctttccgaaagaggtaggtttgatgtcagctgtcttcccctctttcccttagaaactgtgcatgaagtggccctgaaggacaaggagcctgacactcaggatgcagatgaagtgaaggtgagtaaggaaggtgtcagggacaattggggcctggtgtggtgaaagctgtgctggccctcacagagcttgttgctgggagtctggcctttgagcttggggtggggttgtttgcagaaggctctggagctgcagatggagagtcaccgggaggcccatcaccggcagctggcccggctccgggacgagatcaacgagaagcagaagaccattgatgagctcaaagagtaagggttcccaagggcgactccagcccctcccgggtcctgtcaccttgctgtattgactcacatgtcccctctgggtctgattctttaacatccatgtgtcattccctcaacaatgccacaacttcgtagccccacctcaggagacacatggaataacgactagtccctatccttgagggtcccaggattagagaggtcagggttcctggctctgtcatggaaacagtggcctgagtctgcctctggtatctgaaggtggacacatcaattctaactggactcactcgttcaaaaaggaagaagtttgaagagctggccttcccttccccctcattaacatctttctcccccatctccattaccttctgatgctctgtagcctaaatcagaagctccagttagagctagagaagcttcaggctgactacgagaagctgaagagcgaagaacacgagaagagcaccaagctgcaggagctgacgtgagtggcatggatttacctgtaaaactacagccttgtaggctcagaactgtgaactcagacacgcttgcagaggcaggacacacatgcagacatgatagggtgactcatgggaaaaatatgatggggtagggacgggaccaaaaggacactctcagcaaagactgccgttgagtattcaccagtatggaaggaggtttacgtgttctattcagtgtaaaaacaggttacaaaaccatatgcatggtatgatcccataaaaatgtatacatggatatgtaggcatagaaaaaagtctagaaaggtggacaccagaaggttaatgttggtttgatctgtaaatagtagaatcataggctttttataaaaactcaccttatgtctctctttaaaattcttttctaatttttgcacagtaaacatgagtaacttgtgtaataaataataataggctgggtgcgatggcttacacctataatctcagcactttgggaggccaaagcaggtggactgcttgagctcagtagttcgagaccagcctgggcaacatggcaaaaccctgtctctactaaaaatacaaaaattagctgggcatggtggcatacgtctgtggtcccagatgcttgggaggctgaggtgggaaggatcccttgagcccaggaggttgaggctgcagtgagccctgattgtgccactgtactctatctagcctaggtaacagaatgagaccctgtttcacaaaataacaataatagtaatacttaaatggagataaaagtaatagaggaagaggcaggaggaaggagagtcctgagggatctttccatttcccttatttctcttgctacagatttctgtacgagcgacatgagcagtccaagcaggacctcaagggtctggaggagacagttgtgagtggttcccttctgtgccaaattcacaggactggggagtggggaggcttcatttcttcctaaccctattcctcctgcccttttgcagccattctgtagcgtaatcaagacacattttttcctaaaggataagtgactcacttgattatagagactggaggtacctataattctggaggaataggacagacctggtatctggctattcccaatttttcatcattctttccaggcccgggaactccagaccctccacaaccttcgcaagctgttcgttcaagacgtcacgactcgagtcaagaaagtgagtgctgtccttggggttttgtcagcccccacatcctcctcctatccttaggtttctcctgcccctgttgcccctatggggctggcttggcctggtcttggtgggacctgtttggcctcaggacagccacgtctttccttctatctgttctcagagtgcagaaatggagcccgaagacagtggggggattcactcccaaaagcagaagatttcctttcttgagaacaacctggaacagcttacaaaggttcacaaacaggtaagagtctgctgaaggagtgaagagaatttttgaggccgggtagctagcataccaaatcctcagaggccccttggattcaggaaaatctagttgcatgttttccttactgttcgcttttactttccctactaatcccttctttataccatatttggtccacttgtaccttgttctttgtttcatgcctgtattcccttctcaaagtttctaacccacctctgctcaaagtggaattccccaggcctaccttggagggagaggttgaaactaacagaggcatgggctgtaactatacaggagggagactggtcagacgttacccagagatggaaggcagggagatgagaagaagcaagggagttgggcttctttcgtggagagaactccatctgtctaggtctgtggcaggcatgcagggacattaaatgatgtccctggctaggcacagtggtgcatgcctgtagtcccagcgcttcaggaagccgaggcgggcggatcacttgagcacaggagttcaagaccagcctaagcaacatggcgaaaccccatctctacaaaaaatacaaaaattagccggatgtggtggcacacacccatagtcccagctacttgggaggctgaggtagggcaattgcttgagcgcaggaagtagaggctgcagtgagctgtgatcatgccactgcactccagcctaggtgacagagtgagaccctgtttcaattaaaaaaaaatgatgtccctaagatggcccaaccagcccctggttggggccccagtcaaaactcctgtgtattaagttgctgcctctctgtccccctccttgctgttgcggttctttaggtggatgactgggtttcaaaggtatgggctggggatgcagaagggcagtccaaaggagtcaggacaggaaatgtttggtgcatgctgggtaggggcactctcactagcactaaatatctgagccttgaagacaggctcggcaggctgtcaactggtccttttaactaattcataaaataaaccctaacctatacttcattcctttcctttcaaatctaccttaagattccatttaaacttacattctcactagcctagcacttaaacttcttttcctcccagtataatgcccagcttatatagtaaatattcagtacttttttttttcttaatgaatcctaaacctgtgcccagtgataatgtacagagtttatttatcttatttaggcctgcagagggctttgctacgattttatttcctttattatgaaactgagtaacaaaattatagaaaagttgaaaggcagataggaaacatttgaaatcaattctgccattcgattttcattcccgcattcactttccctctctgtccaaatccatattatgttgcttagaacacacacacacatgtgtgtgctactctgggcctctctgcctatgggaaagccctgctctatggagcaagccccagaaaaatttccatgaaaaaacacaaccacacactgtttcctttatcgtcactgaagcctctgcctctgttcaaagtcccaaaaaaacaaaaatgactcacctataggataaatagaggactcactacaatttcctacctcagcagacacaagagtaaaaaggaaaaggagataaaaacttctcagttaagagaatcttaacagccaggactatagccctatatcaattaagctaaagtattgtcacagcaaaacattgcttatactccataaattgtccaaatggaaactgcatggaagggtttctagcttgtccccttgagcccccagtgttccccgctatgctgatttacccgctgtcttccaaggccctgctccttttgcaacctatagtgcccccagtcattgtgtggaacctgtaaaaagatcaggaagtcttttcgggctgcagggtggttgctcccatgctctagcttaatttcactgggggagggataacccaggaagtccttgaatgtgaaggtaatgagtgcaaatgtttgtgagacctcaaacattttctttccttcctacggggcgggctctgcctgtctatatgtgtatgtcaggggctcctgaattccagcttctgctcctgctctgcactgcacctgccatgcacagattctcctcaatgccacagccaccaaactgctactgtgcccttgctgccccaccctttgcatgcccacaaagccctctctggggaagcgggtccctcatccccatggccgccctggggctattgatctggcacatgctgggagatgtgggggaaaccagatggagacaggacaaggcgctctcacaagagttctgggctgcagtggagatggcaggttttactgcctagaaaattatataacttttaaatgcctgaccacccacccttcgctctgggagaaggaatgagctggacagaacagtccattacataaaggcaatgaggccttttgaggaaatgacatggtctccatcttctctgactcctgatttttctttattctctctcctcacccctgtcccctacgctcctctgggtgaccgtcttgggtcacttgccttcctttccacttcttccctttggcttgccccatagctggtacgtgacaatgcagatctgcgttgtgagcttcctaaattggaaaaacgacttagggctacggctgagagagttaaggccctggagggtgcactgaaggaggccaaggagggcgccatgaaggacaagcgccggtaccagcaggaggtggaccgcatcaaggaggccgttcgctacaagagctcgggcaaacggggccattctgcccagattggtgagtaggtgttagcaggcaaggtgggagtatctcctgaagcaaatttagcaaattgctaat

SEQ ID NO: 6036 - DNA, 6000 bp, Homo sapiens
agcaggtcacattagtatgggattcctgaactagatttaagataggccctctttacttcacactccttctttcttcttaaccaggtttcttactttgaaatttacctggacaaaattcgtgaccttctggatggtgagtgttttgtcccagtggatgagggtgtgtgaggagggtggagaaaagaaagctcacattgcatttggaattaggtaccaattgacaagagatgcagagggcacacagcacccaagtcttttggccccgtttaccagaatttccaaaaactgagaaggtcaggagatgagcttagcagccaaggactacatataaacagttcgagaggatctggggccgaggagcaggagccctgaggaggagaaggaggaggaactgagccttcagctcgtgcagggagtttaggcttcacagggagagtcttcctttagcacagagaagaaaaccaccatctgagctgactgcaaggtgcagatgggggcggtggaagtactagtcttgcttaccctgcattcttttgattcagtgaccaagacaaatctgtccgtgcacgaggacaagaaccgggtgccatttgtcaaggtgagagtgggtgtggggcacctatgtggggccagtgtattgagaatgttggtgggggaggagcataggtcagtgaccctgaagttggagggtggatatcctggaggaatgagatgtgcctaggggccagggagagtctaggggatcagaaaagatactgtcttggctgggcatggtggctcatacctgtaatcccagcactttgggaggctgaggtgggtggatcacttgaggccgggagttcaagaccagcctggccaatatagtgaaaccccgtttctactaaaaatacaaaaaattaactgggcgtggtggcacatgcttgtaatcccagctatttgggacactgaagcaggagaatctcttgaacctgggaggcagaggttgcggtgagccgagattgcgccactgcactccagcctgggcgacagagtgagaacctgtctttaaaaaaaaagaagaaaagaaaagatactgtcttgaaaggtcattggtcagtgtgcatgcaatttaatttgcaaatcaaagtttactggaagaaatgcctgtaatcccaacactttagaaggctgaggtgggaggatcacttgaggagttcaagatcagcctggccaacatagcaagacccgtctctcttatttaatctaattttttttttttttttttttggagacagagtctcactctgttgcccaggctggagtgcagtggctcgacctagggtcactgcaacctccctgtcctgggttcaaacgattctcctgcgtcaggctcccgagtagctgggactacaggcatgtgccaccacgcctggctgattttagtatttttagtagagacggggtttcaccatgttggccaggctggtctctaattcctgacctcaggtgatccacctgcctcagcctcccaaagtgctggaattacaggcatgagccactatgctgagtctcttgtttaaaaaaaaaaaaaaatttttgtcaggcatggtggcacacacctgtagtcccagctactcaggaggctgaggcgggagaattgcttgagctcaagagtttgaggttgcagtgagccatgatagtgccactgcactccagcctgtgtagtagagagacagtggttttttttgtttgtttgtttttgtttttggagacagattctcactctgtcacccaggctgtagtgcaatggcatgatcttggctcactgcaacctctgcctcctgggttcaagtgattctcctgcctcagcctcccaagcatatgggattataggtgcctgccaccaggcccacttatttttgtatttttagtagagatggggtttcaccatgttagccaggctagtctcgaactcctgacctcaggtgatccgcccacctcagcctcccagtgtgctggcattacaggcataagccactgcacctggctgcgacagtgtttttttttttttgagacagagtttctctcttgttgcccaggctggggtacagtggcgcccgatcttggcttactgcaacctcagcctcccgagttcaagtgattctcctgcctcagcctcctgagtagctggaattacaggcatgtgccaccacgtctggctaattttgtatttttagtggagatgggattttgccatgttggccaggctggtcacgaactcctgacctcaggtgatccacccacattggcctcccaaaccaaagtgctgggattacaggcgtgagccaccatgcccgccactgtttcaaaaaagtagtaaatacgtaagataaaaataaatacaaagcagggcatggtggctcaagcctgtaatcccagcactttgggaggccaaggcaggcggatcacgaggtcaggactttgagaccagcctgaccaacatggtgaaaccccgtctctactaaaaatacaaaaattagccgggcgtgttggctcatgcctgtaatcccagctactctggaggctgaggcaagagaatcgcttgaacctgggaggtggaggttgcagtgagctgagattcttgacactgcactccagcctgggcagagcgagactccatctcaaaagaaaataataataataaaaataaataaataaatacaaacttaaaaaacaaagcttatgggtcactgtccatttgtcccccacagggttgtactgaacgctttgtgtccagcccggaggagattctggatgtgattgatgaagggaaatcaaatcgtcatgtggctgtcaccagtgagtgaggatacaaggggatctctcgagtctgaggatccacttgtgttctgtgtcctctggggtggagggactcaaaagtgagcaaggaaactgtaccccccagaggaggaggaccccttgtctgtgggaccctgctgcctgggagatgtggcagcagggctagtcctggtgggcaccttctctctgggtgggcggggctggggtcagtggaagccgggggctgaggacctcagttctgcagggtggtgcaggtcctgtttctcccttgctcctgcagacatgaatgaacacagctctcggagccacagcatcttcctcatcaacatcaagcaggagaacatggaaacggagcagaagctcagtgggaagctgtatctggtggacctggcagggagtgagaaggtagggggtcctgtggatatggggtgggtggaagccttggctctttttttttttttttttgagacagagtctcactctgtcgcccgggctggtttgcagtggcacgatctctgttcactgcaacctccgcctcctgggtttaagtgattctcctgcctaaaccttccaagtagctgggattacaggtgcccaccaccacgcctggctaattttttgtatttttagtagagaggggatttcactgtgttggccaggctggtccttggctctttttttttttttgagacggattcttgctctgtcacccaggttggagtgcagtggcacgctctcagctcactgcaacccctgcctcccaggttcaagtgattttcctgcctcagcctccctagtagctgggattacaggctcccgccaccaagcccagctaatttttgtatttttagtagagacggggtttcaccatgttggccaggctggtctcgaactcctgacctcgggatccacctgcctcggcctcccaaagtgctgggactacaggcatgagccactgtgcccggccgactcttttttaactaaaaaatgatttgcattgggatataattcacataccataaagttcaccattttaaagtgcaattcagttgtttgtagtatgttcccaaggttgtgcaaccattacgctatccaattctagagcactgtcatcttctattcacagtcactctccattgtcccctaaccccatcccctgtcaacttctaatctactttctgtctctatggatttgcctatcctgaacatttcatataaatggaatcatatggctgggcacggtggctcacacctgtaatcccagcactttgcgaggccgaggtgggtggatcacctgaggtcgggagttcgagaccagcctggccaacatagagaaaccccatctctacaaaaaatgcaaaattagctgggcgtggtggcacatgcctgtaatcccagctgctcaggaggctgaggcaggataaccgcttgaacctgggaggcggaggttgtggtgagctgagatcgcaccattgcactccagcctgcgcaacaagagtgaaactccatctcaaaaaaaaaaaaaggaatcatgtaatatgtggcaggggttaggggcaatgtggtgtttgacaagacagtttaggggaacagaggaagggccttccccaatcccagccaagcatctctgttactccatcttcttccctgttccttccttcctccgtggactgagccctggaacgaggtggtgacagccctctccatgtgcagctgctcatacacactcatctcttactgccctggtaggtcagcaagactggagcagagggagccgtgctggacgaggcaaagaatatcaacaagtcactgtcagctctgggcaatgtgatctccgcactggctgagggcactgtgagtgatccttaggtcccctcacccctcaagccacaccccatctcctcccccacctgctaatgccaccatatgatcatgccccaattcatgggttgtctgatcccggggtggcaccactatcctttctgattccctgttgaattttatttgtttatttctgattcctggtctccttcctcccccagaaaagctatgttccatatcgtgacagcaaaatgacaaggattctccaggactctctcgggggaaactgccggacgactatgttcatctgttgctcaccatccagttataatgatgcagagaccaagtccaccctgatgtttgggcagcggtcagtggcagggtccccagagggatccctggtacccagcttcccatcccagcctctgcggctctctctcctcagggtcacccaagtctcatgttgctctcatttctttgttcctcttctcctcacccagggcaaagaccattaagaacactgcctcagtaaatttggagttgactgctgagcagtggaagaagaaatatgagaaggagaaggagaagacaaaggcccagaaggagacgattgcgaagctggaggctgagctgagccggtggcgcaatggttagagagggataggtgggagtgaggggcagtgggaagaggaggaggatgtttgggagccaactctgtttgggtggtgtttctggccaggccaatctcctagaagaggggctgtgtttctggacaggtgcagtagagcagtcatgggggaagggaggggcctgactacctacctcccatactcccaaaaggtagagggtccacctggcaagagagttcaaggggcatggtgagtgagaaggaagaactcgtggatgcagcttcttcttcttccatctctcacctcgtcttgcccctttgcaggagagaatgtgcctgagacagagcgcctggctggggaggaggcagccctgggagccgagctctgtgaggagacccctgtgaatgacaactcatccatcgtggtgcgcatcgcgcccgaggagcggcagaaatacgaggaggagatccgccgtctctataagcagcttgacgacaaggtgagggcggccaggcagggcactgaggcacgccaggtgggatgagaggtagacgatcaaagaaaatcgcttatattgcctctttctggttttaaaagggataaatgcttatgcttgaaatgtggaaacatcaatataaatgtatgtaagaaaattaaaatcatccactattcagagataacactcaacattttgcttttctctgtgcatata
